United States Patent Application Publication US 2026/0286329 A1, published September 24, 2026 (application 19/670,372).

The application's sequence listing, which the Patent Office published only in electronic form, follows.

SEQUENCE LISTING (3530 sequences)

SEQ ID NO: 1 - RNA, 55 nt, synthetic construct
  misc_feature 1..55: note = Synthetic
  source 1..55: mol_type = other RNA
gttttagaaagttaaaataaggctagtccgttatcacgggcaccgagtcggtgct

SEQ ID NO: 2 - RNA, 59 nt, synthetic construct
  misc_feature 1..59: note = Synthetic
  source 1..59: mol_type = other RNA
gttttagagcgcaagttaaaataaggctagtccgttatcacgggcaccgagtcggtgct

SEQ ID NO: 3 - RNA, 63 nt, synthetic construct
  misc_feature 1..63: note = Synthetic
  source 1..63: mol_type = other RNA
gttttagagctatagcaagttaaaataaggctagtccgttatcacgggcaccgagtcggtgct

SEQ ID NO: 4 - RNA, 80 nt, synthetic construct
  misc_feature 1..80: note = Synthetic
  source 1..80: mol_type = other RNA
gttttagagctagaaatagcaagttaaaataaggctagtccgttatcaacttgaaaaagtggcaccgagtcggtgctttt

SEQ ID NO: 5 - RNA, 71 nt, synthetic construct
  misc_feature 1..71: note = Synthetic
  source 1..71: mol_type = other RNA
gttttagagctagaaatagcaagttaaaataaggctagtccgttatcacgaaagggcaccgagtcggtgct

SEQ ID NO: 6 - RNA, 62 nt, synthetic construct
  misc_feature 1..62: note = Synthetic
  source 1..62: mol_type = other RNA
gttttagagtatagcaagttaaaataaggctagtccgttatcacgggcaccgagtcggtgct

SEQ ID NO: 7 - RNA, 58 nt, synthetic construct
  misc_feature 1..58: note = Synthetic
  source 1..58: mol_type = other RNA
gttttagaggcaagttaaaataaggctagtccgttatcacgggcaccgagtcggtgct

SEQ ID NO: 8 - RNA, 61 nt, synthetic construct
  misc_feature 1..61: note = Synthetic
  source 1..61: mol_type = other RNA
gttttagagctatagcaagttaaaataaggcgtccgttatcacgggcaccgagtcggtgct

SEQ ID NO: 9 - RNA, 22 nt, synthetic construct
  misc_feature 1..22: note = Synthetic
  source 1..22: mol_type = other RNA
gttttagagctatgctgtttgg

SEQ ID NO: 10 - RNA, 19 nt, synthetic construct
  misc_feature 1..19: note = Synthetic
  source 1..19: mol_type = other RNA
gttttagagctatgctgtg

SEQ ID NO: 11 - RNA, 16 nt, synthetic construct
  misc_feature 1..16: note = Synthetic
  source 1..16: mol_type = other RNA
gttttagagctatgcg

SEQ ID NO: 12 - RNA, 13 nt, synthetic construct
  misc_feature 1..13: note = Synthetic
  source 1..13: mol_type = other RNA
gttttagagctag

SEQ ID NO: 13 - RNA, 22 nt, synthetic construct
  misc_feature 1..22: note = Synthetic
  source 1..22: mol_type = other RNA
gttttagagtatgctgtttggt

SEQ ID NO: 14 - RNA, 21 nt, synthetic construct
  misc_feature 1..21: note = Synthetic
  source 1..21: mol_type = other RNA
gttttagagtatgtgtttggt

SEQ ID NO: 15 - RNA, 66 nt, synthetic construct
  misc_feature 1..66: note = Synthetic
  source 1..66: mol_type = other RNA
accaaacagcatagcaagttaaaataaggctagtccgttatcacgaaagggcaccgagtcggtgct

SEQ ID NO: 16 - RNA, 65 nt, synthetic construct
  misc_feature 1..65: note = Synthetic
  source 1..65: mol_type = other RNA
ccaaacagcatagcaagttaaaataaggctagtccgttatcacgaaagggcaccgagtcggtgct

SEQ ID NO: 17 - RNA, 62 nt, synthetic construct
  misc_feature 1..62: note = Synthetic
  source 1..62: mol_type = other RNA
cacagcatagcaagttaaaataaggctagtccgttatcacgaaagggcaccgagtcggtgct

SEQ ID NO: 18 - RNA, 59 nt, synthetic construct
  misc_feature 1..59: note = Synthetic
  source 1..59: mol_type = other RNA
cgcatagcaagttaaaataaggctagtccgttatcacgaaagggcaccgagtcggtgct

SEQ ID NO: 19 - RNA, 56 nt, synthetic construct
  misc_feature 1..56: note = Synthetic
  source 1..56: mol_type = other RNA
ctagcaagttaaaataaggctagtccgttatcacgaaagggcaccgagtcggtgct

SEQ ID NO: 20 - RNA, 61 nt, synthetic construct
  misc_feature 1..61: note = Synthetic
  source 1..61: mol_type = other RNA
ccaaacagcatagcaagttaaaataaggctagtccgttatcacgggcaccgagtcggtgct

SEQ ID NO: 21 - RNA, 22 nt, synthetic construct
  misc_feature 1..22: note = Synthetic
  source 1..22: mol_type = other RNA
gttttagagctatgctgttttg

SEQ ID NO: 22 - RNA, 76 nt, synthetic construct
  misc_feature 1..76: note = Synthetic
  source 1..76: mol_type = other RNA
gttttagagctagaaatagcaagttaaaataaggctagtccgttatcaacttgaaaaagtggcaccgagtcggtgc

SEQ ID NO: 23 - RNA, 77 nt, synthetic construct
  misc_feature 1..77: note = Synthetic
  source 1..77: mol_type = other RNA
gttttagagctagaaatagcaagttaaaataaggctagtccgttatcaacttgaaaaagtggcaccgagtcggtgct

SEQ ID NO: 24 - RNA, 68 nt, synthetic construct
  misc_feature 1..68: note = Synthetic
  source 1..68: mol_type = other RNA
gttttagagctagaaatagcaagttaaaataaggctagtccgttatcaacttggcaccgagtcggtgc

SEQ ID NO: 25 - RNA, 68 nt, synthetic construct
  misc_feature 1..68: note = Synthetic
  source 1..68: mol_type = other RNA
gttttagagctagaaatagcaagttaaaataaggctagtccgttatcaaaatggcaccgagtcggtgc

SEQ ID NO: 26 - RNA, 69 nt, synthetic construct
  misc_feature 1..69: note = Synthetic
  source 1..69: mol_type = other RNA
gttttagagctagaaatagcaagttaaaataaggctagtccgttatcaaaatggcaccgagtcggtgct

SEQ ID NO: 27 - RNA, 70 nt, synthetic construct
  misc_feature 1..70: note = Synthetic
  source 1..70: mol_type = other RNA
gttttagagctagaaatagcaagttaaaataaggctagtccgttatcacgaaagggcaccgagtcggtgc

SEQ ID NO: 28 - RNA, 69 nt, synthetic construct
  misc_feature 1..69: note = Synthetic
  source 1..69: mol_type = other RNA
ggttttagagctagaaatagcaagttaaaataaggctagtccgttatcaaaatggcaccgagtcggtgc

SEQ ID NO: 29 - RNA, 88 nt, synthetic construct
  misc_feature 1..88: note = Synthetic
  source 1..88: mol_type = other RNA
gttttagagcgcaagttaaaataaggctagtccgttatcacgggcaccgagtcggtgctgccatctggagcagtgatctggcctgcag

SEQ ID NO: 30 - RNA, 89 nt, synthetic construct
  misc_feature 1..89: note = Synthetic
  source 1..89: mol_type = other RNA
gttttagagcgcaagttaaaataaggctagtccgttatcacgggcaccgagtcggtgctgccatctggagcagtgatctggcctgcagt

SEQ ID NO: 31 - RNA, 90 nt, synthetic construct
  misc_feature 1..90: note = Synthetic
  source 1..90: mol_type = other RNA
gttttagagcgcaagttaaaataaggctagtccgttatcacgggcaccgagtcggtgctgccatctggagcagtgatctggcctgcagtt

SEQ ID NO: 32 - RNA, 91 nt, synthetic construct
  misc_feature 1..91: note = Synthetic
  source 1..91: mol_type = other RNA
gttttagagcgcaagttaaaataaggctagtccgttatcacgggcaccgagtcggtgctgccatctggagcagtgatctggcctgcagttt

SEQ ID NO: 33 - RNA, 90 nt, synthetic construct
  misc_feature 1..90: note = Synthetic
  source 1..90: mol_type = other RNA
gttttagagctatagcaagttaaaataaggctagtccgttatcacgggcaccgagtcggtgctgccatctggagcagtgatctggcctgc

SEQ ID NO: 34 - RNA, 92 nt, synthetic construct
  misc_feature 1..92: note = Synthetic
  source 1..92: mol_type = other RNA
gttttagagctatagcaagttaaaataaggctagtccgttatcacgggcaccgagtcggtgctgccatctggagcagtgatctggcctgcag

SEQ ID NO: 35 - RNA, 71 nt, synthetic construct; identical to SEQ ID NO: 5
  misc_feature 1..71: note = Synthetic
  source 1..71: mol_type = other RNA

SEQ ID NO: 36 - RNA, 85 nt, synthetic construct
  misc_feature 1..85: note = Synthetic
  source 1..85: mol_type = other RNA
gttttagagcgcaagttaaaataaggctagtccgttatcacgggcaccgagtcggtgcaaatagacacgtaatcttactggaagt

SEQ ID NO: 37 - RNA, 85 nt, synthetic construct
  misc_feature 1..85: note = Synthetic
  source 1..85: mol_type = other RNA
gttttagagctatagcaagttaaaataaggctagtccgttatcacgggcaccgagtcggtgcgcaagatggcagcgcgaacagct

SEQ ID NO: 38 - RNA, 58 nt, synthetic construct
  misc_feature 1..58: note = Synthetic
  source 1..58: mol_type = other RNA
gttttagagcgcaagttaaaataaggctagtccgttatcacgggcaccgagtcggtgc

SEQ ID NO: 39 - RNA, 62 nt, synthetic construct
  misc_feature 1..62: note = Synthetic
  source 1..62: mol_type = other RNA
gttttagagctatagcaagttaaaataaggctagtccgttatcacgggcaccgagtcggtgc

SEQ ID NO: 40 - RNA, 70 nt, synthetic construct
  misc_feature 1..70: note = Synthetic
  source 1..70: mol_type = other RNA
gttttagacgtagaaatacgaagttaaaataaggctagtccgttatcacgaaagggcaccgagtcggtgc

SEQ ID NO: 41-100 - skipped (60 entries)

SEQ ID NO: 101 - RNA, 75 nt, synthetic construct
  misc_feature 1..75: note = Synthetic
  variation 1..20: note = n is a, c, g, or u
  source 1..75: mol_type = other RNA
nnnnnnnnnnnnnnnnnnnngttttagaaagttaaaataaggctagtccgttatcacgggcaccgagtcggtgct

SEQ ID NO: 102 - RNA, 79 nt, synthetic construct
  misc_feature 1..79: note = Synthetic
  variation 1..20: note = n is a, c, g, or u
  source 1..79: mol_type = other RNA
nnnnnnnnnnnnnnnnnnnngttttagagcgcaagttaaaataaggctagtccgttatcacgggcaccgagtcggtgct

SEQ ID NO: 103 - RNA, 83 nt, synthetic construct
  misc_feature 1..83: note = Synthetic
  variation 1..20: note = n is a, c, g, or u
  source 1..83: mol_type = other RNA
nnnnnnnnnnnnnnnnnnnngttttagagctatagcaagttaaaataaggctagtccgttatcacgggcaccgagtcggtgct

SEQ ID NO: 104 - RNA, 100 nt, synthetic construct
  misc_feature 1..100: note = Synthetic
  variation 1..20: note = n is a, c, g, or u
  source 1..100: mol_type = other RNA
nnnnnnnnnnnnnnnnnnnngttttagagctagaaatagcaagttaaaataaggctagtccgttatcaacttgaaaaagtggcaccgagtcggtgctttt

SEQ ID NO: 105 - RNA, 91 nt, synthetic construct
  misc_feature 1..91: note = Synthetic
  variation 1..20: note = n is a, c, g, or u
  source 1..91: mol_type = other RNA
nnnnnnnnnnnnnnnnnnnngttttagagctagaaatagcaagttaaaataaggctagtccgttatcacgaaagggcaccgagtcggtgct

SEQ ID NO: 106 - RNA, 82 nt, synthetic construct
  misc_feature 1..82: note = Synthetic
  variation 1..20: note = n is a, c, g, or u
  source 1..82: mol_type = other RNA
nnnnnnnnnnnnnnnnnnnngttttagagtatagcaagttaaaataaggctagtccgttatcacgggcaccgagtcggtgct

SEQ ID NO: 107 - RNA, 78 nt, synthetic construct
  misc_feature 1..78: note = Synthetic
  variation 1..20: note = n is a, c, g, or u
  source 1..78: mol_type = other RNA
nnnnnnnnnnnnnnnnnnnngttttagaggcaagttaaaataaggctagtccgttatcacgggcaccgagtcggtgct

SEQ ID NO: 108 - RNA, 81 nt, synthetic construct
  misc_feature 1..81: note = Synthetic
  variation 1..20: note = n is a, c, g, or u
  source 1..81: mol_type = other RNA
nnnnnnnnnnnnnnnnnnnngttttagagctatagcaagttaaaataaggcgtccgttatcacgggcaccgagtcggtgct

SEQ ID NO: 109 - RNA, 42 nt, synthetic construct
  misc_feature 1..42: note = Synthetic
  variation 1..20: note = n is a, c, g, or u
  source 1..42: mol_type = other RNA
nnnnnnnnnnnnnnnnnnnngttttagagctatgctgtttgg

SEQ ID NO: 110 - RNA, 39 nt, synthetic construct
  misc_feature 1..39: note = Synthetic
  variation 1..20: note = n is a, c, g, or u
  source 1..39: mol_type = other RNA
nnnnnnnnnnnnnnnnnnnngttttagagctatgctgtg

SEQ ID NO: 111 - RNA, 36 nt, synthetic construct
  misc_feature 1..36: note = Synthetic
  variation 1..20: note = n is a, c, g, or u
  source 1..36: mol_type = other RNA
nnnnnnnnnnnnnnnnnnnngttttagagctatgcg

SEQ ID NO: 112 - RNA, 33 nt, synthetic construct
  misc_feature 1..33: note = Synthetic
  variation 1..20: note = n is a, c, g, or u
  source 1..33: mol_type = other RNA
nnnnnnnnnnnnnnnnnnnngttttagagctag

SEQ ID NO: 113 - RNA, 42 nt, synthetic construct
  misc_feature 1..42: note = Synthetic
  variation 1..20: note = n is a, c, g, or u
  source 1..42: mol_type = other RNA
nnnnnnnnnnnnnnnnnnnngttttagagtatgctgtttggt

SEQ ID NO: 114 - RNA, 41 nt, synthetic construct
  misc_feature 1..41: note = Synthetic
  variation 1..20: note = n is a, c, g, or u
  source 1..41: mol_type = other RNA
nnnnnnnnnnnnnnnnnnnngttttagagtatgtgtttggt

SEQ ID NO: 115 - RNA, 96 nt, synthetic construct
  misc_feature 1..96: note = Synthetic
  variation 1..20: note = n is a, c, g, or u
  source 1..96: mol_type = other RNA
nnnnnnnnnnnnnnnnnnnngttttagagctagaaatagcaagttaaaataaggctagtccgttatcaacttgaaaaagtggcaccgagtcggtgc

SEQ ID NO: 116 - RNA, 97 nt, synthetic construct
  misc_feature 1..97: note = Synthetic
  variation 1..20: note = n is a, c, g, or u
  source 1..97: mol_type = other RNA
nnnnnnnnnnnnnnnnnnnngttttagagctagaaatagcaagttaaaataaggctagtccgttatcaacttgaaaaagtggcaccgagtcggtgct

SEQ ID NO: 117 - RNA, 88 nt, synthetic construct
  misc_feature 1..88: note = Synthetic
  variation 1..20: note = n is a, c, g, or u
  source 1..88: mol_type = other RNA
nnnnnnnnnnnnnnnnnnnngttttagagctagaaatagcaagttaaaataaggctagtccgttatcaacttggcaccgagtcggtgc

SEQ ID NO: 118 - RNA, 88 nt, synthetic construct
  misc_feature 1..88: note = Synthetic
  variation 1..20: note = n is a, c, g, or u
  source 1..88: mol_type = other RNA
nnnnnnnnnnnnnnnnnnnngttttagagctagaaatagcaagttaaaataaggctagtccgttatcaaaatggcaccgagtcggtgc

SEQ ID NO: 119 - RNA, 89 nt, synthetic construct
  misc_feature 1..89: note = Synthetic
  variation 1..20: note = n is a, c, g, or u
  source 1..89: mol_type = other RNA
nnnnnnnnnnnnnnnnnnnnggttttagagctagaaatagcaagttaaaataaggctagtccgttatcaaaatggcaccgagtcggtgc

SEQ ID NO: 120 - RNA, 90 nt, synthetic construct
  misc_feature 1..90: note = Synthetic
  variation 1..20: note = n is a, c, g, or u
  source 1..90: mol_type = other RNA
nnnnnnnnnnnnnnnnnnnngttttagagctagaaatagcaagttaaaataaggctagtccgttatcacgaaagggcaccgagtcggtgc

SEQ ID NO: 121 - RNA, 108 nt, synthetic construct
  misc_feature 1..108: note = Synthetic
  variation 1..20: note = n is a, c, g, or u
  source 1..108: mol_type = other RNA
nnnnnnnnnnnnnnnnnnnngttttagagcgcaagttaaaataaggctagtccgttatcacgggcaccgagtcggtgctgccatctggagcagtgatctggcctgcag

SEQ ID NO: 122 - RNA, 109 nt, synthetic construct
  misc_feature 1..109: note = Synthetic
  variation 1..20: note = n is a, c, g, or u
  source 1..109: mol_type = other RNA
nnnnnnnnnnnnnnnnnnnngttttagagcgcaagttaaaataaggctagtccgttatcacgggcaccgagtcggtgctgccatctggagcagtgatctggcctgcagt

SEQ ID NO: 123 - RNA, 110 nt, synthetic construct
  misc_feature 1..110: note = Synthetic
  variation 1..20: note = n is a, c, g, or u
  source 1..110: mol_type = other RNA
nnnnnnnnnnnnnnnnnnnngttttagagcgcaagttaaaataaggctagtccgttatcacgggcaccgagtcggtgctgccatctggagcagtgatctggcctgcagtt

SEQ ID NO: 124 - RNA, 111 nt, synthetic construct
  misc_feature 1..111: note = Synthetic
  variation 1..20: note = n is a, c, g, or u
  source 1..111: mol_type = other RNA
nnnnnnnnnnnnnnnnnnnngttttagagcgcaagttaaaataaggctagtccgttatcacgggcaccgagtcggtgctgccatctggagcagtgatctggcctgcagttt

SEQ ID NO: 125 - RNA, 110 nt, synthetic construct
  misc_feature 1..110: note = Synthetic
  variation 1..20: note = n is a, c, g, or u
  source 1..110: mol_type = other RNA
nnnnnnnnnnnnnnnnnnnngttttagagctatagcaagttaaaataaggctagtccgttatcacgggcaccgagtcggtgctgccatctggagcagtgatctggcctgc

SEQ ID NO: 126 - RNA, 112 nt, synthetic construct
  misc_feature 1..112: note = Synthetic
  variation 1..20: note = n is a, c, g, or u
  source 1..112: mol_type = other RNA
nnnnnnnnnnnnnnnnnnnngttttagagctatagcaagttaaaataaggctagtccgttatcacgggcaccgagtcggtgctgccatctggagcagtgatctggcctgcag

SEQ ID NO: 127 - RNA, 105 nt, synthetic construct
  misc_feature 1..105: note = Synthetic
  variation 1..20: note = n is a, c, g, or u
  source 1..105: mol_type = other RNA
nnnnnnnnnnnnnnnnnnnngttttagagcgcaagttaaaataaggctagtccgttatcacgggcaccgagtcggtgcaaatagacacgtaatcttactggaagt

SEQ ID NO: 128 - RNA, 105 nt, synthetic construct
  misc_feature 1..105: note = Synthetic
  variation 1..20: note = n is a, c, g, or u
  source 1..105: mol_type = other RNA
nnnnnnnnnnnnnnnnnnnngttttagagctatagcaagttaaaataaggctagtccgttatcacgggcaccgagtcggtgcgcaagatggcagcgcgaacagct

SEQ ID NO: 129 - RNA, 78 nt, synthetic construct
  misc_feature 1..78: note = Synthetic
  variation 1..20: note = n is a, c, g, or u
  source 1..78: mol_type = other RNA
nnnnnnnnnnnnnnnnnnnngttttagagcgcaagttaaaataaggctagtccgttatcacgggcaccgagtcggtgc

SEQ ID NO: 130 - RNA, 82 nt, synthetic construct
  misc_feature 1..82: note = Synthetic
  variation 1..20: note = n is a, c, g, or u
  source 1..82: mol_type = other RNA
nnnnnnnnnnnnnnnnnnnngttttagagctatagcaagttaaaataaggctagtccgttatcacgggcaccgagtcggtgc

SEQ ID NO: 131 - RNA, 90 nt, synthetic construct
  misc_feature 1..90: note = Synthetic
  variation 1..20: note = n is a, c, g, or u
  source 1..90: mol_type = other RNA
nnnnnnnnnnnnnnnnnnnngttttagacgtagaaatacgaagttaaaataaggctagtccgttatcacgaaagggcaccgagtcggtgc

SEQ ID NO: 132-200 - skipped (69 entries)

SEQ ID NO: 201 - RNA, 56 nt, synthetic construct
  misc_feature 1..56: note = Synthetic
  source 1..56: mol_type = other RNA
gttttagasaagttaaaataaggctagtccgttatcacgggcaccgagtcggtgct

SEQ ID NO: 202 - RNA, 55 nt, synthetic construct; identical to SEQ ID NO: 1
  misc_feature 1..55: note = Synthetic
  source 1..55: mol_type = other RNA

SEQ ID NO: 203 - RNA, 55 nt, synthetic construct; identical to SEQ ID NO: 1
  misc_feature 1..55: note = Synthetic
  source 1..55: mol_type = other RNA

SEQ ID NO: 204 - RNA, 55 nt, synthetic construct; identical to SEQ ID NO: 1
  misc_feature 1..55: note = Synthetic
  source 1..55: mol_type = other RNA

SEQ ID NO: 205 - RNA, 55 nt, synthetic construct; identical to SEQ ID NO: 1
  misc_feature 1..55: note = Synthetic
  source 1..55: mol_type = other RNA

SEQ ID NO: 206 - RNA, 59 nt, synthetic construct; identical to SEQ ID NO: 2
  misc_feature 1..59: note = Synthetic
  source 1..59: mol_type = other RNA

SEQ ID NO: 207 - RNA, 63 nt, synthetic construct; identical to SEQ ID NO: 3
  misc_feature 1..63: note = Synthetic
  source 1..63: mol_type = other RNA

SEQ ID NO: 208 - RNA, 63 nt, synthetic construct; identical to SEQ ID NO: 3
  misc_feature 1..63: note = Synthetic
  source 1..63: mol_type = other RNA

SEQ ID NO: 209 - RNA, 80 nt, synthetic construct; identical to SEQ ID NO: 4
  misc_feature 1..80: note = Synthetic
  source 1..80: mol_type = other RNA

SEQ ID NO: 210 - RNA, 71 nt, synthetic construct; identical to SEQ ID NO: 5
  misc_feature 1..71: note = Synthetic
  source 1..71: mol_type = other RNA

SEQ ID NO: 211 - RNA, 62 nt, synthetic construct; identical to SEQ ID NO: 39
  misc_feature 1..62: note = Synthetic
  source 1..62: mol_type = other RNA

SEQ ID NO: 212 - RNA, 70 nt, synthetic construct; identical to SEQ ID NO: 27
  misc_feature 1..70: note = Synthetic
  source 1..70: mol_type = other RNA

SEQ ID NO: 213 - RNA, 61 nt, synthetic construct; identical to SEQ ID NO: 8
  misc_feature 1..61: note = Synthetic
  source 1..61: mol_type = other RNA

SEQ ID NO: 214 - RNA, 22 nt, synthetic construct
  misc_feature 1..22: note = Synthetic
  source 1..22: mol_type = other RNA
gttttagagctatgctgtttgg

SEQ ID NO: 215 - RNA, 22 nt, synthetic construct
  misc_feature 1..22: note = Synthetic
  source 1..22: mol_type = other RNA
gttttagagctatgctgtttgg

SEQ ID NO: 216 - RNA, 19 nt, synthetic construct
  misc_feature 1..19: note = Synthetic
  source 1..19: mol_type = other RNA
gttttagagctatgctgtg

SEQ ID NO: 217 - RNA, 16 nt, synthetic construct
  misc_feature 1..16: note = Synthetic
  source 1..16: mol_type = other RNA
gttttagagctatgcg

SEQ ID NO: 218 - RNA, 13 nt, synthetic construct
  misc_feature 1..13: note = Synthetic
  source 1..13: mol_type = other RNA
gttttagagctag

SEQ ID NO: 219-222 - skipped (4 entries)

SEQ ID NO: 223 - RNA, 69 nt, synthetic construct
  misc_feature 1..69: note = Synthetic
  source 1..69: mol_type = other RNA
gttttagagctagaaatagcaagttaaaataaggctagtccgttatcacgaaaggcaccgagtcggtgc

SEQ ID NO: 224 - RNA, 62 nt, synthetic construct; identical to SEQ ID NO: 39
  misc_feature 1..62: note = Synthetic
  source 1..62: mol_type = other RNA

SEQ ID NO: 225 - RNA, 22 nt, synthetic construct
  modified_base 13: mod_base = OTHER; note = thymine
  modified_base 16: mod_base = OTHER; note = thymine
  modified_base 18..20: mod_base = OTHER; note = thymine
  misc_feature 1..22: note = Synthetic
  source 1..22: mol_type = other RNA
gttttagagctatgctgtttgg

SEQ ID NO: 226 - RNA, 22 nt, synthetic construct
  modified_base 18..20: mod_base = OTHER; note = thymine
  misc_feature 1..22: note = Synthetic
  source 1..22: mol_type = other RNA
gttttagagctatgctgtttgg

SEQ ID NO: 227 - RNA, 66 nt, synthetic construct; identical to SEQ ID NO: 15
  misc_feature 1..66: note = Synthetic
  source 1..66: mol_type = other RNA

SEQ ID NO: 228 - RNA, 65 nt, synthetic construct; identical to SEQ ID NO: 16
  misc_feature 1..65: note = Synthetic
  source 1..65: mol_type = other RNA

SEQ ID NO: 229 - RNA, 62 nt, synthetic construct; identical to SEQ ID NO: 17
  misc_feature 1..62: note = Synthetic
  source 1..62: mol_type = other RNA

SEQ ID NO: 230 - RNA, 59 nt, synthetic construct; identical to SEQ ID NO: 18
  misc_feature 1..59: note = Synthetic
  source 1..59: mol_type = other RNA

SEQ ID NO: 231 - RNA, 56 nt, synthetic construct; identical to SEQ ID NO: 19
  misc_feature 1..56: note = Synthetic
  source 1..56: mol_type = other RNA

SEQ ID NO: 232 - RNA, 58 nt, synthetic construct; identical to SEQ ID NO: 38
  misc_feature 1..58: note = Synthetic
  source 1..58: mol_type = other RNA

SEQ ID NO: 233 - RNA, 55 nt, synthetic construct
  misc_feature 1..55: note = Synthetic
  source 1..55: mol_type = other RNA
gttttagasaagttaaaataaggctagtccgttatcacgggcaccgagtcggtgc

SEQ ID NO: 234 - RNA, 54 nt, synthetic construct
  misc_feature 1..54: note = Synthetic
  source 1..54: mol_type = other RNA
gttttagaaagttaaaataaggctagtccgttatcacgggcaccgagtcggtgc

SEQ ID NO: 235 - RNA, 54 nt, synthetic construct; identical to SEQ ID NO: 234
  misc_feature 1..54: note = Synthetic
  source 1..54: mol_type = other RNA

SEQ ID NO: 236 - RNA, 61 nt, synthetic construct; identical to SEQ ID NO: 20
  misc_feature 1..61: note = Synthetic
  source 1..61: mol_type = other RNA

SEQ ID NO: 237 - RNA, 54 nt, synthetic construct; identical to SEQ ID NO: 234
  misc_feature 1..54: note = Synthetic
  source 1..54: mol_type = other RNA

SEQ ID NO: 238 - RNA, 54 nt, synthetic construct; identical to SEQ ID NO: 234
  misc_feature 1..54: note = Synthetic
  source 1..54: mol_type = other RNA

SEQ ID NO: 239 - RNA, 62 nt, synthetic construct; identical to SEQ ID NO: 39
  misc_feature 1..62: note = Synthetic
  source 1..62: mol_type = other RNA

SEQ ID NO: 240 - RNA, 80 nt, synthetic construct; identical to SEQ ID NO: 4
  misc_feature 1..80: note = Synthetic
  source 1..80: mol_type = other RNA

SEQ ID NO: 241 - RNA, 76 nt, synthetic construct; identical to SEQ ID NO: 22
  misc_feature 1..76: note = Synthetic
  source 1..76: mol_type = other RNA

SEQ ID NO: 242 - RNA, 77 nt, synthetic construct; identical to SEQ ID NO: 23
  misc_feature 1..77: note = Synthetic
  source 1..77: mol_type = other RNA

SEQ ID NO: 243 - RNA, 68 nt, synthetic construct; identical to SEQ ID NO: 24
  misc_feature 1..68: note = Synthetic
  source 1..68: mol_type = other RNA

SEQ ID NO: 244 - RNA, 68 nt, synthetic construct; identical to SEQ ID NO: 25
  misc_feature 1..68: note = Synthetic
  source 1..68: mol_type = other RNA

SEQ ID NO: 245 - RNA, 68 nt, synthetic construct; identical to SEQ ID NO: 25
  misc_feature 1..68: note = Synthetic
  source 1..68: mol_type = other RNA

SEQ ID NO: 246 - RNA, 70 nt, synthetic construct; identical to SEQ ID NO: 27
  misc_feature 1..70: note = Synthetic
  source 1..70: mol_type = other RNA

SEQ ID NO: 247 - RNA, 70 nt, synthetic construct; identical to SEQ ID NO: 27
  misc_feature 1..70: note = Synthetic
  source 1..70: mol_type = other RNA

SEQ ID NO: 248 - RNA, 71 nt, synthetic construct; identical to SEQ ID NO: 5
  misc_feature 1..71: note = Synthetic
  source 1..71: mol_type = other RNA

SEQ ID NO: 249 - RNA, 71 nt, synthetic construct; identical to SEQ ID NO: 5
  misc_feature 1..71: note = Synthetic
  source 1..71: mol_type = other RNA

SEQ ID NO: 250 - RNA, 71 nt, synthetic construct; identical to SEQ ID NO: 5
  misc_feature 1..71: note = Synthetic
  source 1..71: mol_type = other RNA

SEQ ID NO: 251 - RNA, 88 nt, synthetic construct; identical to SEQ ID NO: 29
  modified_base 59: mod_base = OTHER; note = thymine
  modified_base 64: mod_base = OTHER; note = thymine
  modified_base 66: mod_base = OTHER; note = thymine
  modified_base 74: mod_base = OTHER; note = thymine
  modified_base 77: mod_base = OTHER; note = thymine
  misc_feature 1..88: note = Synthetic
  source 1..88: mol_type = other RNA

SEQ ID NO: 252 - RNA, 88 nt, synthetic construct; identical to SEQ ID NO: 29
  modified_base 59: mod_base = OTHER; note = thymine
  modified_base 64: mod_base = OTHER; note = thymine
  modified_base 66: mod_base = OTHER; note = thymine
  modified_base 74: mod_base = OTHER; note = thymine
  modified_base 77: mod_base = OTHER; note = thymine
  misc_feature 1..88: note = Synthetic
  source 1..88: mol_type = other RNA

SEQ ID NO: 253 - RNA, 88 nt, synthetic construct; identical to SEQ ID NO: 29
  modified_base 59: mod_base = OTHER; note = thymine
  modified_base 64: mod_base = OTHER; note = thymine
  modified_base 66: mod_base = OTHER; note = thymine
  modified_base 74: mod_base = OTHER; note = thymine
  modified_base 77: mod_base = OTHER; note = thymine
  misc_feature 1..88: note = Synthetic
  source 1..88: mol_type = other RNA

SEQ ID NO: 254 - RNA, 88 nt, synthetic construct; identical to SEQ ID NO: 29
  modified_base 59: mod_base = OTHER; note = thymine
  modified_base 64: mod_base = OTHER; note = thymine
  modified_base 66: mod_base = OTHER; note = thymine
  modified_base 74: mod_base = OTHER; note = thymine
  modified_base 77: mod_base = OTHER; note = thymine
  misc_feature 1..88: note = Synthetic
  source 1..88: mol_type = other RNA

SEQ ID NO: 255 - RNA, 88 nt, synthetic construct; identical to SEQ ID NO: 29
  modified_base 59: mod_base = OTHER; note = thymine
  modified_base 64: mod_base = OTHER; note = thymine
  modified_base 66: mod_base = OTHER; note = thymine
  modified_base 74: mod_base = OTHER; note = thymine
  modified_base 77: mod_base = OTHER; note = thymine
  misc_feature 1..88: note = Synthetic
  source 1..88: mol_type = other RNA

SEQ ID NO: 256 - RNA, 88 nt, synthetic construct; identical to SEQ ID NO: 29
  modified_base 59: mod_base = OTHER; note = thymine
  modified_base 64: mod_base = OTHER; note = thymine
  modified_base 66: mod_base = OTHER; note = thymine
  modified_base 74: mod_base = OTHER; note = thymine
  modified_base 77: mod_base = OTHER; note = thymine
  misc_feature 1..88: note = Synthetic
  source 1..88: mol_type = other RNA

SEQ ID NO: 257 - RNA, 88 nt, synthetic construct; identical to SEQ ID NO: 29
  modified_base 59: mod_base = OTHER; note = thymine
  modified_base 64: mod_base = OTHER; note = thymine
  modified_base 66: mod_base = OTHER; note = thymine
  modified_base 74: mod_base = OTHER; note = thymine
  modified_base 77: mod_base = OTHER; note = thymine
  misc_feature 1..88: note = Synthetic
  source 1..88: mol_type = other RNA

SEQ ID NO: 258 - RNA, 89 nt, synthetic construct; identical to SEQ ID NO: 30
  modified_base 59: mod_base = OTHER; note = thymine
  modified_base 64: mod_base = OTHER; note = thymine
  modified_base 66: mod_base = OTHER; note = thymine
  modified_base 74: mod_base = OTHER; note = thymine
  modified_base 77: mod_base = OTHER; note = thymine
  misc_feature 1..89: note = Synthetic
  source 1..89: mol_type = other RNA

SEQ ID NO: 259 - RNA, 90 nt, synthetic construct; identical to SEQ ID NO: 31
  modified_base 59: mod_base = OTHER; note = thymine
  modified_base 64: mod_base = OTHER; note = thymine
  modified_base 66: mod_base = OTHER; note = thymine
  modified_base 74: mod_base = OTHER; note = thymine
  modified_base 77: mod_base = OTHER; note = thymine
  misc_feature 1..90: note = Synthetic
  source 1..90: mol_type = other RNA

SEQ ID NO: 260 - RNA, 90 nt, synthetic construct; identical to SEQ ID NO: 33
  modified_base 63: mod_base = OTHER; note = thymine
  modified_base 68: mod_base = OTHER; note = thymine
  modified_base 70: mod_base = OTHER; note = thymine
  modified_base 78: mod_base = OTHER; note = thymine
  modified_base 81: mod_base = OTHER; note = thymine
  misc_feature 1..90: note = Synthetic
  source 1..90: mol_type = other RNA

SEQ ID NO: 261 - RNA, 92 nt, synthetic construct; identical to SEQ ID NO: 34
  modified_base 63: mod_base = OTHER; note = thymine
  modified_base 68: mod_base = OTHER; note = thymine
  modified_base 70: mod_base = OTHER; note = thymine
  misc_feature 1..92: note = Synthetic
  source 1..92: mol_type = other RNA

SEQ ID NO: 262 - RNA, 92 nt, synthetic construct; identical to SEQ ID NO: 34
  modified_base 63: mod_base = OTHER; note = thymine
  modified_base 68: mod_base = OTHER; note = thymine
  modified_base 70: mod_base = OTHER; note = thymine
  modified_base 78: mod_base = OTHER; note = thymine
  misc_feature 1..92: note = Synthetic
  source 1..92: mol_type = other RNA

SEQ ID NO: 263 - RNA, 92 nt, synthetic construct; identical to SEQ ID NO: 34
  modified_base 63: mod_base = OTHER; note = thymine
  modified_base 68: mod_base = OTHER; note = thymine
  modified_base 70: mod_base = OTHER; note = thymine
  modified_base 78: mod_base = OTHER; note = thymine
  misc_feature 1..92: note = Synthetic
  source 1..92: mol_type = other RNA

SEQ ID NO: 264 - RNA, 92 nt, synthetic construct; identical to SEQ ID NO: 34
  modified_base 63: mod_base = OTHER; note = thymine
  modified_base 68: mod_base = OTHER; note = thymine
  modified_base 70: mod_base = OTHER; note = thymine
  modified_base 78: mod_base = OTHER; note = thymine
  misc_feature 1..92: note = Synthetic
  source 1..92: mol_type = other RNA

SEQ ID NO: 265 - RNA, 92 nt, synthetic construct; identical to SEQ ID NO: 34
  modified_base 63: mod_base = OTHER; note = thymine
  modified_base 68: mod_base = OTHER; note = thymine
  modified_base 70: mod_base = OTHER; note = thymine
  modified_base 78: mod_base = OTHER; note = thymine
  modified_base 81: mod_base = OTHER; note = thymine
  misc_feature 1..92: note = Synthetic
  source 1..92: mol_type = other RNA

SEQ ID NO: 266 - RNA, 92 nt, synthetic construct; identical to SEQ ID NO: 34
  modified_base 63: mod_base = OTHER; note = thymine
  modified_base 68: mod_base = OTHER; note = thymine
  modified_base 70: mod_base = OTHER; note = thymine
  modified_base 78: mod_base = OTHER; note = thymine
  modified_base 81: mod_base = OTHER; note = thymine
  modified_base 83: mod_base = OTHER; note = thymine
  misc_feature 1..92: note = Synthetic
  source 1..92: mol_type = other RNA

SEQ ID NO: 267 - RNA, 92 nt, synthetic construct; identical to SEQ ID NO: 34
  modified_base 63: mod_base = OTHER; note = thymine
  modified_base 68: mod_base = OTHER; note = thymine
  modified_base 70: mod_base = OTHER; note = thymine
  modified_base 78: mod_base = OTHER; note = thymine
  modified_base 81: mod_base = OTHER; note = thymine
  modified_base 83: mod_base = OTHER; note = thymine
  misc_feature 1..92: note = Synthetic
  source 1..92: mol_type = other RNA

SEQ ID NO: 268 - RNA, 92 nt, synthetic construct; identical to SEQ ID NO: 34
  modified_base 63: mod_base = OTHER; note = thymine
  modified_base 68: mod_base = OTHER; note = thymine
  modified_base 70: mod_base = OTHER; note = thymine
  modified_base 78: mod_base = OTHER; note = thymine
  modified_base 81: mod_base = OTHER; note = thymine
  modified_base 83: mod_base = OTHER; note = thymine
  misc_feature 1..92: note = Synthetic
  source 1..92: mol_type = other RNA

SEQ ID NO: 269 - RNA, 70 nt, synthetic construct; identical to SEQ ID NO: 27
  misc_feature 1..70: note = Synthetic
  source 1..70: mol_type = other RNA

SEQ ID NO: 270 - RNA, 85 nt, synthetic construct; identical to SEQ ID NO: 36
  modified_base 62: mod_base = OTHER; note = thymine
  modified_base 70: mod_base = OTHER; note = thymine
  modified_base 73: mod_base = OTHER; note = thymine
  misc_feature 1..85: note = Synthetic
  source 1..85: mol_type = other RNA

SEQ ID NO: 271 - RNA, 85 nt, synthetic construct; identical to SEQ ID NO: 37
  modified_base 69: mod_base = OTHER; note = thymine
  misc_feature 1..85: note = Synthetic
  source 1..85: mol_type = other RNA

SEQ ID NO: 272 - RNA, 58 nt, synthetic construct; identical to SEQ ID NO: 38
  misc_feature 1..58: note = Synthetic
  source 1..58: mol_type = other RNA

SEQ ID NO: 273 - RNA, 62 nt, synthetic construct; identical to SEQ ID NO: 39
  misc_feature 1..62: note = Synthetic
  source 1..62: mol_type = other RNA

SEQ ID NO: 274 - RNA, 71 nt, synthetic construct; identical to SEQ ID NO: 5
  misc_feature 1..71: note = Synthetic
  source 1..71: mol_type = other RNA

SEQ ID NO: 275 - RNA, 70 nt, synthetic construct; identical to SEQ ID NO: 27
  misc_feature 1..70: note = Synthetic
  source 1..70: mol_type = other RNA

SEQ ID NO: 276 - RNA, 70 nt, synthetic construct; identical to SEQ ID NO: 27
  misc_feature 1..70: note = Synthetic
  source 1..70: mol_type = other RNA

SEQ ID NO: 277 - RNA, 31 nt, synthetic construct
  modified_base 1: mod_base = OTHER; note = thymine
  modified_base 6: mod_base = OTHER; note = thymine
  modified_base 8: mod_base = OTHER; note = thymine
  modified_base 16: mod_base = OTHER; note = thymine
  misc_feature 1..31: note = Synthetic
  source 1..31: mol_type = other RNA
tgccatctggagcagtgatctggcctgcagt

SEQ ID NO: 278 - RNA, 31 nt, synthetic construct; identical to SEQ ID NO: 277
  modified_base 1: mod_base = OTHER; note = thymine
  modified_base 6: mod_base = OTHER; note = thymine
  modified_base 8: mod_base = OTHER; note = thymine
  modified_base 16: mod_base = OTHER; note = thymine
  misc_feature 1..31: note = Synthetic
  source 1..31: mol_type = other RNA

SEQ ID NO: 279 - RNA, 31 nt, synthetic construct; identical to SEQ ID NO: 277
  modified_base 1: mod_base = OTHER; note = thymine
  modified_base 6: mod_base = OTHER; note = thymine
  modified_base 8: mod_base = OTHER; note = thymine
  modified_base 16: mod_base = OTHER; note = thymine
  misc_feature 1..31: note = Synthetic
  source 1..31: mol_type = other RNA

SEQ ID NO: 280 - RNA, 31 nt, synthetic construct; identical to SEQ ID NO: 277
  modified_base 1: mod_base = OTHER; note = thymine
  modified_base 6: mod_base = OTHER; note = thymine
  modified_base 8: mod_base = OTHER; note = thymine
  modified_base 16: mod_base = OTHER; note = thymine
  modified_base 19: mod_base = OTHER; note = thymine
  misc_feature 1..31: note = Synthetic
  source 1..31: mol_type = other RNA

SEQ ID NO: 281 - RNA, 31 nt, synthetic construct; identical to SEQ ID NO: 277
  modified_base 1: mod_base = OTHER; note = thymine
  modified_base 6: mod_base = OTHER; note = thymine
  modified_base 8: mod_base = OTHER; note = thymine
  modified_base 16: mod_base = OTHER; note = thymine
  modified_base 19: mod_base = OTHER; note = thymine
  misc_feature 1..31: note = Synthetic
  source 1..31: mol_type = other RNA

SEQ ID NO: 282 - RNA, 31 nt, synthetic construct; identical to SEQ ID NO: 277
  modified_base 1: mod_base = OTHER; note = thymine
  modified_base 6: mod_base = OTHER; note = thymine
  modified_base 8: mod_base = OTHER; note = thymine
  modified_base 16: mod_base = OTHER; note = thymine
  modified_base 19: mod_base = OTHER; note = thymine
  modified_base 21: mod_base = OTHER; note = thymine
  misc_feature 1..31: note = Synthetic
  source 1..31: mol_type = other RNA

SEQ ID NO: 283 - RNA, 31 nt, synthetic construct; identical to SEQ ID NO: 277
  modified_base 1: mod_base = OTHER; note = thymine
  modified_base 6: mod_base = OTHER; note = thymine
  modified_base 8: mod_base = OTHER; note = thymine
  modified_base 16: mod_base = OTHER; note = thymine
  modified_base 19: mod_base = OTHER; note = thymine
  modified_base 21: mod_base = OTHER; note = thymine
  misc_feature 1..31: note = Synthetic
  source 1..31: mol_type = other RNA

SEQ ID NO: 284 - RNA, 31 nt, synthetic construct; identical to SEQ ID NO: 277
  modified_base 1: mod_base = OTHER; note = thymine
  modified_base 6: mod_base = OTHER; note = thymine
  modified_base 8: mod_base = OTHER; note = thymine
  modified_base 16: mod_base = OTHER; note = thymine
  modified_base 19: mod_base = OTHER; note = thymine
  modified_base 21: mod_base = OTHER; note = thymine
  misc_feature 1..31: note = Synthetic
  source 1..31: mol_type = other RNA

SEQ ID NO: 285 - RNA, 31 nt, synthetic construct; identical to SEQ ID NO: 277
  modified_base 1: mod_base = OTHER; note = thymine
  modified_base 6: mod_base = OTHER; note = thymine
  modified_base 8: mod_base = OTHER; note = thymine
  modified_base 16: mod_base = OTHER; note = thymine
  modified_base 19: mod_base = OTHER; note = thymine
  modified_base 21: mod_base = OTHER; note = thymine
  misc_feature 1..31: note = Synthetic
  source 1..31: mol_type = other RNA

SEQ ID NO: 286-298 - skipped (13 entries)

SEQ ID NO: 299 - RNA, 62 nt, synthetic construct; identical to SEQ ID NO: 39
  misc_feature 1..62: note = Synthetic
  source 1..62: mol_type = other RNA

SEQ ID NO: 300 - RNA, 91 nt, synthetic construct; identical to SEQ ID NO: 32
  modified_base 59: mod_base = OTHER; note = thymine
  modified_base 64: mod_base = OTHER; note = thymine
  modified_base 66: mod_base = OTHER; note = thymine
  modified_base 74: mod_base = OTHER; note = thymine
  modified_base 77: mod_base = OTHER; note = thymine
  misc_feature 1..91: note = Synthetic
  source 1..91: mol_type = other RNA

SEQ ID NO: 301 - RNA, 76 nt, synthetic construct
  misc_feature 1..76: note = Synthetic
  variation 1..20: note = n is a, c, g, or u
  source 1..76: mol_type = other RNA
nnnnnnnnnnnnnnnnnnnngttttagasaagttaaaataaggctagtccgttatcacgggcaccgagtcggtgct

SEQ ID NO: 302 - RNA, 75 nt, synthetic construct; identical to SEQ ID NO: 101
  misc_feature 1..75: note = Synthetic
  variation 1..20: note = n is a, c, g, or u
  source 1..75: mol_type = other RNA

SEQ ID NO: 303 - RNA, 75 nt, synthetic construct; identical to SEQ ID NO: 101
  misc_feature 1..75: note = Synthetic
  variation 1..20: note = n is a, c, g, or u
  source 1..75: mol_type = other RNA

SEQ ID NO: 304 - RNA, 75 nt, synthetic construct; identical to SEQ ID NO: 101
  misc_feature 1..75: note = Synthetic
  variation 1..20: note = n is a, c, g, or u
  source 1..75: mol_type = other RNA

SEQ ID NO: 305 - RNA, 75 nt, synthetic construct; identical to SEQ ID NO: 101
  misc_feature 1..75: note = Synthetic
  variation 1..20: note = n is a, c, g, or u
  source 1..75: mol_type = other RNA

SEQ ID NO: 306 - RNA, 79 nt, synthetic construct; identical to SEQ ID NO: 102
  misc_feature 1..79: note = Synthetic
  variation 1..20: note = n is a, c, g, or u
  source 1..79: mol_type = other RNA

SEQ ID NO: 307 - RNA, 83 nt, synthetic construct; identical to SEQ ID NO: 103
  misc_feature 1..83: note = Synthetic
  variation 1..20: note = n is a, c, g, or u
  source 1..83: mol_type = other RNA

SEQ ID NO: 308 - RNA, 83 nt, synthetic construct; identical to SEQ ID NO: 103
  misc_feature 1..83: note = Synthetic
  variation 1..20: note = n is a, c, g, or u
  source 1..83: mol_type = other RNA

SEQ ID NO: 309 - RNA, 100 nt, synthetic construct; identical to SEQ ID NO: 104
  misc_feature 1..100: note = Synthetic
  variation 1..20: note = n is a, c, g, or u
  source 1..100: mol_type = other RNA

SEQ ID NO: 310 - RNA, 91 nt, synthetic construct; identical to SEQ ID NO: 105
  misc_feature 1..91: note = Synthetic
  variation 1..20: note = n is a, c, g, or u
  source 1..91: mol_type = other RNA

SEQ ID NO: 311 - RNA, 82 nt, synthetic construct; identical to SEQ ID NO: 130
  misc_feature 1..82: note = Synthetic
  variation 1..20: note = n is a, c, g, or u
  source 1..82: mol_type = other RNA

SEQ ID NO: 312 - RNA, 90 nt, synthetic construct; identical to SEQ ID NO: 120
  misc_feature 1..90: note = Synthetic
  variation 1..20: note = n is a, c, g, or u
  source 1..90: mol_type = other RNA

SEQ ID NO: 313 - RNA, 81 nt, synthetic construct; identical to SEQ ID NO: 108
  misc_feature 1..81: note = Synthetic
  variation 1..20: note = n is a, c, g, or u
  source 1..81: mol_type = other RNA

SEQ ID NO: 314 - RNA, 42 nt, synthetic construct; identical to SEQ ID NO: 109
  misc_feature 1..42: note = Synthetic
  variation 1..20: note = n is a, c, g, or u
  source 1..42: mol_type = other RNA

SEQ ID NO: 315 - RNA, 42 nt, synthetic construct; identical to SEQ ID NO: 109
  misc_feature 1..42: note = Synthetic
  variation 1..20: note = n is a, c, g, or u
  source 1..42: mol_type = other RNA

SEQ ID NO: 316 - RNA, 39 nt, synthetic construct; identical to SEQ ID NO: 110
  misc_feature 1..39: note = Synthetic
  variation 1..20: note = n is a, c, g, or u
  source 1..39: mol_type = other RNA

SEQ ID NO: 317 - RNA, 36 nt, synthetic construct; identical to SEQ ID NO: 111
  misc_feature 1..36: note = Synthetic
  variation 1..20: note = n is a, c, g, or u
  source 1..36: mol_type = other RNA

SEQ ID NO: 318 - RNA, 33 nt, synthetic construct; identical to SEQ ID NO: 112
  misc_feature 1..33: note = Synthetic
  variation 1..20: note = n is a, c, g, or u
  source 1..33: mol_type = other RNA

SEQ ID NO: 319 - RNA, 89 nt, synthetic construct
  misc_feature 1..89: note = Synthetic
  variation 1..20: note = n is a, c, g, or u
  source 1..89: mol_type = other RNA
nnnnnnnnnnnnnnnnnnnngttttagagctagaaatagcaagttaaaataaggctagtccgttatcacgaaaggcaccgagtcggtgc

SEQ ID NO: 320 - RNA, 89 nt, synthetic construct; identical to SEQ ID NO: 319
  misc_feature 1..89: note = Synthetic
  variation 1..20: note = n is a, c, g, or u
  source 1..89: mol_type = other RNA

SEQ ID NO: 321 - RNA, 75 nt, synthetic construct
  misc_feature 1..75: note = Synthetic
  variation 1..20: note = n is a, c, g, or u
  source 1..75: mol_type = other RNA
nnnnnnnnnnnnnnnnnnnngttttagasaagttaaaataaggctagtccgttatcacgggcaccgagtcggtgc

SEQ ID NO: 322 - RNA, 74 nt, synthetic construct
  misc_feature 1..74: note = Synthetic
  variation 1..20: note = n is a, c, g, or u
  source 1..74: mol_type = other RNA
nnnnnnnnnnnnnnnnnnnngttttagaaagttaaaataaggctagtccgttatcacgggcaccgagtcggtgc

SEQ ID NO: 323 - RNA, 91 nt, synthetic construct; identical to SEQ ID NO: 105
  misc_feature 1..91: note = Synthetic
  variation 1..20: note = n is a, c, g, or u
  source 1..91: mol_type = other RNA

SEQ ID NO: 324 - RNA, 90 nt, synthetic construct
  misc_feature 1..90: note = Synthetic
  variation 1..20: note = n is a, c, g, or u
  source 1..90: mol_type = other RNA
nnnnnnnnnnnnnnnnnnnngttttagagctagaaatagcaagttaaaataaggctagtccgttatcacgaaaggcaccgagtcggtgct

SEQ ID NO: 325 - RNA, 90 nt, synthetic construct; identical to SEQ ID NO: 324
  misc_feature 1..90: note = Synthetic
  variation 1..20: note = n is a, c, g, or u
  source 1..90: mol_type = other RNA

SEQ ID NO: 326 - RNA, 90 nt, synthetic construct; identical to SEQ ID NO: 120
  misc_feature 1..90: note = Synthetic
  variation 1..20: note = n is a, c, g, or u
  source 1..90: mol_type = other RNA

SEQ ID NO: 327 - RNA, 88 nt, synthetic construct; identical to SEQ ID NO: 117
  misc_feature 1..88: note = Synthetic
  variation 1..20: note = n is a, c, g, or u
  source 1..88: mol_type = other RNA

SEQ ID NO: 328 - RNA, 88 nt, synthetic construct; identical to SEQ ID NO: 118
  misc_feature 1..88: note = Synthetic
  variation 1..20: note = n is a, c, g, or u
  source 1..88: mol_type = other RNA

SEQ ID NO: 329 - RNA, 88 nt, synthetic construct; identical to SEQ ID NO: 118
  misc_feature 1..88: note = Synthetic
  variation 1..20: note = n is a, c, g, or u
  source 1..88: mol_type = other RNA

SEQ ID NO: 330 - RNA, 90 nt, synthetic construct; identical to SEQ ID NO: 120
  misc_feature 1..90: note = Synthetic
  variation 1..20: note = n is a, c, g, or u
  source 1..90: mol_type = other RNA

SEQ ID NO: 331 - RNA, 90 nt, synthetic construct; identical to SEQ ID NO: 120
  misc_feature 1..90: note = Synthetic
  variation 1..20: note = n is a, c, g, or u
  source 1..90: mol_type = other RNA

SEQ ID NO: 332 - RNA, 91 nt, synthetic construct; identical to SEQ ID NO: 105
  misc_feature 1..91: note = Synthetic
  variation 1..20: note = n is a, c, g, or u
  source 1..91: mol_type = other RNA

SEQ ID NO: 333 - RNA, 91 nt, synthetic construct; identical to SEQ ID NO: 105
  misc_feature 1..91: note = Synthetic
  variation 1..20: note = n is a, c, g, or u
  source 1..91: mol_type = other RNA

SEQ ID NO: 334 - RNA, 91 nt, synthetic construct; identical to SEQ ID NO: 105
  misc_feature 1..91: note = Synthetic
  variation 1..20: note = n is a, c, g, or u
  source 1..91: mol_type = other RNA

SEQ ID NO: 335 - RNA, 88 nt, synthetic construct; identical to SEQ ID NO: 29
  modified_base 59: mod_base = OTHER; note = thymine
  modified_base 64: mod_base = OTHER; note = thymine
  modified_base 66: mod_base = OTHER; note = thymine
  modified_base 74: mod_base = OTHER; note = thymine
  modified_base 77: mod_base = OTHER; note = thymine
  misc_feature 1..88: note = Synthetic
  source 1..88: mol_type = other RNA

SEQ ID NO: 336 - RNA, 108 nt, synthetic construct; identical to SEQ ID NO: 121
  modified_base 79: mod_base = OTHER; note = thymine
  modified_base 84: mod_base = OTHER; note = thymine
  modified_base 86: mod_base = OTHER; note = thymine
  modified_base 94: mod_base = OTHER; note = thymine
  modified_base 97: mod_base = OTHER; note = thymine
  misc_feature 1..108: note = Synthetic
  variation 1..20: note = n is a, c, g, t or u
  source 1..108: mol_type = other RNA

SEQ ID NO: 337 - RNA, 108 nt, synthetic construct; identical to SEQ ID NO: 121
  modified_base 79: mod_base = OTHER; note = thymine
  modified_base 84: mod_base = OTHER; note = thymine
  modified_base 86: mod_base = OTHER; note = thymine
  modified_base 94: mod_base = OTHER; note = thymine
  modified_base 97: mod_base = OTHER; note = thymine
  misc_feature 1..108: note = Synthetic
  variation 1..20: note = n is a, c, g, t or u
  source 1..108: mol_type = other RNA

SEQ ID NO: 338 - RNA, 108 nt, synthetic construct; identical to SEQ ID NO: 121
  modified_base 79: mod_base = OTHER; note = thymine
  modified_base 84: mod_base = OTHER; note = thymine
  modified_base 86: mod_base = OTHER; note = thymine
  modified_base 94: mod_base = OTHER; note = thymine
  modified_base 97: mod_base = OTHER; note = thymine
  misc_feature 1..108: note = Synthetic
  variation 1..20: note = n is a, c, g, t or u
  source 1..108: mol_type = other RNA

SEQ ID NO: 339 - RNA, 108 nt, synthetic construct; identical to SEQ ID NO: 121
  modified_base 79: mod_base = OTHER; note = thymine
  modified_base 84: mod_base = OTHER; note = thymine
  modified_base 86: mod_base = OTHER; note = thymine
  modified_base 94: mod_base = OTHER; note = thymine
  modified_base 97: mod_base = OTHER; note = thymine
  misc_feature 1..108: note = Synthetic
  variation 1..20: note = n is a, c, g, t or u
  source 1..108: mol_type = other RNA

SEQ ID NO: 340 - RNA, 108 nt, synthetic construct; identical to SEQ ID NO: 121
  modified_base 79: mod_base = OTHER; note = thymine
  modified_base 84: mod_base = OTHER; note = thymine
  modified_base 86: mod_base = OTHER; note = thymine
  modified_base 94: mod_base = OTHER; note = thymine
  modified_base 97: mod_base = OTHER; note = thymine
  misc_feature 1..108: note = Synthetic
  variation 1..20: note = n is a, c, g, t or u
  source 1..108: mol_type = other RNA

SEQ ID NO: 341 - RNA, 108 nt, synthetic construct; identical to SEQ ID NO: 121
  modified_base 79: mod_base = OTHER; note = thymine
  modified_base 84: mod_base = OTHER; note = thymine
  modified_base 86: mod_base = OTHER; note = thymine
  modified_base 94: mod_base = OTHER; note = thymine
  modified_base 97: mod_base = OTHER; note = thymine
  misc_feature 1..108: note = Synthetic
  variation 1..20: note = n is a, c, g, t or u
  source 1..108: mol_type = other RNA

SEQ ID NO: 342 - RNA, 109 nt, synthetic construct; identical to SEQ ID NO: 122
  modified_base 79: mod_base = OTHER; note = thymine
  modified_base 84: mod_base = OTHER; note = thymine
  modified_base 86: mod_base = OTHER; note = thymine
  modified_base 94: mod_base = OTHER; note = thymine
  modified_base 97: mod_base = OTHER; note = thymine
  misc_feature 1..109: note = Synthetic
  variation 1..20: note = n is a, c, g, t or u
  source 1..109: mol_type = other RNA

SEQ ID NO: 343 - RNA, 110 nt, synthetic construct; identical to SEQ ID NO: 123
  modified_base 79: mod_base = OTHER; note = thymine
  modified_base 84: mod_base = OTHER; note = thymine
  modified_base 86: mod_base = OTHER; note = thymine
  modified_base 94: mod_base = OTHER; note = thymine
  modified_base 97: mod_base = OTHER; note = thymine
  misc_feature 1..110: note = Synthetic
  variation 1..20: note = n is a, c, g, t or u
  source 1..110: mol_type = other RNA

SEQ ID NO: 344 - RNA, 111 nt, synthetic construct; identical to SEQ ID NO: 124
  modified_base 79: mod_base = OTHER; note = thymine
  modified_base 84: mod_base = OTHER; note = thymine
  modified_base 86: mod_base = OTHER; note = thymine
  modified_base 94: mod_base = OTHER; note = thymine
  modified_base 97: mod_base = OTHER; note = thymine
  misc_feature 1..111: note = Synthetic
  variation 1..20: note = n is a, c, g, t or u
  source 1..111: mol_type = other RNA

SEQ ID NO: 345 - RNA, 105 nt, synthetic construct; identical to SEQ ID NO: 127
  modified_base 82: mod_base = OTHER; note = thymine
  modified_base 90: mod_base = OTHER; note = thymine
  modified_base 93: mod_base = OTHER; note = thymine
  misc_feature 1..105: note = Synthetic
  variation 1..20: note = n is a, c, g, t or u
  source 1..105: mol_type = other RNA

SEQ ID NO: 346 - RNA, 105 nt, synthetic construct; identical to SEQ ID NO: 128
  modified_base 89: mod_base = OTHER; note = thymine
  misc_feature 1..105: note = Synthetic
  variation 1..20: note = n is a, c, g, t or u
  source 1..105: mol_type = other RNA

SEQ ID NO: 347 - RNA, 78 nt, synthetic construct; identical to SEQ ID NO: 129
  misc_feature 1..78: note = Synthetic
  variation 1..20: note = n is a, c, g, or u
  source 1..78: mol_type = other RNA

SEQ ID NO: 348 - RNA, 82 nt, synthetic construct; identical to SEQ ID NO: 130
  misc_feature 1..82: note = Synthetic
  variation 1..20: note = n is a, c, g, or u
  source 1..82: mol_type = other RNA

SEQ ID NO: 349 - RNA, 78 nt, synthetic construct; identical to SEQ ID NO: 129
  misc_feature 1..78: note = Synthetic
  variation 1..20: note = n is a, c, g, or u
  source 1..78: mol_type = other RNA

SEQ ID NO: 350 - RNA, 90 nt, synthetic construct
  misc_feature 1..90: note = Synthetic
  variation 1..20: note = n is a, c, g, or u
  source 1..90: mol_type = other RNA
nnnnnnnnnnnnnnnnnnnngttttagagctatagcaagttaaaataaggcgtccgttatcaacttaagtggcaccgagtcggtgctttt

SEQ ID NO: 351 - RNA, 80 nt, synthetic construct
  misc_feature 1..80: note = Synthetic
  variation 1..20: note = n is a, c, g, or u
  source 1..80: mol_type = other RNA
nnnnnnnnnnnnnnnnnnnngttttagagctatagcaagttaaaataaggcgtccgttatcacgggcaccgagtcggtgc

SEQ ID NO: 352 - RNA, 80 nt, synthetic construct; identical to SEQ ID NO: 351
  misc_feature 1..80: note = Synthetic
  variation 1..20: note = n is a, c, g, or u
  source 1..80: mol_type = other RNA

SEQ ID NO: 353 - RNA, 78 nt, synthetic construct
  misc_feature 1..78: note = Synthetic
  variation 1..20: note = n is a, c, g, or u
  source 1..78: mol_type = other RNA
nnnnnnnnnnnnnnnnnnnngttttagagctatagcaagttaaaataaggcgtccgttatcaggcaccgagtcggtgc

SEQ ID NO: 354 - RNA, 78 nt, synthetic construct
  misc_feature 1..78: note = Synthetic
  variation 1..20: note = n is a, c, g, or u
  source 1..78: mol_type = other RNA
nnnnnnnnnnnnnnnnnnnngttttagagctagcaagttaaaataaggcgtccgttatcacgggcaccgagtcggtgc

SEQ ID NO: 355 - RNA, 76 nt, synthetic construct
  misc_feature 1..76: note = Synthetic
  variation 1..20: note = n is a, c, g, or u
  source 1..76: mol_type = other RNA
nnnnnnnnnnnnnnnnnnnngttttagagctagcaagttaaaataaggcgtccgttatcaggcaccgagtcggtgc

SEQ ID NO: 356 - RNA, 76 nt, synthetic construct; identical to SEQ ID NO: 355
  misc_feature 1..76: note = Synthetic
  variation 1..20: note = n is a, c, g, or u
  source 1..76: mol_type = other RNA

SEQ ID NO: 357 - RNA, 76 nt, synthetic construct; identical to SEQ ID NO: 355
  misc_feature 1..76: note = Synthetic
  variation 1..20: note = n is a, c, g, or u
  source 1..76: mol_type = other RNA

SEQ ID NO: 358 - RNA, 80 nt, synthetic construct; identical to SEQ ID NO: 351
  misc_feature 1..80: note = Synthetic
  variation 1..20: note = n is a, c, g, or u
  source 1..80: mol_type = other RNA

SEQ ID NO: 359 - RNA, 78 nt, synthetic construct; identical to SEQ ID NO: 353
  misc_feature 1..78: note = Synthetic
  variation 1..20: note = n is a, c, g, or u
  source 1..78: mol_type = other RNA

SEQ ID NO: 360 - RNA, 78 nt, synthetic construct; identical to SEQ ID NO: 354
  misc_feature 1..78: note = Synthetic
  variation 1..20: note = n is a, c, g, or u
  source 1..78: mol_type = other RNA

SEQ ID NO: 361 - RNA, 76 nt, synthetic construct; identical to SEQ ID NO: 355
  misc_feature 1..76: note = Synthetic
  variation 1..20: note = n is a, c, g, or u
  source 1..76: mol_type = other RNA

SEQ ID NO: 362 - RNA, 75 nt, synthetic construct; identical to SEQ ID NO: 101
  misc_feature 1..75: note = Synthetic
  variation 1..20: note = n is a, c, g, or u
  source 1..75: mol_type = other RNA

SEQ ID NO: 363 - RNA, 75 nt, synthetic construct; identical to SEQ ID NO: 101
  misc_feature 1..75: note = Synthetic
  variation 1..20: note = n is a, c, g, or u
  source 1..75: mol_type = other RNA

SEQ ID NO: 364 - RNA, 75 nt, synthetic construct; identical to SEQ ID NO: 101
  misc_feature 1..75: note = Synthetic
  variation 1..20: note = n is a, c, g, or u
  source 1..75: mol_type = other RNA

SEQ ID NO: 365 - RNA, 75 nt, synthetic construct; identical to SEQ ID NO: 101
  misc_feature 1..75: note = Synthetic
  variation 1..20: note = n is a, c, g, or u
  source 1..75: mol_type = other RNA

SEQ ID NO: 366 - RNA, 75 nt, synthetic construct; identical to SEQ ID NO: 101
  misc_feature 1..75: note = Synthetic
  variation 1..20: note = n is a, c, g, or u
  source 1..75: mol_type = other RNA

SEQ ID NO: 367 - RNA, 79 nt, synthetic construct; identical to SEQ ID NO: 102
  misc_feature 1..79: note = Synthetic
  variation 1..20: note = n is a, c, g, or u
  source 1..79: mol_type = other RNA

SEQ ID NO: 368 - RNA, 83 nt, synthetic construct; identical to SEQ ID NO: 103
  misc_feature 1..83: note = Synthetic
  variation 1..20: note = n is a, c, g, or u
  source 1..83: mol_type = other RNA

SEQ ID NO: 369 - RNA, 83 nt, synthetic construct; identical to SEQ ID NO: 103
  misc_feature 1..83: note = Synthetic
  variation 1..20: note = n is a, c, g, or u
  source 1..83: mol_type = other RNA

SEQ ID NO: 370 - RNA, 55 nt, synthetic construct; identical to SEQ ID NO: 1
  misc_feature 1..55: note = Synthetic
  source 1..55: mol_type = other RNA

SEQ ID NO: 371 - RNA, 75 nt, synthetic construct; identical to SEQ ID NO: 101
  misc_feature 1..75: note = Synthetic
  variation 1..20: note = n is a, c, g, or u
  source 1..75: mol_type = other RNA

SEQ ID NO: 372 - RNA, 74 nt, synthetic construct; identical to SEQ ID NO: 322
  misc_feature 1..74: note = Synthetic
  variation 1..20: note = n is a, c, g, or u
  source 1..74: mol_type = other RNA

SEQ ID NO: 373 - RNA, 54 nt, synthetic construct; identical to SEQ ID NO: 234
  misc_feature 1..54: note = Synthetic
  source 1..54: mol_type = other RNA

SEQ ID NO: 374 - RNA, 54 nt, synthetic construct; identical to SEQ ID NO: 234
  misc_feature 1..54: note = Synthetic
  source 1..54: mol_type = other RNA

SEQ ID NO: 375 - RNA, 110 nt, synthetic construct; identical to SEQ ID NO: 125
  modified_base 83: mod_base = OTHER; note = thymine
  modified_base 88: mod_base = OTHER; note = thymine
  modified_base 90: mod_base = OTHER; note = thymine
  modified_base 98: mod_base = OTHER; note = thymine
  modified_base 101: mod_base = OTHER; note = thymine
  misc_feature 1..110: note = Synthetic
  variation 1..20: note = n is a, c, g, t or u
  source 1..110: mol_type = other RNA

SEQ ID NO: 376 - RNA, 112 nt, synthetic construct; identical to SEQ ID NO: 126
  modified_base 83: mod_base = OTHER; note = thymine
  modified_base 88: mod_base = OTHER; note = thymine
  modified_base 90: mod_base = OTHER; note = thymine
  misc_feature 1..112: note = Synthetic
  variation 1..20: note = n is a, c, g, t or u
  source 1..112: mol_type = other RNA

SEQ ID NO: 377 - RNA, 112 nt, synthetic construct; identical to SEQ ID NO: 126
  modified_base 83: mod_base = OTHER; note = thymine
  modified_base 88: mod_base = OTHER; note = thymine
  modified_base 90: mod_base = OTHER; note = thymine
  modified_base 98: mod_base = OTHER; note = thymine
  misc_feature 1..112: note = Synthetic
  variation 1..20: note = n is a, c, g, t or u
  source 1..112: mol_type = other RNA

SEQ ID NO: 378 - RNA, 112 nt, synthetic construct; identical to SEQ ID NO: 126
  modified_base 83: mod_base = OTHER; note = thymine
  modified_base 88: mod_base = OTHER; note = thymine
  modified_base 90: mod_base = OTHER; note = thymine
  modified_base 98: mod_base = OTHER; note = thymine
  misc_feature 1..112: note = Synthetic
  variation 1..20: note = n is a, c, g, t or u
  source 1..112: mol_type = other RNA

SEQ ID NO: 379 - RNA, 112 nt, synthetic construct; identical to SEQ ID NO: 126
  modified_base 83: mod_base = OTHER; note = thymine
  modified_base 88: mod_base = OTHER; note = thymine
  modified_base 90: mod_base = OTHER; note = thymine
  modified_base 98: mod_base = OTHER; note = thymine
  misc_feature 1..112: note = Synthetic
  variation 1..20: note = n is a, c, g, t or u
  source 1..112: mol_type = other RNA

SEQ ID NO: 380 - RNA, 112 nt, synthetic construct; identical to SEQ ID NO: 126
  modified_base 83: mod_base = OTHER; note = thymine
  modified_base 88: mod_base = OTHER; note = thymine
  modified_base 90: mod_base = OTHER; note = thymine
  modified_base 98: mod_base = OTHER; note = thymine
  modified_base 101: mod_base = OTHER; note = thymine
  misc_feature 1..112: note = Synthetic
  variation 1..20: note = n is a, c, g, t or u
  source 1..112: mol_type = other RNA

SEQ ID NO: 381 - RNA, 112 nt, synthetic construct; identical to SEQ ID NO: 126
  modified_base 83: mod_base = OTHER; note = thymine
  modified_base 88: mod_base = OTHER; note = thymine
  modified_base 90: mod_base = OTHER; note = thymine
  modified_base 98: mod_base = OTHER; note = thymine
  modified_base 101: mod_base = OTHER; note = thymine
  modified_base 103: mod_base = OTHER; note = thymine
  misc_feature 1..112: note = Synthetic
  variation 1..20: note = n is a, c, g, t or u
  source 1..112: mol_type = other RNA

SEQ ID NO: 382 - RNA, 112 nt, synthetic construct; identical to SEQ ID NO: 126
  modified_base 83: mod_base = OTHER; note = thymine
  modified_base 88: mod_base = OTHER; note = thymine
  modified_base 90: mod_base = OTHER; note = thymine
  modified_base 98: mod_base = OTHER; note = thymine
  modified_base 101: mod_base = OTHER; note = thymine
  modified_base 103: mod_base = OTHER; note = thymine
  misc_feature 1..112: note = Synthetic
  variation 1..20: note = n is a, c, g, t or u
  source 1..112: mol_type = other RNA

SEQ ID NO: 383 - RNA, 112 nt, synthetic construct; identical to SEQ ID NO: 126
  modified_base 83: mod_base = OTHER; note = thymine
  modified_base 88: mod_base = OTHER; note = thymine
  modified_base 90: mod_base = OTHER; note = thymine
  modified_base 98: mod_base = OTHER; note = thymine
  modified_base 101: mod_base = OTHER; note = thymine
  modified_base 103: mod_base = OTHER; note = thymine
  misc_feature 1..112: note = Synthetic
  variation 1..20: note = n is a, c, g, t or u
  source 1..112: mol_type = other RNA

SEQ ID NO: 384 - RNA, 74 nt, synthetic construct; identical to SEQ ID NO: 322
  misc_feature 1..74: note = Synthetic
  variation 1..20: note = n is a, c, g, or u
  source 1..74: mol_type = other RNA

SEQ ID NO: 385 - RNA, 98 nt, synthetic construct
  misc_feature 1..98: note = Synthetic
  variation 1..20: note = n is a, c, g, or u
  source 1..98: mol_type = other RNA
nnnnnnnnnnnnnnnnnnnngttttagasaagttaaaataaggctagtccgttatcacgggcaccgagtcggtgctctgcgatcacgtgctcagtctg

SEQ ID NO: 386 - RNA, 97 nt, synthetic construct
  misc_feature 1..97: note = Synthetic
  variation 1..20: note = n is a, c, g, or u
  source 1..97: mol_type = other RNA
nnnnnnnnnnnnnnnnnnnngttttagaaagttaaaataaggctagtccgttatcacgggcaccgagtcggtgctctgcgatcacgtgctcagtctg

SEQ ID NO: 387 - RNA, 97 nt, synthetic construct; identical to SEQ ID NO: 386
  misc_feature 1..97: note = Synthetic
  variation 1..20: note = n is a, c, g, or u
  source 1..97: mol_type = other RNA

SEQ ID NO: 388 - RNA, 97 nt, synthetic construct; identical to SEQ ID NO: 386
  misc_feature 1..97: note = Synthetic
  variation 1..20: note = n is a, c, g, or u
  source 1..97: mol_type = other RNA

SEQ ID NO: 389 - RNA, 97 nt, synthetic construct; identical to SEQ ID NO: 386
  misc_feature 1..97: note = Synthetic
  variation 1..20: note = n is a, c, g, or u
  source 1..97: mol_type = other RNA

SEQ ID NO: 390 - RNA, 101 nt, synthetic construct
  misc_feature 1..101: note = Synthetic
  variation 1..20: note = n is a, c, g, or u
  source 1..101: mol_type = other RNA
nnnnnnnnnnnnnnnnnnnngttttagagcgcaagttaaaataaggctagtccgttatcacgggcaccgagtcggtgctctgcgatcacgtgctcagtctg

SEQ ID NO: 391 - RNA, 105 nt, synthetic construct
  misc_feature 1..105: note = Synthetic
  variation 1..20: note = n is a, c, g, or u
  source 1..105: mol_type = other RNA
nnnnnnnnnnnnnnnnnnnngttttagagctatagcaagttaaaataaggctagtccgttatcacgggcaccgagtcggtgctctgcgatcacgtgctcagtctg

SEQ ID NO: 392 - RNA, 105 nt, synthetic construct; identical to SEQ ID NO: 391
  misc_feature 1..105: note = Synthetic
  variation 1..20: note = n is a, c, g, or u
  source 1..105: mol_type = other RNA

SEQ ID NO: 393 - RNA, 78 nt, synthetic construct
  misc_feature 1..78: note = Synthetic
  source 1..78: mol_type = other RNA
gttttagasaagttaaaataaggctagtccgttatcacgggcaccgagtcggtgctctgcgatcacgtgctcagtctg

SEQ ID NO: 394 - RNA, 77 nt, synthetic construct
  misc_feature 1..77: note = Synthetic
  source 1..77: mol_type = other RNA
gttttagaaagttaaaataaggctagtccgttatcacgggcaccgagtcggtgctctgcgatcacgtgctcagtctg

SEQ ID NO: 395 - RNA, 77 nt, synthetic construct; identical to SEQ ID NO: 394
  misc_feature 1..77: note = Synthetic
  source 1..77: mol_type = other RNA

SEQ ID NO: 396 - RNA, 77 nt, synthetic construct; identical to SEQ ID NO: 394
  misc_feature 1..77: note = Synthetic
  source 1..77: mol_type = other RNA

SEQ ID NO: 397 - RNA, 77 nt, synthetic construct; identical to SEQ ID NO: 394
  misc_feature 1..77: note = Synthetic
  source 1..77: mol_type = other RNA

SEQ ID NO: 398 - RNA, 81 nt, synthetic construct
  misc_feature 1..81: note = Synthetic
  source 1..81: mol_type = other RNA
gttttagagcgcaagttaaaataaggctagtccgttatcacgggcaccgagtcggtgctctgcgatcacgtgctcagtctg

SEQ ID NO: 399 - RNA, 85 nt, synthetic construct
  misc_feature 1..85: note = Synthetic
  source 1..85: mol_type = other RNA
gttttagagctatagcaagttaaaataaggctagtccgttatcacgggcaccgagtcggtgctctgcgatcacgtgctcagtctg

SEQ ID NO: 400 - RNA, 85 nt, synthetic construct; identical to SEQ ID NO: 399
  misc_feature 1..85: note = Synthetic
  source 1..85: mol_type = other RNA

SEQ ID NO: 401 - RNA, 76 nt, synthetic construct
  misc_feature 1..76: note = Synthetic
  source 1..76: mol_type = other RNA
ggcccagactgagcacgtgagttttagasaagttaaaataaggctagtccgttatcacgggcaccgagtcggtgct

SEQ ID NO: 402 - RNA, 75 nt, synthetic construct
  misc_feature 1..75: note = Synthetic
  source 1..75: mol_type = other RNA
ggcccagactgagcacgtgagttttagaaagttaaaataaggctagtccgttatcacgggcaccgagtcggtgct

SEQ ID NO: 403 - RNA, 75 nt, synthetic construct; identical to SEQ ID NO: 402
  misc_feature 1..75: note = Synthetic
  source 1..75: mol_type = other RNA

SEQ ID NO: 404 - RNA, 75 nt, synthetic construct; identical to SEQ ID NO: 402
  misc_feature 1..75: note = Synthetic
  source 1..75: mol_type = other RNA

SEQ ID NO: 405 - RNA, 75 nt, synthetic construct; identical to SEQ ID NO: 402
  misc_feature 1..75: note = Synthetic
  source 1..75: mol_type = other RNA

SEQ ID NO: 406 - RNA, 79 nt, synthetic construct
  misc_feature 1..79: note = Synthetic
  source 1..79: mol_type = other RNA
ggcccagactgagcacgtgagttttagagcgcaagttaaaataaggctagtccgttatcacgggcaccgagtcggtgct

SEQ ID NO: 407 - RNA, 83 nt, synthetic construct
  misc_feature 1..83: note = Synthetic
  source 1..83: mol_type = other RNA
ggcccagactgagcacgtgagttttagagctatagcaagttaaaataaggctagtccgttatcacgggcaccgagtcggtgct

SEQ ID NO: 408 - RNA, 83 nt, synthetic construct; identical to SEQ ID NO: 407
  misc_feature 1..83: note = Synthetic
  source 1..83: mol_type = other RNA

SEQ ID NO: 409 - RNA, 98 nt, synthetic construct
  misc_feature 1..98: note = Synthetic
  source 1..98: mol_type = other RNA
ggcccagactgagcacgtgagttttagasaagttaaaataaggctagtccgttatcacgggcaccgagtcggtgctctgcgatcacgtgctcagtctg

SEQ ID NO: 410 - RNA, 97 nt, synthetic construct
  misc_feature 1..97: note = Synthetic
  source 1..97: mol_type = other RNA
ggcccagactgagcacgtgagttttagaaagttaaaataaggctagtccgttatcacgggcaccgagtcggtgctctgcgatcacgtgctcagtctg

SEQ ID NO: 411 - RNA, 97 nt, synthetic construct; identical to SEQ ID NO: 410
  misc_feature 1..97: note = Synthetic
  source 1..97: mol_type = other RNA

SEQ ID NO: 412 - RNA, 97 nt, synthetic construct; identical to SEQ ID NO: 410
  misc_feature 1..97: note = Synthetic
  source 1..97: mol_type = other RNA

SEQ ID NO: 413 - RNA, 97 nt, synthetic construct; identical to SEQ ID NO: 410
  misc_feature 1..97: note = Synthetic
  source 1..97: mol_type = other RNA

SEQ ID NO: 414 - RNA, 101 nt, synthetic construct
  misc_feature 1..101: note = Synthetic
  source 1..101: mol_type = other RNA
ggcccagactgagcacgtgagttttagagcgcaagttaaaataaggctagtccgttatcacgggcaccgagtcggtgctctgcgatcacgtgctcagtctg

SEQ ID NO: 415 - RNA, 105 nt, synthetic construct
  misc_feature 1..105: note = Synthetic
  source 1..105: mol_type = other RNA
ggcccagactgagcacgtgagttttagagctatagcaagttaaaataaggctagtccgttatcacgggcaccgagtcggtgctctgcgatcacgtgctcagtctg

SEQ ID NO: 416 - RNA, 105 nt, synthetic construct; identical to SEQ ID NO: 415
  misc_feature 1..105: note = Synthetic
  source 1..105: mol_type = other RNA

SEQ ID NO: 417 - RNA, 110 nt, synthetic construct
  modified_base 83: mod_base = OTHER; note = thymine
  modified_base 88: mod_base = OTHER; note = thymine
  modified_base 90: mod_base = OTHER; note = thymine
  modified_base 98: mod_base = OTHER; note = thymine
  modified_base 101: mod_base = OTHER; note = thymine
  misc_feature 1..110: note = Synthetic
  source 1..110: mol_type = other RNA
gatgtctgcaggccagatgagttttagagctatagcaagttaaaataaggctagtccgttatcacgggcaccgagtcggtgctgccatctggagcagtgatctggcctgc

SEQ ID NO: 418 - RNA, 112 nt, synthetic construct
  modified_base 83: mod_base = OTHER; note = thymine
  modified_base 88: mod_base = OTHER; note = thymine
  modified_base 90: mod_base = OTHER; note = thymine
  misc_feature 1..112: note = Synthetic
  source 1..112: mol_type = other RNA
gatgtctgcaggccagatgagttttagagctatagcaagttaaaataaggctagtccgttatcacgggcaccgagtcggtgctgccatctggagcagtgatctggcctgcag

SEQ ID NO: 419 - RNA, 112 nt, synthetic construct; identical to SEQ ID NO: 418
  modified_base 83: mod_base = OTHER; note = thymine
  modified_base 88: mod_base = OTHER; note = thymine
  modified_base 90: mod_base = OTHER; note = thymine
  modified_base 98: mod_base = OTHER; note = thymine
  misc_feature 1..112: note = Synthetic
  source 1..112: mol_type = other RNA

SEQ ID NO: 420 - RNA, 112 nt, synthetic construct; identical to SEQ ID NO: 418
  modified_base 83: mod_base = OTHER; note = thymine
  modified_base 88: mod_base = OTHER; note = thymine
  modified_base 90: mod_base = OTHER; note = thymine
  modified_base 98: mod_base = OTHER; note = thymine
  misc_feature 1..112: note = Synthetic
  source 1..112: mol_type = other RNA

SEQ ID NO: 421 - RNA, 112 nt, synthetic construct; identical to SEQ ID NO: 418
  modified_base 83: mod_base = OTHER; note = thymine
  modified_base 88: mod_base = OTHER; note = thymine
  modified_base 90: mod_base = OTHER; note = thymine
  modified_base 98: mod_base = OTHER; note = thymine
  misc_feature 1..112: note = Synthetic
  source 1..112: mol_type = other RNA

SEQ ID NO: 422 - RNA, 112 nt, synthetic construct; identical to SEQ ID NO: 418
  modified_base 83: mod_base = OTHER; note = thymine
  modified_base 88: mod_base = OTHER; note = thymine
  modified_base 90: mod_base = OTHER; note = thymine
  modified_base 98: mod_base = OTHER; note = thymine
  modified_base 101: mod_base = OTHER; note = thymine
  misc_feature 1..112: note = Synthetic
  source 1..112: mol_type = other RNA

SEQ ID NO: 423 - RNA, 112 nt, synthetic construct; identical to SEQ ID NO: 418
  modified_base 83: mod_base = OTHER; note = thymine
  modified_base 88: mod_base = OTHER; note = thymine
  modified_base 90: mod_base = OTHER; note = thymine
  modified_base 98: mod_base = OTHER; note = thymine
  modified_base 101: mod_base = OTHER; note = thymine
  modified_base 103: mod_base = OTHER; note = thymine
  misc_feature 1..112: note = Synthetic
  source 1..112: mol_type = other RNA

SEQ ID NO: 424 - RNA, 112 nt, synthetic construct; identical to SEQ ID NO: 418
  modified_base 83: mod_base = OTHER; note = thymine
  modified_base 88: mod_base = OTHER; note = thymine
  modified_base 90: mod_base = OTHER; note = thymine
  modified_base 98: mod_base = OTHER; note = thymine
  modified_base 101: mod_base = OTHER; note = thymine
  modified_base 103: mod_base = OTHER; note = thymine
  misc_feature 1..112: note = Synthetic
  source 1..112: mol_type = other RNA

SEQ ID NO: 425 - RNA, 112 nt, synthetic construct; identical to SEQ ID NO: 418
  modified_base 83: mod_base = OTHER; note = thymine
  modified_base 88: mod_base = OTHER; note = thymine
  modified_base 90: mod_base = OTHER; note = thymine
  modified_base 98: mod_base = OTHER; note = thymine
  modified_base 101: mod_base = OTHER; note = thymine
  modified_base 103: mod_base = OTHER; note = thymine
  misc_feature 1..112: note = Synthetic
  source 1..112: mol_type = other RNA

SEQ ID NO: 426 - RNA, 105 nt, synthetic construct
  modified_base 82: mod_base = OTHER; note = thymine
  modified_base 90: mod_base = OTHER; note = thymine
  modified_base 93: mod_base = OTHER; note = thymine
  misc_feature 1..105: note = Synthetic
  source 1..105: mol_type = other RNA
aagtgacttccagtaagattgttttagagcgcaagttaaaataaggctagtccgttatcacgggcaccgagtcggtgcaaatagacacgtaatcttactggaagt

SEQ ID NO: 427 - RNA, 105 nt, synthetic construct
  modified_base 89: mod_base = OTHER; note = thymine
  misc_feature 1..105: note = Synthetic
  source 1..105: mol_type = other RNA
cgggctggagctgttcgcgcgttttagagctatagcaagttaaaataaggctagtccgttatcacgggcaccgagtcggtgcgcaagatggcagcgcgaacagct

SEQ ID NO: 428 - RNA, 91 nt, synthetic construct
  misc_feature 1..91: note = Synthetic
  source 1..91: mol_type = other RNA
ccgcgcgcgcgaaaaagccggttttagagctagaaatagcaagttaaaataaggctagtccgttatcacgaaagggcaccgagtcggtgct

SEQ ID NO: 429 - RNA, 58 nt, synthetic construct; identical to SEQ ID NO: 38
  misc_feature 1..58: note = Synthetic
  source 1..58: mol_type = other RNA

SEQ ID NO: 430 - RNA, 62 nt, synthetic construct; identical to SEQ ID NO: 39
  misc_feature 1..62: note = Synthetic
  source 1..62: mol_type = other RNA

SEQ ID NO: 431 - RNA, 74 nt, synthetic construct; identical to SEQ ID NO: 322
  misc_feature 1..74: note = Synthetic
  variation 1..20: note = n is a, c, g, or u
  source 1..74: mol_type = other RNA

SEQ ID NO: 432 - RNA, 74 nt, synthetic construct; identical to SEQ ID NO: 322
  misc_feature 1..74: note = Synthetic
  variation 1..20: note = n is a, c, g, or u
  source 1..74: mol_type = other RNA

SEQ ID NO: 433 - RNA, 82 nt, synthetic construct; identical to SEQ ID NO: 130
  misc_feature 1..82: note = Synthetic
  variation 1..20: note = n is a, c, g, or u
  source 1..82: mol_type = other RNA

SEQ ID NO: 434 - RNA, 90 nt, synthetic construct; identical to SEQ ID NO: 120
  misc_feature 1..90: note = Synthetic
  variation 1..20: note = n is a, c, g, or u
  source 1..90: mol_type = other RNA

SEQ ID NO: 435 - RNA, 75 nt, synthetic construct; identical to SEQ ID NO: 101
  misc_feature 1..75: note = Synthetic
  variation 1..20: note = n is a, c, g, or u
  source 1..75: mol_type = other RNA

SEQ ID NO: 436 - RNA, 78 nt, synthetic construct; identical to SEQ ID NO: 129
  misc_feature 1..78: note = Synthetic
  variation 1..20: note = n is a, c, g, or u
  source 1..78: mol_type = other RNA

SEQ ID NO: 437 - RNA, 82 nt, synthetic construct; identical to SEQ ID NO: 130
  misc_feature 1..82: note = Synthetic
  variation 1..20: note = n is a, c, g, or u
  source 1..82: mol_type = other RNA

SEQ ID NO: 438 - RNA, 82 nt, synthetic construct; identical to SEQ ID NO: 130
  misc_feature 1..82: note = Synthetic
  variation 1..20: note = n is a, c, g, or u
  source 1..82: mol_type = other RNA

SEQ ID NO: 439 - RNA, 55 nt, synthetic construct; identical to SEQ ID NO: 1
  misc_feature 1..55: note = Synthetic
  source 1..55: mol_type = other RNA

SEQ ID NO: 440 - RNA, 55 nt, synthetic construct; identical to SEQ ID NO: 1
  misc_feature 1..55: note = Synthetic
  source 1..55: mol_type = other RNA

SEQ ID NO: 441 - RNA, 55 nt, synthetic construct; identical to SEQ ID NO: 1
  misc_feature 1..55: note = Synthetic
  source 1..55: mol_type = other RNA

SEQ ID NO: 442 - RNA, 55 nt, synthetic construct; identical to SEQ ID NO: 1
  misc_feature 1..55: note = Synthetic
  source 1..55: mol_type = other RNA

SEQ ID NO: 443 - RNA, 55 nt, synthetic construct; identical to SEQ ID NO: 1
  misc_feature 1..55: note = Synthetic
  source 1..55: mol_type = other RNA

SEQ ID NO: 444 - RNA, 59 nt, synthetic construct; identical to SEQ ID NO: 2
  misc_feature 1..59: note = Synthetic
  source 1..59: mol_type = other RNA

SEQ ID NO: 445 - RNA, 63 nt, synthetic construct; identical to SEQ ID NO: 3
  misc_feature 1..63: note = Synthetic
  source 1..63: mol_type = other RNA

SEQ ID NO: 446 - RNA, 63 nt, synthetic construct; identical to SEQ ID NO: 3
  misc_feature 1..63: note = Synthetic
  source 1..63: mol_type = other RNA

SEQ ID NO: 447 - RNA, 77 nt, synthetic construct; identical to SEQ ID NO: 394
  misc_feature 1..77: note = Synthetic
  source 1..77: mol_type = other RNA

SEQ ID NO: 448 - RNA, 77 nt, synthetic construct; identical to SEQ ID NO: 394
  misc_feature 1..77: note = Synthetic
  source 1..77: mol_type = other RNA

SEQ ID NO: 449 - RNA, 77 nt, synthetic construct; identical to SEQ ID NO: 394
  misc_feature 1..77: note = Synthetic
  source 1..77: mol_type = other RNA

SEQ ID NO: 450 - RNA, 77 nt, synthetic construct; identical to SEQ ID NO: 394
  misc_feature 1..77: note = Synthetic
  source 1..77: mol_type = other RNA

SEQ ID NO: 451 - RNA, 77 nt, synthetic construct; identical to SEQ ID NO: 394
  misc_feature 1..77: note = Synthetic
  source 1..77: mol_type = other RNA

SEQ ID NO: 452 - RNA, 81 nt, synthetic construct; identical to SEQ ID NO: 398
  misc_feature 1..81: note = Synthetic
  source 1..81: mol_type = other RNA

SEQ ID NO: 453 - RNA, 85 nt, synthetic construct; identical to SEQ ID NO: 399
  misc_feature 1..85: note = Synthetic
  source 1..85: mol_type = other RNA

SEQ ID NO: 454 - RNA, 85 nt, synthetic construct; identical to SEQ ID NO: 399
  misc_feature 1..85: note = Synthetic
  source 1..85: mol_type = other RNA

SEQ ID NO: 455 - RNA, 26 nt, synthetic construct
  modified_base 3: mod_base = OTHER; note = thymine
  modified_base 11: mod_base = OTHER; note = thymine
  modified_base 14: mod_base = OTHER; note = thymine
  misc_feature 1..26: note = Synthetic
  source 1..26: mol_type = other RNA
aatagacacgtaatcttactggaagt

SEQ ID NO: 456 - RNA, 27 nt, synthetic construct
  modified_base 4: mod_base = OTHER; note = thymine
  modified_base 12: mod_base = OTHER; note = thymine
  modified_base 15: mod_base = OTHER; note = thymine
  misc_feature 1..27: note = Synthetic
  source 1..27: mol_type = other RNA
aaatagacacgtaatcttactggaagt

SEQ ID NO: 457 - RNA, 28 nt, synthetic construct
  modified_base 5: mod_base = OTHER; note = thymine
  modified_base 13: mod_base = OTHER; note = thymine
  modified_base 16: mod_base = OTHER; note = thymine
  misc_feature 1..28: note = Synthetic
  source 1..28: mol_type = other RNA
gaaatagacacgtaatcttactggaagt

SEQ ID NO: 458 - RNA, 29 nt, synthetic construct
  modified_base 6: mod_base = OTHER; note = thymine
  modified_base 14: mod_base = OTHER; note = thymine
  modified_base 17: mod_base = OTHER; note = thymine
  misc_feature 1..29: note = Synthetic
  source 1..29: mol_type = other RNA
ggaaatagacacgtaatcttactggaagt

SEQ ID NO: 459 - RNA, 30 nt, synthetic construct
  modified_base 1: mod_base = OTHER; note = thymine
  modified_base 7: mod_base = OTHER; note = thymine
  modified_base 15: mod_base = OTHER; note = thymine
  modified_base 18: mod_base = OTHER; note = thymine
  misc_feature 1..30: note = Synthetic
  source 1..30: mol_type = other RNA
tggaaatagacacgtaatcttactggaagt

SEQ ID NO: 460 - RNA, 20 nt, synthetic construct
  misc_feature 1..20: note = Synthetic
  source 1..20: mol_type = other RNA
gatgtctgcaggccagatga

SEQ ID NO: 461 - RNA, 20 nt, synthetic construct
  misc_feature 1..20: note = Synthetic
  source 1..20: mol_type = other RNA
gatgtctgcaggccagatga

SEQ ID NO: 462 - RNA, 20 nt, synthetic construct
  misc_feature 1..20: note = Synthetic
  source 1..20: mol_type = other RNA
gatgtctgcaggccagatga

SEQ ID NO: 463 - RNA, 20 nt, synthetic construct
  misc_feature 1..20: note = Synthetic
  source 1..20: mol_type = other RNA
gatgtctgcaggccagatga

SEQ ID NO: 464 - RNA, 20 nt, synthetic construct
  modified_base 18: mod_base = OTHER; note = thymine
  misc_feature 1..20: note = Synthetic
  source 1..20: mol_type = other RNA
gatgtctgcaggccagatga

SEQ ID NO: 465 - RNA, 20 nt, synthetic construct
  modified_base 5: mod_base = OTHER; note = thymine
  modified_base 18: mod_base = OTHER; note = thymine
  misc_feature 1..20: note = Synthetic
  source 1..20: mol_type = other RNA
gatgtctgcaggccagatga

SEQ ID NO: 466 - RNA, 86 nt, synthetic construct
  misc_feature 1..86: note = Synthetic
  source 1..86: mol_type = other RNA
gatgtctgcaggccagatgagttttagagctagaaatagcaagttaaaataaggctagtccgttatcacgaaagggcaccgagtcg

SEQ ID NO: 467 - RNA, 93 nt, synthetic construct
  modified_base 26: mod_base = OTHER; note = thymine
  modified_base 28: mod_base = OTHER; note = thymine
  modified_base 33: mod_base = OTHER; note = thymine
  modified_base 35: mod_base = OTHER; note = thymine
  modified_base 43: mod_base = OTHER; note = thymine
  modified_base 47: mod_base = OTHER; note = thymine
  modified_base 50: mod_base = OTHER; note = thymine
  modified_base 53: mod_base = OTHER; note = thymine
  modified_base 71: mod_base = OTHER; note = thymine
  modified_base 74: mod_base = OTHER; note = thymine
  modified_base 84: mod_base = OTHER; note = thymine
  misc_feature 1..93: note = Synthetic
  source 1..93: mol_type = other RNA
gtgccacagtgtgtccctctgacaatgtgccatctggagccctcaatgatcctgacgacggagaccgccgtcgtcgacaagcctctggcctgc

SEQ ID NO: 468 - DNA, 27 bp, synthetic construct
  misc_feature 1..27: note = Synthetic
  source 1..27: mol_type = other DNA
cacactgtggcaccgactcggtgccct

SEQ ID NO: 469 - RNA, 61 nt, synthetic construct
  misc_feature 1..61: note = Synthetic
  source 1..61: mol_type = other RNA
gatgtctgcaggccagatgagttttagagctagaaatagcaagttaaaataaggctagtcc

SEQ ID NO: 470 - RNA, 57 nt, synthetic construct
  modified_base 51: mod_base = OTHER; note = thymine
  modified_base 53: mod_base = OTHER; note = thymine
  misc_feature 1..57: note = Synthetic
  source 1..57: mol_type = other RNA
gttatcacgaaagggcaccgagtcggtgccacagtgtgtccctctgacaatgtgcca

SEQ ID NO: 471 - RNA, 61 nt, synthetic construct
  modified_base 1: mod_base = OTHER; note = thymine
  modified_base 3: mod_base = OTHER; note = thymine
  modified_base 11: mod_base = OTHER; note = thymine
  modified_base 15: mod_base = OTHER; note = thymine
  modified_base 18: mod_base = OTHER; note = thymine
  modified_base 21: mod_base = OTHER; note = thymine
  modified_base 39: mod_base = OTHER; note = thymine
  modified_base 42: mod_base = OTHER; note = thymine
  modified_base 52: mod_base = OTHER; note = thymine
  misc_feature 1..61: note = Synthetic
  source 1..61: mol_type = other RNA
tctggagccctcaatgatcctgacgacggagaccgccgtcgtcgacaagcctctggcctgc

SEQ ID NO: 472 - DNA, 27 bp, synthetic construct
  misc_feature 1..27: note = Synthetic
  source 1..27: mol_type = other DNA
ctttcgtgataacggactagccttatt

SEQ ID NO: 473 - DNA, 27 bp, synthetic construct
  misc_feature 1..27: note = Synthetic
  source 1..27: mol_type = other DNA
tgagggctccagatggcacattgtcag

SEQ ID NO: 474 - DNA, 27 bp, synthetic construct
  misc_feature 1..27: note = Synthetic
  source 1..27: mol_type = other DNA
gtgataacggactagccttattttaac

SEQ ID NO: 475 - RNA, 55 nt, synthetic construct
  misc_feature 1..55: note = Synthetic
  source 1..55: mol_type = other RNA
aagtgacttccagtaagattgttttagagctagaaatagcaagttaaaataaggc

SEQ ID NO: 476 - RNA, 62 nt, synthetic construct
  modified_base 39: mod_base = OTHER; note = thymine
  modified_base 47: mod_base = OTHER; note = thymine
  modified_base 50: mod_base = OTHER; note = thymine
  misc_feature 1..62: note = Synthetic
  source 1..62: mol_type = other RNA
tagtccgttatcacgaaagggcaccgagtcggtgcaaatagacacgtaatcttactggaagt

SEQ ID NO: 477 - RNA, 108 nt, synthetic construct
  modified_base 86: mod_base = OTHER; note = thymine
  modified_base 92: mod_base = OTHER; note = thymine
  modified_base 95: mod_base = OTHER; note = thymine
  modified_base 97: mod_base = OTHER; note = thymine
  misc_feature 1..108: note = Synthetic
  source 1..108: mol_type = other RNA
aaaggctgctgatgagacctgttttagagcgcaagttaaaataaggctagtccgttatcacgggcaccgagtcggtgcaggcaaatggcggtcatgtctcatcagcag

SEQ ID NO: 478 - RNA, 81 nt, synthetic construct
  misc_feature 1..81: note = Synthetic
  source 1..81: mol_type = other RNA
gtcaaccagtatcccggtgcgttttagagctatagcaagttaaaataaggcgtccgttatcacgggcaccgagtcggtgct

SEQ ID NO: 479 - RNA, 105 nt, synthetic construct
  misc_feature 1..105: note = Synthetic
  source 1..105: mol_type = other RNA
ggcccagactgagcacgtgagttttagagctatagcaagttaaaataaggctagtccgttatcacgggcaccgagtcggtgctcctctgcgatcacgtgctcagt

SEQ ID NO: 480 - RNA, 107 nt, synthetic construct
  modified_base 83..85: mod_base = OTHER; note = thymine
  modified_base 88: mod_base = OTHER; note = thymine
  modified_base 90: mod_base = OTHER; note = thymine
  modified_base 95: mod_base = OTHER; note = thymine
  misc_feature 1..107: note = Synthetic
  source 1..107: mol_type = other RNA
ggcccagactgagcacgtgagttttagagctatagcaagttaaaataaggctagtccgttatcacgggcaccgagtcggtgctttcctctgcgatcacgtgctcagt

SEQ ID NO: 481 - RNA, 83 nt, synthetic construct
  misc_feature 1..83: note = Synthetic
  source 1..83: mol_type = other RNA
gtcaaccagtatcccggtgcgttttagagctatagcaagttaaaataaggctagtccgttatcacgggcaccgagtcggtgct

SEQ ID NO: 482 - RNA, 91 nt, synthetic construct
  misc_feature 1..91: note = Synthetic
  source 1..91: mol_type = other RNA
gatgtctgcaggccagatgagttttagagctagaaatagcaagttaaaataaggctagtccgttatcacgaaagggcaccgagtcggtgct

SEQ ID NO: 483 - RNA, 58 nt, synthetic construct
  modified_base 24: mod_base = OTHER; note = thymine
  modified_base 29: mod_base = OTHER; note = thymine
  modified_base 31: mod_base = OTHER; note = thymine
  misc_feature 1..58: note = Synthetic
  source 1..58: mol_type = other RNA
gcacatgaggatcacccatgtgctgccatctggagcagtgatctggcctgcagacatc

SEQ ID NO: 484 - RNA, 58 nt, synthetic construct; identical to SEQ ID NO: 483
  modified_base 24: mod_base = OTHER; note = thymine
  modified_base 29: mod_base = OTHER; note = thymine
  modified_base 31: mod_base = OTHER; note = thymine
  modified_base 39: mod_base = OTHER; note = thymine
  misc_feature 1..58: note = Synthetic
  source 1..58: mol_type = other RNA

SEQ ID NO: 485 - RNA, 58 nt, synthetic construct; identical to SEQ ID NO: 483
  modified_base 24: mod_base = OTHER; note = thymine
  modified_base 29: mod_base = OTHER; note = thymine
  modified_base 31: mod_base = OTHER; note = thymine
  modified_base 39: mod_base = OTHER; note = thymine
  misc_feature 1..58: note = Synthetic
  source 1..58: mol_type = other RNA

SEQ ID NO: 486 - RNA, 58 nt, synthetic construct; identical to SEQ ID NO: 483
  modified_base 24: mod_base = OTHER; note = thymine
  modified_base 29: mod_base = OTHER; note = thymine
  modified_base 31: mod_base = OTHER; note = thymine
  modified_base 39: mod_base = OTHER; note = thymine
  misc_feature 1..58: note = Synthetic
  source 1..58: mol_type = other RNA

SEQ ID NO: 487 - RNA, 58 nt, synthetic construct; identical to SEQ ID NO: 483
  modified_base 24: mod_base = OTHER; note = thymine
  modified_base 29: mod_base = OTHER; note = thymine
  modified_base 31: mod_base = OTHER; note = thymine
  modified_base 39: mod_base = OTHER; note = thymine
  modified_base 42: mod_base = OTHER; note = thymine
  misc_feature 1..58: note = Synthetic
  source 1..58: mol_type = other RNA

SEQ ID NO: 488 - RNA, 58 nt, synthetic construct; identical to SEQ ID NO: 483
  modified_base 24: mod_base = OTHER; note = thymine
  modified_base 29: mod_base = OTHER; note = thymine
  modified_base 31: mod_base = OTHER; note = thymine
  modified_base 39: mod_base = OTHER; note = thymine
  modified_base 42: mod_base = OTHER; note = thymine
  misc_feature 1..58: note = Synthetic
  source 1..58: mol_type = other RNA

SEQ ID NO: 489 - RNA, 58 nt, synthetic construct; identical to SEQ ID NO: 483
  modified_base 24: mod_base = OTHER; note = thymine
  modified_base 29: mod_base = OTHER; note = thymine
  modified_base 31: mod_base = OTHER; note = thymine
  modified_base 39: mod_base = OTHER; note = thymine
  modified_base 42: mod_base = OTHER; note = thymine
  modified_base 44: mod_base = OTHER; note = thymine
  misc_feature 1..58: note = Synthetic
  source 1..58: mol_type = other RNA

SEQ ID NO: 490 - RNA, 58 nt, synthetic construct; identical to SEQ ID NO: 483
  modified_base 24: mod_base = OTHER; note = thymine
  modified_base 29: mod_base = OTHER; note = thymine
  modified_base 31: mod_base = OTHER; note = thymine
  modified_base 39: mod_base = OTHER; note = thymine
  modified_base 42: mod_base = OTHER; note = thymine
  modified_base 44: mod_base = OTHER; note = thymine
  misc_feature 1..58: note = Synthetic
  source 1..58: mol_type = other RNA

SEQ ID NO: 491 - RNA, 58 nt, synthetic construct; identical to SEQ ID NO: 483
  modified_base 24: mod_base = OTHER; note = thymine
  modified_base 29: mod_base = OTHER; note = thymine
  modified_base 31: mod_base = OTHER; note = thymine
  modified_base 39: mod_base = OTHER; note = thymine
  modified_base 42: mod_base = OTHER; note = thymine
  modified_base 44: mod_base = OTHER; note = thymine
  misc_feature 1..58: note = Synthetic
  source 1..58: mol_type = other RNA

SEQ ID NO: 492 - RNA, 58 nt, synthetic construct; identical to SEQ ID NO: 483
  misc_feature 1..58: note = Synthetic
  source 1..58: mol_type = other RNA

SEQ ID NO: 493 - RNA, 105 nt, synthetic construct
  modified_base 83: mod_base = OTHER; note = thymine
  modified_base 85: mod_base = OTHER; note = thymine
  modified_base 90: mod_base = OTHER; note = thymine
  modified_base 95: mod_base = OTHER; note = thymine
  modified_base 98: mod_base = OTHER; note = thymine
  modified_base 102..104: mod_base = OTHER; note = thymine
  misc_feature 1..105: note = Synthetic
  source 1..105: mol_type = other RNA
ggcccagactgagcacgtgagttttagagctatagcaagttaaaataaggctagtccgttatcacgggcaccgagtcggtgctctgcgatcacgtgctcagtttg

SEQ ID NO: 494 - RNA, 105 nt, synthetic construct; identical to SEQ ID NO: 415
  modified_base 83: mod_base = OTHER; note = thymine
  modified_base 85: mod_base = OTHER; note = thymine
  modified_base 90: mod_base = OTHER; note = thymine
  modified_base 95: mod_base = OTHER; note = thymine
  modified_base 98: mod_base = OTHER; note = thymine
  misc_feature 1..105: note = Synthetic
  source 1..105: mol_type = other RNA

SEQ ID NO: 495 - RNA, 105 nt, synthetic construct; identical to SEQ ID NO: 415
  modified_base 83: mod_base = OTHER; note = thymine
  modified_base 85: mod_base = OTHER; note = thymine
  modified_base 90: mod_base = OTHER; note = thymine
  modified_base 95: mod_base = OTHER; note = thymine
  misc_feature 1..105: note = Synthetic
  source 1..105: mol_type = other RNA

SEQ ID NO: 496 - RNA, 105 nt, synthetic construct; identical to SEQ ID NO: 415
  modified_base 83: mod_base = OTHER; note = thymine
  modified_base 85: mod_base = OTHER; note = thymine
  modified_base 90: mod_base = OTHER; note = thymine
  misc_feature 1..105: note = Synthetic
  source 1..105: mol_type = other RNA

SEQ ID NO: 497 - RNA, 105 nt, synthetic construct; identical to SEQ ID NO: 415
  modified_base 83: mod_base = OTHER; note = thymine
  modified_base 85: mod_base = OTHER; note = thymine
  modified_base 90: mod_base = OTHER; note = thymine
  misc_feature 1..105: note = Synthetic
  source 1..105: mol_type = other RNA

SEQ ID NO: 498 - RNA, 105 nt, synthetic construct; identical to SEQ ID NO: 415
  modified_base 83: mod_base = OTHER; note = thymine
  modified_base 85: mod_base = OTHER; note = thymine
  modified_base 90: mod_base = OTHER; note = thymine
  misc_feature 1..105: note = Synthetic
  source 1..105: mol_type = other RNA

SEQ ID NO: 499 - RNA, 105 nt, synthetic construct; identical to SEQ ID NO: 415
  modified_base 83: mod_base = OTHER; note = thymine
  modified_base 85: mod_base = OTHER; note = thymine
  modified_base 90: mod_base = OTHER; note = thymine
  misc_feature 1..105: note = Synthetic
  source 1..105: mol_type = other RNA

SEQ ID NO: 500 - RNA, 105 nt, synthetic construct; identical to SEQ ID NO: 415
  modified_base 83: mod_base = OTHER; note = thymine
  modified_base 85: mod_base = OTHER; note = thymine
  modified_base 90: mod_base = OTHER; note = thymine
  misc_feature 1..105: note = Synthetic
  source 1..105: mol_type = other RNA

SEQ ID NO: 501 - RNA, 105 nt, synthetic construct; identical to SEQ ID NO: 415
  modified_base 83: mod_base = OTHER; note = thymine
  modified_base 85: mod_base = OTHER; note = thymine
  misc_feature 1..105: note = Synthetic
  source 1..105: mol_type = other RNA

SEQ ID NO: 502 - RNA, 105 nt, synthetic construct; identical to SEQ ID NO: 415
  modified_base 83: mod_base = OTHER; note = thymine
  modified_base 85: mod_base = OTHER; note = thymine
  misc_feature 1..105: note = Synthetic
  source 1..105: mol_type = other RNA

SEQ ID NO: 503 - RNA, 105 nt, synthetic construct; identical to SEQ ID NO: 479
  modified_base 83: mod_base = OTHER; note = thymine
  modified_base 86: mod_base = OTHER; note = thymine
  modified_base 88: mod_base = OTHER; note = thymine
  modified_base 93: mod_base = OTHER; note = thymine
  misc_feature 1..105: note = Synthetic
  source 1..105: mol_type = other RNA

SEQ ID NO: 504 - RNA, 103 nt, synthetic construct
  modified_base 84: mod_base = OTHER; note = thymine
  modified_base 86: mod_base = OTHER; note = thymine
  modified_base 91: mod_base = OTHER; note = thymine
  misc_feature 1..103: note = Synthetic
  source 1..103: mol_type = other RNA
ggcccagactgagcacgtgagttttagagctatagcaagttaaaataaggctagtccgttatcacgggcaccgagtcggtgcctctgcgatcacgtgctcagt

SEQ ID NO: 505 - RNA, 109 nt, synthetic construct
  modified_base 83..85: mod_base = OTHER; note = thymine
  modified_base 88: mod_base = OTHER; note = thymine
  modified_base 90: mod_base = OTHER; note = thymine
  modified_base 95: mod_base = OTHER; note = thymine
  misc_feature 1..109: note = Synthetic
  source 1..109: mol_type = other RNA
ggcccagactgagcacgtgagttttagagctatagcaagttaaaataaggctagtccgttatcacgggcaccgagtcggtgctttcctctgcgatcacgtgctcagtct

SEQ ID NO: 506 - RNA, 107 nt, synthetic construct
  modified_base 83: mod_base = OTHER; note = thymine
  modified_base 86: mod_base = OTHER; note = thymine
  modified_base 88: mod_base = OTHER; note = thymine
  modified_base 93: mod_base = OTHER; note = thymine
  misc_feature 1..107: note = Synthetic
  source 1..107: mol_type = other RNA
ggcccagactgagcacgtgagttttagagctatagcaagttaaaataaggctagtccgttatcacgggcaccgagtcggtgctcctctgcgatcacgtgctcagtct

SEQ ID NO: 507 - RNA, 105 nt, synthetic construct
  modified_base 84: mod_base = OTHER; note = thymine
  modified_base 86: mod_base = OTHER; note = thymine
  modified_base 91: mod_base = OTHER; note = thymine
  misc_feature 1..105: note = Synthetic
  source 1..105: mol_type = other RNA
ggcccagactgagcacgtgagttttagagctatagcaagttaaaataaggctagtccgttatcacgggcaccgagtcggtgcctctgcgatcacgtgctcagtct

SEQ ID NO: 508 - RNA, 81 nt, synthetic construct
  misc_feature 1..81: note = Synthetic
  source 1..81: mol_type = other RNA
ggcccagactgagcacgtgagttttagagctatagcaagttaaaataaggcgtccgttatcacgggcaccgagtcggtgct

SEQ ID NO: 509 - RNA, 105 nt, synthetic construct; identical to SEQ ID NO: 415
  misc_feature 1..105: note = Synthetic
  source 1..105: mol_type = other RNA

SEQ ID NO: 510 - RNA, 105 nt, synthetic construct; identical to SEQ ID NO: 415
  misc_feature 1..105: note = Synthetic
  source 1..105: mol_type = other RNA

SEQ ID NO: 511 - RNA, 105 nt, synthetic construct; identical to SEQ ID NO: 415
  misc_feature 1..105: note = Synthetic
  source 1..105: mol_type = other RNA

SEQ ID NO: 512 - RNA, 105 nt, synthetic construct; identical to SEQ ID NO: 415
  misc_feature 1..105: note = Synthetic
  source 1..105: mol_type = other RNA

SEQ ID NO: 513 - RNA, 105 nt, synthetic construct; identical to SEQ ID NO: 415
  misc_feature 1..105: note = Synthetic
  source 1..105: mol_type = other RNA

SEQ ID NO: 514 - RNA, 105 nt, synthetic construct; identical to SEQ ID NO: 415
  misc_feature 1..105: note = Synthetic
  source 1..105: mol_type = other RNA

SEQ ID NO: 515 - RNA, 105 nt, synthetic construct; identical to SEQ ID NO: 415
  misc_feature 1..105: note = Synthetic
  source 1..105: mol_type = other RNA

SEQ ID NO: 516 - RNA, 105 nt, synthetic construct; identical to SEQ ID NO: 415
  misc_feature 1..105: note = Synthetic
  source 1..105: mol_type = other RNA

SEQ ID NO: 517 - RNA, 105 nt, synthetic construct; identical to SEQ ID NO: 415
  misc_feature 1..105: note = Synthetic
  source 1..105: mol_type = other RNA

SEQ ID NO: 518 - RNA, 105 nt, synthetic construct; identical to SEQ ID NO: 415
  misc_feature 1..105: note = Synthetic
  source 1..105: mol_type = other RNA

SEQ ID NO: 519 - RNA, 105 nt, synthetic construct; identical to SEQ ID NO: 415
  misc_feature 1..105: note = Synthetic
  source 1..105: mol_type = other RNA

SEQ ID NO: 520 - RNA, 105 nt, synthetic construct; identical to SEQ ID NO: 415
  misc_feature 1..105: note = Synthetic
  source 1..105: mol_type = other RNA

SEQ ID NO: 521 - RNA, 105 nt, synthetic construct; identical to SEQ ID NO: 415
  misc_feature 1..105: note = Synthetic
  source 1..105: mol_type = other RNA

SEQ ID NO: 522 - RNA, 105 nt, synthetic construct; identical to SEQ ID NO: 415
  misc_feature 1..105: note = Synthetic
  source 1..105: mol_type = other RNA

SEQ ID NO: 523 - RNA, 105 nt, synthetic construct; identical to SEQ ID NO: 415
  misc_feature 1..105: note = Synthetic
  source 1..105: mol_type = other RNA

SEQ ID NO: 524 - RNA, 105 nt, synthetic construct; identical to SEQ ID NO: 415
  misc_feature 1..105: note = Synthetic
  source 1..105: mol_type = other RNA

SEQ ID NO: 525 - RNA, 105 nt, synthetic construct; identical to SEQ ID NO: 415
  misc_feature 1..105: note = Synthetic
  source 1..105: mol_type = other RNA

SEQ ID NO: 526 - RNA, 112 nt, synthetic construct; identical to SEQ ID NO: 418
  modified_base 83: mod_base = OTHER; note = thymine
  modified_base 88: mod_base = OTHER; note = thymine
  modified_base 90: mod_base = OTHER; note = thymine
  modified_base 98: mod_base = OTHER; note = thymine
  modified_base 101: mod_base = OTHER; note = thymine
  misc_feature 1..112: note = Synthetic
  source 1..112: mol_type = other RNA

SEQ ID NO: 527 - RNA, 91 nt, synthetic construct
  misc_feature 1..91: note = Synthetic
  source 1..91: mol_type = other RNA
atgtacagagagcccagggcgttttagagctagaaatagcaagttaaaataaggctagtccgttatcacgaaagggcaccgagtcggtgct

SEQ ID NO: 528 - RNA, 107 nt, synthetic construct; identical to SEQ ID NO: 480
  modified_base 83..85: mod_base = OTHER; note = thymine
  modified_base 88: mod_base = OTHER; note = thymine
  modified_base 90: mod_base = OTHER; note = thymine
  modified_base 95: mod_base = OTHER; note = thymine
  misc_feature 1..107: note = Synthetic
  source 1..107: mol_type = other RNA

SEQ ID NO: 529 - RNA, 91 nt, synthetic construct
  misc_feature 1..91: note = Synthetic
  source 1..91: mol_type = other RNA
ggcccagactgagcacgtgagttttagagctagaaatagcaagttaaaataaggctagtccgttatcacgaaagggcaccgagtcggtgct

SEQ ID NO: 530 - RNA, 108 nt, synthetic construct
  modified_base 79: mod_base = OTHER; note = thymine
  modified_base 84: mod_base = OTHER; note = thymine
  modified_base 86: mod_base = OTHER; note = thymine
  modified_base 94: mod_base = OTHER; note = thymine
  modified_base 97: mod_base = OTHER; note = thymine
  misc_feature 1..108: note = Synthetic
  source 1..108: mol_type = other RNA
gatgtctgcaggccagatgagttttagagcgcaagttaaaataaggctagtccgttatcacgggcaccgagtcggtgctgccatctggagcagtgatctggcctgcag

SEQ ID NO: 531 - RNA, 108 nt, synthetic construct; identical to SEQ ID NO: 530
  modified_base 79: mod_base = OTHER; note = thymine
  modified_base 84: mod_base = OTHER; note = thymine
  modified_base 86: mod_base = OTHER; note = thymine
  modified_base 94: mod_base = OTHER; note = thymine
  modified_base 97: mod_base = OTHER; note = thymine
  misc_feature 1..108: note = Synthetic
  source 1..108: mol_type = other RNA

SEQ ID NO: 532 - RNA, 108 nt, synthetic construct; identical to SEQ ID NO: 530
  modified_base 79: mod_base = OTHER; note = thymine
  modified_base 84: mod_base = OTHER; note = thymine
  modified_base 86: mod_base = OTHER; note = thymine
  modified_base 94: mod_base = OTHER; note = thymine
  modified_base 97: mod_base = OTHER; note = thymine
  misc_feature 1..108: note = Synthetic
  source 1..108: mol_type = other RNA

SEQ ID NO: 533 - RNA, 108 nt, synthetic construct; identical to SEQ ID NO: 530
  modified_base 79: mod_base = OTHER; note = thymine
  modified_base 84: mod_base = OTHER; note = thymine
  modified_base 86: mod_base = OTHER; note = thymine
  modified_base 94: mod_base = OTHER; note = thymine
  modified_base 97: mod_base = OTHER; note = thymine
  misc_feature 1..108: note = Synthetic
  source 1..108: mol_type = other RNA

SEQ ID NO: 534 - RNA, 108 nt, synthetic construct; identical to SEQ ID NO: 530
  modified_base 79: mod_base = OTHER; note = thymine
  modified_base 84: mod_base = OTHER; note = thymine
  modified_base 86: mod_base = OTHER; note = thymine
  modified_base 94: mod_base = OTHER; note = thymine
  modified_base 97: mod_base = OTHER; note = thymine
  misc_feature 1..108: note = Synthetic
  source 1..108: mol_type = other RNA

SEQ ID NO: 535 - RNA, 108 nt, synthetic construct; identical to SEQ ID NO: 530
  modified_base 79: mod_base = OTHER; note = thymine
  modified_base 84: mod_base = OTHER; note = thymine
  modified_base 86: mod_base = OTHER; note = thymine
  modified_base 94: mod_base = OTHER; note = thymine
  modified_base 97: mod_base = OTHER; note = thymine
  misc_feature 1..108: note = Synthetic
  source 1..108: mol_type = other RNA

SEQ ID NO: 536 - RNA, 108 nt, synthetic construct; identical to SEQ ID NO: 530
  modified_base 79: mod_base = OTHER; note = thymine
  modified_base 84: mod_base = OTHER; note = thymine
  modified_base 86: mod_base = OTHER; note = thymine
  modified_base 94: mod_base = OTHER; note = thymine
  modified_base 97: mod_base = OTHER; note = thymine
  misc_feature 1..108: note = Synthetic
  source 1..108: mol_type = other RNA

SEQ ID NO: 537 - RNA, 109 nt, synthetic construct
  modified_base 79: mod_base = OTHER; note = thymine
  modified_base 84: mod_base = OTHER; note = thymine
  modified_base 86: mod_base = OTHER; note = thymine
  modified_base 94: mod_base = OTHER; note = thymine
  modified_base 97: mod_base = OTHER; note = thymine
  misc_feature 1..109: note = Synthetic
  source 1..109: mol_type = other RNA
gatgtctgcaggccagatgagttttagagcgcaagttaaaataaggctagtccgttatcacgggcaccgagtcggtgctgccatctggagcagtgatctggcctgcagt

SEQ ID NO: 538 - RNA, 110 nt, synthetic construct
  modified_base 79: mod_base = OTHER; note = thymine
  modified_base 84: mod_base = OTHER; note = thymine
  modified_base 86: mod_base = OTHER; note = thymine
  modified_base 94: mod_base = OTHER; note = thymine
  modified_base 97: mod_base = OTHER; note = thymine
  misc_feature 1..110: note = Synthetic
  source 1..110: mol_type = other RNA
gatgtctgcaggccagatgagttttagagcgcaagttaaaataaggctagtccgttatcacgggcaccgagtcggtgctgccatctggagcagtgatctggcctgcagtt

SEQ ID NO: 539 - RNA, 111 nt, synthetic construct
  modified_base 79: mod_base = OTHER; note = thymine
  modified_base 84: mod_base = OTHER; note = thymine
  modified_base 86: mod_base = OTHER; note = thymine
  modified_base 94: mod_base = OTHER; note = thymine
  modified_base 97: mod_base = OTHER; note = thymine
  misc_feature 1..111: note = Synthetic
  source 1..111: mol_type = other RNA
gatgtctgcaggccagatgagttttagagcgcaagttaaaataaggctagtccgttatcacgggcaccgagtcggtgctgccatctggagcagtgatctggcctgcagttt

SEQ ID NO: 540 - RNA, 105 nt, synthetic construct; identical to SEQ ID NO: 427
  modified_base 89: mod_base = OTHER; note = thymine
  misc_feature 1..105: note = Synthetic
  source 1..105: mol_type = other RNA

SEQ ID NO: 541 - RNA, 91 nt, synthetic construct; identical to SEQ ID NO: 428
  misc_feature 1..91: note = Synthetic
  source 1..91: mol_type = other RNA

SEQ ID NO: 542 - RNA, 107 nt, synthetic construct; identical to SEQ ID NO: 480
  modified_base 83..85: mod_base = OTHER; note = thymine
  modified_base 88: mod_base = OTHER; note = thymine
  modified_base 90: mod_base = OTHER; note = thymine
  modified_base 95: mod_base = OTHER; note = thymine
  misc_feature 1..107: note = Synthetic
  source 1..107: mol_type = other RNA

SEQ ID NO: 543 - RNA, 109 nt, synthetic construct; identical to SEQ ID NO: 537
  modified_base 79: mod_base = OTHER; note = thymine
  modified_base 84: mod_base = OTHER; note = thymine
  modified_base 86: mod_base = OTHER; note = thymine
  modified_base 94: mod_base = OTHER; note = thymine
  misc_feature 1..109: note = Synthetic
  source 1..109: mol_type = other RNA

SEQ ID NO: 544 - RNA, 109 nt, synthetic construct; identical to SEQ ID NO: 537
  modified_base 79: mod_base = OTHER; note = thymine
  modified_base 84: mod_base = OTHER; note = thymine
  modified_base 86: mod_base = OTHER; note = thymine
  modified_base 94: mod_base = OTHER; note = thymine
  misc_feature 1..109: note = Synthetic
  source 1..109: mol_type = other RNA

SEQ ID NO: 545 - RNA, 109 nt, synthetic construct; identical to SEQ ID NO: 537
  modified_base 79: mod_base = OTHER; note = thymine
  modified_base 84: mod_base = OTHER; note = thymine
  modified_base 86: mod_base = OTHER; note = thymine
  modified_base 94: mod_base = OTHER; note = thymine
  misc_feature 1..109: note = Synthetic
  source 1..109: mol_type = other RNA

SEQ ID NO: 546 - RNA, 109 nt, synthetic construct; identical to SEQ ID NO: 537
  modified_base 79: mod_base = OTHER; note = thymine
  modified_base 84: mod_base = OTHER; note = thymine
  modified_base 86: mod_base = OTHER; note = thymine
  modified_base 94: mod_base = OTHER; note = thymine
  modified_base 97: mod_base = OTHER; note = thymine
  misc_feature 1..109: note = Synthetic
  source 1..109: mol_type = other RNA

SEQ ID NO: 547 - RNA, 109 nt, synthetic construct; identical to SEQ ID NO: 537
  modified_base 79: mod_base = OTHER; note = thymine
  modified_base 84: mod_base = OTHER; note = thymine
  modified_base 86: mod_base = OTHER; note = thymine
  modified_base 94: mod_base = OTHER; note = thymine
  modified_base 97: mod_base = OTHER; note = thymine
  misc_feature 1..109: note = Synthetic
  source 1..109: mol_type = other RNA

SEQ ID NO: 548 - RNA, 109 nt, synthetic construct; identical to SEQ ID NO: 537
  modified_base 79: mod_base = OTHER; note = thymine
  modified_base 84: mod_base = OTHER; note = thymine
  modified_base 86: mod_base = OTHER; note = thymine
  modified_base 94: mod_base = OTHER; note = thymine
  modified_base 97: mod_base = OTHER; note = thymine
  modified_base 99: mod_base = OTHER; note = thymine
  misc_feature 1..109: note = Synthetic
  source 1..109: mol_type = other RNA

SEQ ID NO: 549 - RNA, 109 nt, synthetic construct; identical to SEQ ID NO: 537
  modified_base 79: mod_base = OTHER; note = thymine
  modified_base 84: mod_base = OTHER; note = thymine
  modified_base 86: mod_base = OTHER; note = thymine
  modified_base 94: mod_base = OTHER; note = thymine
  modified_base 97: mod_base = OTHER; note = thymine
  modified_base 99: mod_base = OTHER; note = thymine
  misc_feature 1..109: note = Synthetic
  source 1..109: mol_type = other RNA

SEQ ID NO: 550 - RNA, 109 nt, synthetic construct; identical to SEQ ID NO: 537
  modified_base 79: mod_base = OTHER; note = thymine
  modified_base 84: mod_base = OTHER; note = thymine
  modified_base 86: mod_base = OTHER; note = thymine
  modified_base 94: mod_base = OTHER; note = thymine
  modified_base 97: mod_base = OTHER; note = thymine
  modified_base 99: mod_base = OTHER; note = thymine
  misc_feature 1..109: note = Synthetic
  source 1..109: mol_type = other RNA

SEQ ID NO: 551 - RNA, 109 nt, synthetic construct; identical to SEQ ID NO: 537
  modified_base 79: mod_base = OTHER; note = thymine
  modified_base 84: mod_base = OTHER; note = thymine
  modified_base 86: mod_base = OTHER; note = thymine
  modified_base 94: mod_base = OTHER; note = thymine
  modified_base 97: mod_base = OTHER; note = thymine
  modified_base 99: mod_base = OTHER; note = thymine
  misc_feature 1..109: note = Synthetic
  source 1..109: mol_type = other RNA

SEQ ID NO: 552 - RNA, 109 nt, synthetic construct; identical to SEQ ID NO: 537
  modified_base 79: mod_base = OTHER; note = thymine
  modified_base 84: mod_base = OTHER; note = thymine
  modified_base 86: mod_base = OTHER; note = thymine
  modified_base 94: mod_base = OTHER; note = thymine
  modified_base 97: mod_base = OTHER; note = thymine
  modified_base 104: mod_base = OTHER; note = thymine
  misc_feature 1..109: note = Synthetic
  source 1..109: mol_type = other RNA

SEQ ID NO: 553 - RNA, 109 nt, synthetic construct; identical to SEQ ID NO: 537
  modified_base 79: mod_base = OTHER; note = thymine
  modified_base 84: mod_base = OTHER; note = thymine
  modified_base 86: mod_base = OTHER; note = thymine
  modified_base 94: mod_base = OTHER; note = thymine
  modified_base 97: mod_base = OTHER; note = thymine
  modified_base 104: mod_base = OTHER; note = thymine
  misc_feature 1..109: note = Synthetic
  source 1..109: mol_type = other RNA

SEQ ID NO: 554 - RNA, 109 nt, synthetic construct; identical to SEQ ID NO: 537
  modified_base 79: mod_base = OTHER; note = thymine
  modified_base 84: mod_base = OTHER; note = thymine
  modified_base 86: mod_base = OTHER; note = thymine
  modified_base 94: mod_base = OTHER; note = thymine
  modified_base 97: mod_base = OTHER; note = thymine
  misc_feature 1..109: note = Synthetic
  source 1..109: mol_type = other RNA

SEQ ID NO: 555 - RNA, 109 nt, synthetic construct
  modified_base 79: mod_base = OTHER; note = thymine
  modified_base 84: mod_base = OTHER; note = thymine
  modified_base 86: mod_base = OTHER; note = thymine
  modified_base 94: mod_base = OTHER; note = thymine
  modified_base 97: mod_base = OTHER; note = thymine
  modified_base 104: mod_base = OTHER; note = thymine
  misc_feature 1..109: note = Synthetic
  source 1..109: mol_type = other RNA
gatgtctgcaggccagatgagttttagagcgcaagttaaaataaggctagtccgttatcacgggcaccgagtcggtgctgccatctggagcagtgatctggcttgcagt

SEQ ID NO: 556 - RNA, 109 nt, synthetic construct; identical to SEQ ID NO: 537
  modified_base 79: mod_base = OTHER; note = thymine
  modified_base 84: mod_base = OTHER; note = thymine
  modified_base 86: mod_base = OTHER; note = thymine
  modified_base 94: mod_base = OTHER; note = thymine
  modified_base 97: mod_base = OTHER; note = thymine
  misc_feature 1..109: note = Synthetic
  source 1..109: mol_type = other RNA

SEQ ID NO: 557 - RNA, 109 nt, synthetic construct; identical to SEQ ID NO: 537
  modified_base 79: mod_base = OTHER; note = thymine
  modified_base 84: mod_base = OTHER; note = thymine
  modified_base 86: mod_base = OTHER; note = thymine
  modified_base 94: mod_base = OTHER; note = thymine
  modified_base 97: mod_base = OTHER; note = thymine
  modified_base 104: mod_base = OTHER; note = thymine
  misc_feature 1..109: note = Synthetic
  source 1..109: mol_type = other RNA

SEQ ID NO: 558 - RNA, 109 nt, synthetic construct; identical to SEQ ID NO: 537
  modified_base 79: mod_base = OTHER; note = thymine
  modified_base 84: mod_base = OTHER; note = thymine
  modified_base 86: mod_base = OTHER; note = thymine
  modified_base 94: mod_base = OTHER; note = thymine
  modified_base 97: mod_base = OTHER; note = thymine
  misc_feature 1..109: note = Synthetic
  source 1..109: mol_type = other RNA

SEQ ID NO: 559 - RNA, 109 nt, synthetic construct; identical to SEQ ID NO: 537
  modified_base 79: mod_base = OTHER; note = thymine
  modified_base 84: mod_base = OTHER; note = thymine
  modified_base 86: mod_base = OTHER; note = thymine
  modified_base 94: mod_base = OTHER; note = thymine
  modified_base 97: mod_base = OTHER; note = thymine
  misc_feature 1..109: note = Synthetic
  source 1..109: mol_type = other RNA

SEQ ID NO: 560 - RNA, 109 nt, synthetic construct; identical to SEQ ID NO: 537
  modified_base 79: mod_base = OTHER; note = thymine
  modified_base 84: mod_base = OTHER; note = thymine
  modified_base 86: mod_base = OTHER; note = thymine
  modified_base 94: mod_base = OTHER; note = thymine
  modified_base 97: mod_base = OTHER; note = thymine
  misc_feature 1..109: note = Synthetic
  source 1..109: mol_type = other RNA

SEQ ID NO: 561 - RNA, 109 nt, synthetic construct; identical to SEQ ID NO: 537
  modified_base 79: mod_base = OTHER; note = thymine
  modified_base 84: mod_base = OTHER; note = thymine
  modified_base 86: mod_base = OTHER; note = thymine
  modified_base 94: mod_base = OTHER; note = thymine
  modified_base 97: mod_base = OTHER; note = thymine
  modified_base 104: mod_base = OTHER; note = thymine
  misc_feature 1..109: note = Synthetic
  source 1..109: mol_type = other RNA

SEQ ID NO: 562 - RNA, 109 nt, synthetic construct; identical to SEQ ID NO: 537
  modified_base 79: mod_base = OTHER; note = thymine
  modified_base 84: mod_base = OTHER; note = thymine
  modified_base 86: mod_base = OTHER; note = thymine
  modified_base 94: mod_base = OTHER; note = thymine
  modified_base 97: mod_base = OTHER; note = thymine
  misc_feature 1..109: note = Synthetic
  source 1..109: mol_type = other RNA

SEQ ID NO: 563 - RNA, 109 nt, synthetic construct; identical to SEQ ID NO: 537
  modified_base 79: mod_base = OTHER; note = thymine
  modified_base 84: mod_base = OTHER; note = thymine
  modified_base 86: mod_base = OTHER; note = thymine
  modified_base 94: mod_base = OTHER; note = thymine
  modified_base 97: mod_base = OTHER; note = thymine
  modified_base 99: mod_base = OTHER; note = thymine
  modified_base 104: mod_base = OTHER; note = thymine
  misc_feature 1..109: note = Synthetic
  source 1..109: mol_type = other RNA

SEQ ID NO: 564 - RNA, 109 nt, synthetic construct; identical to SEQ ID NO: 537
  modified_base 79: mod_base = OTHER; note = thymine
  modified_base 84: mod_base = OTHER; note = thymine
  modified_base 86: mod_base = OTHER; note = thymine
  modified_base 94: mod_base = OTHER; note = thymine
  modified_base 97: mod_base = OTHER; note = thymine
  modified_base 99: mod_base = OTHER; note = thymine
  modified_base 104: mod_base = OTHER; note = thymine
  misc_feature 1..109: note = Synthetic
  source 1..109: mol_type = other RNA

SEQ ID NO: 565 - RNA, 109 nt, synthetic construct; identical to SEQ ID NO: 537
  modified_base 79: mod_base = OTHER; note = thymine
  modified_base 84: mod_base = OTHER; note = thymine
  modified_base 86: mod_base = OTHER; note = thymine
  modified_base 94: mod_base = OTHER; note = thymine
  modified_base 97: mod_base = OTHER; note = thymine
  modified_base 99: mod_base = OTHER; note = thymine
  misc_feature 1..109: note = Synthetic
  source 1..109: mol_type = other RNA

SEQ ID NO: 566 - RNA, 109 nt, synthetic construct; identical to SEQ ID NO: 555
  modified_base 79: mod_base = OTHER; note = thymine
  modified_base 84: mod_base = OTHER; note = thymine
  modified_base 86: mod_base = OTHER; note = thymine
  modified_base 94: mod_base = OTHER; note = thymine
  modified_base 97: mod_base = OTHER; note = thymine
  modified_base 99: mod_base = OTHER; note = thymine
  modified_base 104: mod_base = OTHER; note = thymine
  misc_feature 1..109: note = Synthetic
  source 1..109: mol_type = other RNA

SEQ ID NO: 567 - RNA, 109 nt, synthetic construct; identical to SEQ ID NO: 537
  modified_base 79: mod_base = OTHER; note = thymine
  modified_base 84: mod_base = OTHER; note = thymine
  modified_base 86: mod_base = OTHER; note = thymine
  modified_base 94: mod_base = OTHER; note = thymine
  modified_base 97: mod_base = OTHER; note = thymine
  modified_base 99: mod_base = OTHER; note = thymine
  misc_feature 1..109: note = Synthetic
  source 1..109: mol_type = other RNA

SEQ ID NO: 568 - RNA, 109 nt, synthetic construct; identical to SEQ ID NO: 537
  modified_base 79: mod_base = OTHER; note = thymine
  modified_base 84: mod_base = OTHER; note = thymine
  modified_base 86: mod_base = OTHER; note = thymine
  modified_base 94: mod_base = OTHER; note = thymine
  modified_base 97: mod_base = OTHER; note = thymine
  modified_base 99: mod_base = OTHER; note = thymine
  modified_base 104: mod_base = OTHER; note = thymine
  misc_feature 1..109: note = Synthetic
  source 1..109: mol_type = other RNA

SEQ ID NO: 569 - RNA, 109 nt, synthetic construct; identical to SEQ ID NO: 537
  modified_base 79: mod_base = OTHER; note = thymine
  modified_base 84: mod_base = OTHER; note = thymine
  modified_base 86: mod_base = OTHER; note = thymine
  modified_base 94: mod_base = OTHER; note = thymine
  modified_base 97: mod_base = OTHER; note = thymine
  modified_base 99: mod_base = OTHER; note = thymine
  misc_feature 1..109: note = Synthetic
  source 1..109: mol_type = other RNA

SEQ ID NO: 570 - RNA, 109 nt, synthetic construct; identical to SEQ ID NO: 537
  modified_base 79: mod_base = OTHER; note = thymine
  modified_base 84: mod_base = OTHER; note = thymine
  modified_base 86: mod_base = OTHER; note = thymine
  modified_base 94: mod_base = OTHER; note = thymine
  modified_base 97: mod_base = OTHER; note = thymine
  modified_base 99: mod_base = OTHER; note = thymine
  misc_feature 1..109: note = Synthetic
  source 1..109: mol_type = other RNA

SEQ ID NO: 571 - RNA, 109 nt, synthetic construct; identical to SEQ ID NO: 537
  modified_base 79: mod_base = OTHER; note = thymine
  modified_base 84: mod_base = OTHER; note = thymine
  modified_base 86: mod_base = OTHER; note = thymine
  modified_base 94: mod_base = OTHER; note = thymine
  modified_base 97: mod_base = OTHER; note = thymine
  modified_base 99: mod_base = OTHER; note = thymine
  misc_feature 1..109: note = Synthetic
  source 1..109: mol_type = other RNA

SEQ ID NO: 572 - RNA, 109 nt, synthetic construct; identical to SEQ ID NO: 537
  modified_base 79: mod_base = OTHER; note = thymine
  modified_base 84: mod_base = OTHER; note = thymine
  modified_base 86: mod_base = OTHER; note = thymine
  modified_base 94: mod_base = OTHER; note = thymine
  modified_base 97: mod_base = OTHER; note = thymine
  modified_base 99: mod_base = OTHER; note = thymine
  modified_base 104: mod_base = OTHER; note = thymine
  misc_feature 1..109: note = Synthetic
  source 1..109: mol_type = other RNA

SEQ ID NO: 573 - RNA, 109 nt, synthetic construct; identical to SEQ ID NO: 537
  modified_base 79: mod_base = OTHER; note = thymine
  modified_base 84: mod_base = OTHER; note = thymine
  modified_base 86: mod_base = OTHER; note = thymine
  modified_base 94: mod_base = OTHER; note = thymine
  modified_base 97: mod_base = OTHER; note = thymine
  modified_base 99: mod_base = OTHER; note = thymine
  misc_feature 1..109: note = Synthetic
  source 1..109: mol_type = other RNA

SEQ ID NO: 574 - RNA, 109 nt, synthetic construct; identical to SEQ ID NO: 537
  modified_base 79: mod_base = OTHER; note = thymine
  modified_base 84: mod_base = OTHER; note = thymine
  modified_base 86: mod_base = OTHER; note = thymine
  modified_base 94: mod_base = OTHER; note = thymine
  modified_base 97: mod_base = OTHER; note = thymine
  modified_base 99: mod_base = OTHER; note = thymine
  modified_base 104: mod_base = OTHER; note = thymine
  modified_base 109: mod_base = OTHER; note = thymine
  misc_feature 1..109: note = Synthetic
  source 1..109: mol_type = other RNA

SEQ ID NO: 575 - RNA, 109 nt, synthetic construct; identical to SEQ ID NO: 537
  modified_base 79: mod_base = OTHER; note = thymine
  modified_base 84: mod_base = OTHER; note = thymine
  modified_base 86: mod_base = OTHER; note = thymine
  modified_base 94: mod_base = OTHER; note = thymine
  modified_base 97: mod_base = OTHER; note = thymine
  modified_base 99: mod_base = OTHER; note = thymine
  modified_base 104: mod_base = OTHER; note = thymine
  misc_feature 1..109: note = Synthetic
  source 1..109: mol_type = other RNA

SEQ ID NO: 576 - RNA, 109 nt, synthetic construct; identical to SEQ ID NO: 537
  modified_base 5: mod_base = OTHER; note = thymine
  modified_base 18: mod_base = OTHER; note = thymine
  modified_base 79: mod_base = OTHER; note = thymine
  modified_base 84: mod_base = OTHER; note = thymine
  modified_base 86: mod_base = OTHER; note = thymine
  modified_base 94: mod_base = OTHER; note = thymine
  modified_base 97: mod_base = OTHER; note = thymine
  modified_base 99: mod_base = OTHER; note = thymine
  modified_base 104: mod_base = OTHER; note = thymine
  misc_feature 1..109: note = Synthetic
  source 1..109: mol_type = other RNA

SEQ ID NO: 577 - RNA, 109 nt, synthetic construct; identical to SEQ ID NO: 537
  modified_base 18: mod_base = OTHER; note = thymine
  modified_base 79: mod_base = OTHER; note = thymine
  modified_base 84: mod_base = OTHER; note = thymine
  modified_base 86: mod_base = OTHER; note = thymine
  modified_base 94: mod_base = OTHER; note = thymine
  modified_base 97: mod_base = OTHER; note = thymine
  modified_base 99: mod_base = OTHER; note = thymine
  modified_base 104: mod_base = OTHER; note = thymine
  misc_feature 1..109: note = Synthetic
  source 1..109: mol_type = other RNA

SEQ ID NO: 578 - RNA, 109 nt, synthetic construct; identical to SEQ ID NO: 537
  modified_base 5: mod_base = OTHER; note = thymine
  modified_base 18: mod_base = OTHER; note = thymine
  modified_base 79: mod_base = OTHER; note = thymine
  modified_base 84: mod_base = OTHER; note = thymine
  modified_base 86: mod_base = OTHER; note = thymine
  modified_base 94: mod_base = OTHER; note = thymine
  modified_base 97: mod_base = OTHER; note = thymine
  modified_base 99: mod_base = OTHER; note = thymine
  modified_base 104: mod_base = OTHER; note = thymine
  misc_feature 1..109: note = Synthetic
  source 1..109: mol_type = other RNA

SEQ ID NO: 579 - RNA, 109 nt, synthetic construct; identical to SEQ ID NO: 537
  modified_base 18: mod_base = OTHER; note = thymine
  modified_base 79: mod_base = OTHER; note = thymine
  modified_base 84: mod_base = OTHER; note = thymine
  modified_base 86: mod_base = OTHER; note = thymine
  modified_base 94: mod_base = OTHER; note = thymine
  modified_base 97: mod_base = OTHER; note = thymine
  modified_base 99: mod_base = OTHER; note = thymine
  modified_base 104: mod_base = OTHER; note = thymine
  misc_feature 1..109: note = Synthetic
  source 1..109: mol_type = other RNA

SEQ ID NO: 580 - RNA, 109 nt, synthetic construct; identical to SEQ ID NO: 537
  modified_base 18: mod_base = OTHER; note = thymine
  modified_base 79: mod_base = OTHER; note = thymine
  modified_base 84: mod_base = OTHER; note = thymine
  modified_base 86: mod_base = OTHER; note = thymine
  modified_base 94: mod_base = OTHER; note = thymine
  modified_base 97: mod_base = OTHER; note = thymine
  modified_base 99: mod_base = OTHER; note = thymine
  modified_base 104: mod_base = OTHER; note = thymine
  misc_feature 1..109: note = Synthetic
  source 1..109: mol_type = other RNA

SEQ ID NO: 581 - RNA, 109 nt, synthetic construct; identical to SEQ ID NO: 537
  modified_base 79: mod_base = OTHER; note = thymine
  modified_base 84: mod_base = OTHER; note = thymine
  modified_base 86: mod_base = OTHER; note = thymine
  modified_base 94: mod_base = OTHER; note = thymine
  modified_base 97: mod_base = OTHER; note = thymine
  modified_base 99: mod_base = OTHER; note = thymine
  modified_base 104: mod_base = OTHER; note = thymine
  misc_feature 1..109: note = Synthetic
  source 1..109: mol_type = other RNA

SEQ ID NO: 582 - RNA, 109 nt, synthetic construct; identical to SEQ ID NO: 537
  modified_base 79: mod_base = OTHER; note = thymine
  modified_base 84: mod_base = OTHER; note = thymine
  modified_base 86: mod_base = OTHER; note = thymine
  modified_base 94: mod_base = OTHER; note = thymine
  modified_base 97: mod_base = OTHER; note = thymine
  modified_base 99: mod_base = OTHER; note = thymine
  modified_base 104: mod_base = OTHER; note = thymine
  misc_feature 1..109: note = Synthetic
  source 1..109: mol_type = other RNA

SEQ ID NO: 583 - RNA, 109 nt, synthetic construct; identical to SEQ ID NO: 537
  modified_base 79: mod_base = OTHER; note = thymine
  modified_base 84: mod_base = OTHER; note = thymine
  modified_base 86: mod_base = OTHER; note = thymine
  modified_base 94: mod_base = OTHER; note = thymine
  modified_base 97: mod_base = OTHER; note = thymine
  modified_base 99: mod_base = OTHER; note = thymine
  modified_base 104: mod_base = OTHER; note = thymine
  misc_feature 1..109: note = Synthetic
  source 1..109: mol_type = other RNA

SEQ ID NO: 584 - RNA, 109 nt, synthetic construct; identical to SEQ ID NO: 537
  modified_base 79: mod_base = OTHER; note = thymine
  modified_base 84: mod_base = OTHER; note = thymine
  modified_base 86: mod_base = OTHER; note = thymine
  modified_base 94: mod_base = OTHER; note = thymine
  modified_base 97: mod_base = OTHER; note = thymine
  modified_base 99: mod_base = OTHER; note = thymine
  modified_base 104: mod_base = OTHER; note = thymine
  misc_feature 1..109: note = Synthetic
  source 1..109: mol_type = other RNA

SEQ ID NO: 585 - RNA, 109 nt, synthetic construct; identical to SEQ ID NO: 537
  modified_base 79: mod_base = OTHER; note = thymine
  modified_base 84: mod_base = OTHER; note = thymine
  modified_base 86: mod_base = OTHER; note = thymine
  modified_base 94: mod_base = OTHER; note = thymine
  modified_base 97: mod_base = OTHER; note = thymine
  modified_base 99: mod_base = OTHER; note = thymine
  modified_base 104: mod_base = OTHER; note = thymine
  misc_feature 1..109: note = Synthetic
  source 1..109: mol_type = other RNA

SEQ ID NO: 586 - RNA, 104 nt, synthetic construct
  modified_base 81: mod_base = OTHER; note = thymine
  modified_base 89: mod_base = OTHER; note = thymine
  modified_base 92: mod_base = OTHER; note = thymine
  misc_feature 1..104: note = Synthetic
  source 1..104: mol_type = other RNA
aagtgacttccagtaagattgttttagagcgcaagttaaaataaggctagtccgttatcacgggcaccgagtcggtgcaatagacacgtaatcttactggaagt

SEQ ID NO: 587 - RNA, 105 nt, synthetic construct; identical to SEQ ID NO: 426
  modified_base 82: mod_base = OTHER; note = thymine
  modified_base 90: mod_base = OTHER; note = thymine
  modified_base 93: mod_base = OTHER; note = thymine
  misc_feature 1..105: note = Synthetic
  source 1..105: mol_type = other RNA

SEQ ID NO: 588 - RNA, 106 nt, synthetic construct
  modified_base 83: mod_base = OTHER; note = thymine
  modified_base 91: mod_base = OTHER; note = thymine
  modified_base 94: mod_base = OTHER; note = thymine
  misc_feature 1..106: note = Synthetic
  source 1..106: mol_type = other RNA
aagtgacttccagtaagattgttttagagcgcaagttaaaataaggctagtccgttatcacgggcaccgagtcggtgcgaaatagacacgtaatcttactggaagt

SEQ ID NO: 589 - RNA, 107 nt, synthetic construct
  modified_base 84: mod_base = OTHER; note = thymine
  modified_base 92: mod_base = OTHER; note = thymine
  modified_base 95: mod_base = OTHER; note = thymine
  misc_feature 1..107: note = Synthetic
  source 1..107: mol_type = other RNA
aagtgacttccagtaagattgttttagagcgcaagttaaaataaggctagtccgttatcacgggcaccgagtcggtgcggaaatagacacgtaatcttactggaagt

SEQ ID NO: 590 - RNA, 108 nt, synthetic construct
  modified_base 79: mod_base = OTHER; note = thymine
  modified_base 85: mod_base = OTHER; note = thymine
  modified_base 93: mod_base = OTHER; note = thymine
  modified_base 96: mod_base = OTHER; note = thymine
  misc_feature 1..108: note = Synthetic
  source 1..108: mol_type = other RNA
aagtgacttccagtaagattgttttagagcgcaagttaaaataaggctagtccgttatcacgggcaccgagtcggtgctggaaatagacacgtaatcttactggaagt

SEQ ID NO: 591 - RNA, 109 nt, synthetic construct
  modified_base 80: mod_base = OTHER; note = thymine
  modified_base 86: mod_base = OTHER; note = thymine
  modified_base 94: mod_base = OTHER; note = thymine
  modified_base 97: mod_base = OTHER; note = thymine
  misc_feature 1..109: note = Synthetic
  source 1..109: mol_type = other RNA
aagtgacttccagtaagattgttttagagcgcaagttaaaataaggctagtccgttatcacgggcaccgagtcggtgcgtggaaatagacacgtaatcttactggaagt

SEQ ID NO: 592 - RNA, 110 nt, synthetic construct
  modified_base 81: mod_base = OTHER; note = thymine
  modified_base 87: mod_base = OTHER; note = thymine
  modified_base 95: mod_base = OTHER; note = thymine
  modified_base 98: mod_base = OTHER; note = thymine
  misc_feature 1..110: note = Synthetic
  source 1..110: mol_type = other RNA
aagtgacttccagtaagattgttttagagcgcaagttaaaataaggctagtccgttatcacgggcaccgagtcggtgcagtggaaatagacacgtaatcttactggaagt

SEQ ID NO: 593 - RNA, 108 nt, synthetic construct
  modified_base 83: mod_base = OTHER; note = thymine
  modified_base 91: mod_base = OTHER; note = thymine
  modified_base 94: mod_base = OTHER; note = thymine
  misc_feature 1..108: note = Synthetic
  source 1..108: mol_type = other RNA
aagtgacttccagtaagattgttttagagcgcaagttaaaataaggctagtccgttatcacgggcaccgagtcggtgcgaaatagacacgtaatcttactggaagttt

SEQ ID NO: 594 - RNA, 108 nt, synthetic construct; identical to SEQ ID NO: 593
  modified_base 83: mod_base = OTHER; note = thymine
  modified_base 91: mod_base = OTHER; note = thymine
  modified_base 94: mod_base = OTHER; note = thymine
  misc_feature 1..108: note = Synthetic
  source 1..108: mol_type = other RNA

SEQ ID NO: 595 - RNA, 108 nt, synthetic construct; identical to SEQ ID NO: 593
  modified_base 83: mod_base = OTHER; note = thymine
  modified_base 91: mod_base = OTHER; note = thymine
  modified_base 94: mod_base = OTHER; note = thymine
  misc_feature 1..108: note = Synthetic
  source 1..108: mol_type = other RNA

SEQ ID NO: 596 - RNA, 100 nt, synthetic construct
  misc_feature 1..100: note = Synthetic
  source 1..100: mol_type = other RNA
acacaaataccagtccagcggttttagagctagaaatagcaagttaaaataaggctagtccgttatcaacttgaaaaagtggcaccgagtcggtgctttt

SEQ ID NO: 597 - RNA, 117 nt, synthetic construct
  modified_base 94: mod_base = OTHER; note = thymine
  modified_base 102: mod_base = OTHER; note = thymine
  modified_base 105: mod_base = OTHER; note = thymine
  misc_feature 1..117: note = Synthetic
  source 1..117: mol_type = other RNA
aagtgacttccagtaagattgttttagagctagaaatagcaagttaaaataaggctagtccgttatcacgaaagggcaccgagtcggtgcaaatagacacgtaatcttactggaagt

SEQ ID NO: 598 - RNA, 179 nt, synthetic construct
  modified_base 112: mod_base = OTHER; note = thymine
  modified_base 114: mod_base = OTHER; note = thymine
  modified_base 119: mod_base = OTHER; note = thymine
  modified_base 121: mod_base = OTHER; note = thymine
  modified_base 129: mod_base = OTHER; note = thymine
  modified_base 133: mod_base = OTHER; note = thymine
  modified_base 136: mod_base = OTHER; note = thymine
  modified_base 139: mod_base = OTHER; note = thymine
  modified_base 157: mod_base = OTHER; note = thymine
  modified_base 160: mod_base = OTHER; note = thymine
  modified_base 170: mod_base = OTHER; note = thymine
  misc_feature 1..179: note = Synthetic
  source 1..179: mol_type = other RNA
gatgtctgcaggccagatgagttttagagctagaaatagcaagttaaaataaggctagtccgttatcacgaaagggcaccgagtcggtgccacagtgtgtccctctgacaatgtgccatctggagccctcaatgatcctgacgacggagaccgccgtcgtcgacaagcctctggcctgc

SEQ ID NO: 599 - RNA, 91 nt, synthetic construct
  misc_feature 1..91: note = Synthetic
  source 1..91: mol_type = other RNA
gctgcatgggctcacaactggttttagagctagaaatagcaagttaaaataaggctagtccgttatcacgaaagggcaccgagtcggtgct

SEQ ID NO: 600 - RNA, 110 nt, synthetic construct; identical to SEQ ID NO: 417
  modified_base 83: mod_base = OTHER; note = thymine
  modified_base 88: mod_base = OTHER; note = thymine
  modified_base 90: mod_base = OTHER; note = thymine
  modified_base 98: mod_base = OTHER; note = thymine
  modified_base 101: mod_base = OTHER; note = thymine
  misc_feature 1..110: note = Synthetic
  source 1..110: mol_type = other RNA

SEQ ID NO: 601 - RNA, 23 nt, synthetic construct
  misc_feature 1..23: note = Synthetic
  source 1..23: mol_type = other RNA
gcacatgaggatcacccatgtgc

SEQ ID NO: 602 - RNA, 48 nt, synthetic construct
  modified_base 24..26: mod_base = OTHER; note = thymine
  modified_base 29: mod_base = OTHER; note = thymine
  modified_base 31: mod_base = OTHER; note = thymine
  modified_base 36: mod_base = OTHER; note = thymine
  misc_feature 1..48: note = Synthetic
  source 1..48: mol_type = other RNA
gcacatgaggatcacccatgtgctttcctctgccatcacgtgctcagt

SEQ ID NO: 603 - RNA, 48 nt, synthetic construct
  modified_base 24..26: mod_base = OTHER; note = thymine
  modified_base 29: mod_base = OTHER; note = thymine
  modified_base 31: mod_base = OTHER; note = thymine
  modified_base 36: mod_base = OTHER; note = thymine
  modified_base 38: mod_base = OTHER; note = thymine
  misc_feature 1..48: note = Synthetic
  source 1..48: mol_type = other RNA
gcacatgaggatcacccatgtgctttcctctgccatctcgtgctcagt

SEQ ID NO: 604 - RNA, 48 nt, synthetic construct
  modified_base 24..26: mod_base = OTHER; note = thymine
  modified_base 29: mod_base = OTHER; note = thymine
  modified_base 31: mod_base = OTHER; note = thymine
  modified_base 36: mod_base = OTHER; note = thymine
  misc_feature 1..48: note = Synthetic
  source 1..48: mol_type = other RNA
gcacatgaggatcacccatgtgctttcctctgccatcgcgtgctcagt

SEQ ID NO: 605 - RNA, 48 nt, synthetic construct
  modified_base 24..26: mod_base = OTHER; note = thymine
  modified_base 29: mod_base = OTHER; note = thymine
  modified_base 31: mod_base = OTHER; note = thymine
  modified_base 36: mod_base = OTHER; note = thymine
  misc_feature 1..48: note = Synthetic
  source 1..48: mol_type = other RNA
gcacatgaggatcacccatgtgctttcctctgccatcccgtgctcagt

SEQ ID NO: 606 - RNA, 48 nt, synthetic construct
  modified_base 24..26: mod_base = OTHER; note = thymine
  modified_base 29: mod_base = OTHER; note = thymine
  modified_base 31: mod_base = OTHER; note = thymine
  modified_base 36..37: mod_base = OTHER; note = thymine
  misc_feature 1..48: note = Synthetic
  source 1..48: mol_type = other RNA
gcacatgaggatcacccatgtgctttcctctgccattacgtgctcagt

SEQ ID NO: 607 - RNA, 48 nt, synthetic construct
  modified_base 24..26: mod_base = OTHER; note = thymine
  modified_base 29: mod_base = OTHER; note = thymine
  modified_base 31: mod_base = OTHER; note = thymine
  modified_base 36: mod_base = OTHER; note = thymine
  misc_feature 1..48: note = Synthetic
  source 1..48: mol_type = other RNA
gcacatgaggatcacccatgtgctttcctctgccatgacgtgctcagt

SEQ ID NO: 608 - RNA, 48 nt, synthetic construct
  modified_base 24..26: mod_base = OTHER; note = thymine
  modified_base 29: mod_base = OTHER; note = thymine
  modified_base 31: mod_base = OTHER; note = thymine
  modified_base 36: mod_base = OTHER; note = thymine
  misc_feature 1..48: note = Synthetic
  source 1..48: mol_type = other RNA
gcacatgaggatcacccatgtgctttcctctgccataacgtgctcagt

SEQ ID NO: 609 - RNA, 48 nt, synthetic construct
  modified_base 24..26: mod_base = OTHER; note = thymine
  modified_base 29: mod_base = OTHER; note = thymine
  modified_base 31: mod_base = OTHER; note = thymine
  misc_feature 1..48: note = Synthetic
  source 1..48: mol_type = other RNA
gcacatgaggatcacccatgtgctttcctctgccagcacgtgctcagt

SEQ ID NO: 610 - RNA, 48 nt, synthetic construct
  modified_base 24..26: mod_base = OTHER; note = thymine
  modified_base 29: mod_base = OTHER; note = thymine
  modified_base 31: mod_base = OTHER; note = thymine
  misc_feature 1..48: note = Synthetic
  source 1..48: mol_type = other RNA
gcacatgaggatcacccatgtgctttcctctgccaccacgtgctcagt

SEQ ID NO: 611 - RNA, 48 nt, synthetic construct
  modified_base 24..26: mod_base = OTHER; note = thymine
  modified_base 29: mod_base = OTHER; note = thymine
  modified_base 31: mod_base = OTHER; note = thymine
  modified_base 35..36: mod_base = OTHER; note = thymine
  misc_feature 1..48: note = Synthetic
  source 1..48: mol_type = other RNA
gcacatgaggatcacccatgtgctttcctctgccttcacgtgctcagt

SEQ ID NO: 612 - RNA, 48 nt, synthetic construct
  modified_base 24..26: mod_base = OTHER; note = thymine
  modified_base 29: mod_base = OTHER; note = thymine
  modified_base 31: mod_base = OTHER; note = thymine
  modified_base 36: mod_base = OTHER; note = thymine
  misc_feature 1..48: note = Synthetic
  source 1..48: mol_type = other RNA
gcacatgaggatcacccatgtgctttcctctgccgtcacgtgctcagt

SEQ ID NO: 613 - RNA, 48 nt, synthetic construct
  modified_base 24..26: mod_base = OTHER; note = thymine
  modified_base 29: mod_base = OTHER; note = thymine
  modified_base 31: mod_base = OTHER; note = thymine
  modified_base 36: mod_base = OTHER; note = thymine
  misc_feature 1..48: note = Synthetic
  source 1..48: mol_type = other RNA
gcacatgaggatcacccatgtgctttcctctgccctcacgtgctcagt

SEQ ID NO: 614 - RNA, 48 nt, synthetic construct
  modified_base 24..26: mod_base = OTHER; note = thymine
  modified_base 29: mod_base = OTHER; note = thymine
  modified_base 31: mod_base = OTHER; note = thymine
  modified_base 36: mod_base = OTHER; note = thymine
  misc_feature 1..48: note = Synthetic
  source 1..48: mol_type = other RNA
gcacatgaggatcacccatgtgctttcctctgcgatcacgtgctcagt

SEQ ID NO: 615 - RNA, 48 nt, synthetic construct
  modified_base 24..26: mod_base = OTHER; note = thymine
  modified_base 29: mod_base = OTHER; note = thymine
  modified_base 31: mod_base = OTHER; note = thymine
  modified_base 34: mod_base = OTHER; note = thymine
  modified_base 36: mod_base = OTHER; note = thymine
  misc_feature 1..48: note = Synthetic
  source 1..48: mol_type = other RNA
gcacatgaggatcacccatgtgctttcctctgctatcacgtgctcagt

SEQ ID NO: 616 - RNA, 48 nt, synthetic construct
  modified_base 24..26: mod_base = OTHER; note = thymine
  modified_base 29: mod_base = OTHER; note = thymine
  modified_base 31: mod_base = OTHER; note = thymine
  modified_base 36: mod_base = OTHER; note = thymine
  misc_feature 1..48: note = Synthetic
  source 1..48: mol_type = other RNA
gcacatgaggatcacccatgtgctttcctctgcaatcacgtgctcagt

SEQ ID NO: 617 - RNA, 48 nt, synthetic construct; identical to SEQ ID NO: 614
  misc_feature 1..48: note = Synthetic
  source 1..48: mol_type = other RNA

SEQ ID NO: 618 - RNA, 25 nt, synthetic construct
  modified_base 1..3: mod_base = OTHER; note = thymine
  modified_base 6: mod_base = OTHER; note = thymine
  modified_base 8: mod_base = OTHER; note = thymine
  modified_base 13: mod_base = OTHER; note = thymine
  misc_feature 1..25: note = Synthetic
  source 1..25: mol_type = other RNA
tttcctctgcgatcacgtgctcagt

SEQ ID NO: 619 - RNA, 48 nt, synthetic construct
  modified_base 24..26: mod_base = OTHER; note = thymine
  modified_base 29: mod_base = OTHER; note = thymine
  modified_base 31: mod_base = OTHER; note = thymine
  modified_base 36: mod_base = OTHER; note = thymine
  misc_feature 1..48: note = Synthetic
  source 1..48: mol_type = other RNA
gcacatgaggatcacccatgtgctttcctctggcatcacgtgctcagt

SEQ ID NO: 620 - RNA, 48 nt, synthetic construct
  modified_base 24..26: mod_base = OTHER; note = thymine
  modified_base 29: mod_base = OTHER; note = thymine
  modified_base 31..32: mod_base = OTHER; note = thymine
  modified_base 36: mod_base = OTHER; note = thymine
  misc_feature 1..48: note = Synthetic
  source 1..48: mol_type = other RNA
gcacatgaggatcacccatgtgctttcctcttccatcacgtgctcagt

SEQ ID NO: 621 - RNA, 48 nt, synthetic construct
  modified_base 24..26: mod_base = OTHER; note = thymine
  modified_base 29: mod_base = OTHER; note = thymine
  modified_base 31: mod_base = OTHER; note = thymine
  modified_base 36: mod_base = OTHER; note = thymine
  misc_feature 1..48: note = Synthetic
  source 1..48: mol_type = other RNA
gcacatgaggatcacccatgtgctttcctctcccatcacgtgctcagt

SEQ ID NO: 622 - RNA, 48 nt, synthetic construct
  modified_base 24..26: mod_base = OTHER; note = thymine
  modified_base 29: mod_base = OTHER; note = thymine
  modified_base 31: mod_base = OTHER; note = thymine
  modified_base 36: mod_base = OTHER; note = thymine
  misc_feature 1..48: note = Synthetic
  source 1..48: mol_type = other RNA
gcacatgaggatcacccatgtgctttcctctaccatcacgtgctcagt

SEQ ID NO: 623 - RNA, 48 nt, synthetic construct
  modified_base 24..26: mod_base = OTHER; note = thymine
  modified_base 29: mod_base = OTHER; note = thymine
  modified_base 36: mod_base = OTHER; note = thymine
  misc_feature 1..48: note = Synthetic
  source 1..48: mol_type = other RNA
gcacatgaggatcacccatgtgctttcctcggccatcacgtgctcagt

SEQ ID NO: 624 - RNA, 48 nt, synthetic construct
  modified_base 24..26: mod_base = OTHER; note = thymine
  modified_base 29: mod_base = OTHER; note = thymine
  modified_base 36: mod_base = OTHER; note = thymine
  misc_feature 1..48: note = Synthetic
  source 1..48: mol_type = other RNA
gcacatgaggatcacccatgtgctttcctccgccatcacgtgctcagt

SEQ ID NO: 625 - RNA, 48 nt, synthetic construct
  modified_base 24..26: mod_base = OTHER; note = thymine
  modified_base 29: mod_base = OTHER; note = thymine
  modified_base 36: mod_base = OTHER; note = thymine
  misc_feature 1..48: note = Synthetic
  source 1..48: mol_type = other RNA
gcacatgaggatcacccatgtgctttcctcagccatcacgtgctcagt

SEQ ID NO: 626 - RNA, 48 nt, synthetic construct
  modified_base 24..26: mod_base = OTHER; note = thymine
  modified_base 29..31: mod_base = OTHER; note = thymine
  modified_base 36: mod_base = OTHER; note = thymine
  misc_feature 1..48: note = Synthetic
  source 1..48: mol_type = other RNA
gcacatgaggatcacccatgtgctttcctttgccatcacgtgctcagt

SEQ ID NO: 627 - RNA, 48 nt, synthetic construct
  modified_base 24..26: mod_base = OTHER; note = thymine
  modified_base 29: mod_base = OTHER; note = thymine
  modified_base 31: mod_base = OTHER; note = thymine
  modified_base 36: mod_base = OTHER; note = thymine
  misc_feature 1..48: note = Synthetic
  source 1..48: mol_type = other RNA
gcacatgaggatcacccatgtgctttcctatgccatcacgtgctcagt

SEQ ID NO: 628 - RNA, 48 nt, synthetic construct
  modified_base 24..26: mod_base = OTHER; note = thymine
  modified_base 31: mod_base = OTHER; note = thymine
  modified_base 36: mod_base = OTHER; note = thymine
  misc_feature 1..48: note = Synthetic
  source 1..48: mol_type = other RNA
gcacatgaggatcacccatgtgctttccgctgccatcacgtgctcagt

SEQ ID NO: 629 - RNA, 48 nt, synthetic construct
  modified_base 24..26: mod_base = OTHER; note = thymine
  modified_base 31: mod_base = OTHER; note = thymine
  modified_base 36: mod_base = OTHER; note = thymine
  misc_feature 1..48: note = Synthetic
  source 1..48: mol_type = other RNA
gcacatgaggatcacccatgtgctttcccctgccatcacgtgctcagt

SEQ ID NO: 630 - RNA, 48 nt, synthetic construct
  modified_base 24..26: mod_base = OTHER; note = thymine
  modified_base 31: mod_base = OTHER; note = thymine
  modified_base 36: mod_base = OTHER; note = thymine
  misc_feature 1..48: note = Synthetic
  source 1..48: mol_type = other RNA
gcacatgaggatcacccatgtgctttccactgccatcacgtgctcagt

SEQ ID NO: 631 - RNA, 48 nt, synthetic construct
  modified_base 24..26: mod_base = OTHER; note = thymine
  modified_base 28..29: mod_base = OTHER; note = thymine
  modified_base 31: mod_base = OTHER; note = thymine
  modified_base 36: mod_base = OTHER; note = thymine
  misc_feature 1..48: note = Synthetic
  source 1..48: mol_type = other RNA
gcacatgaggatcacccatgtgctttcttctgccatcacgtgctcagt

SEQ ID NO: 632 - RNA, 48 nt, synthetic construct
  modified_base 24..26: mod_base = OTHER; note = thymine
  modified_base 29: mod_base = OTHER; note = thymine
  modified_base 31: mod_base = OTHER; note = thymine
  modified_base 36: mod_base = OTHER; note = thymine
  misc_feature 1..48: note = Synthetic
  source 1..48: mol_type = other RNA
gcacatgaggatcacccatgtgctttcgtctgccatcacgtgctcagt

SEQ ID NO: 633 - RNA, 48 nt, synthetic construct
  modified_base 24..26: mod_base = OTHER; note = thymine
  modified_base 29: mod_base = OTHER; note = thymine
  modified_base 31: mod_base = OTHER; note = thymine
  modified_base 36: mod_base = OTHER; note = thymine
  misc_feature 1..48: note = Synthetic
  source 1..48: mol_type = other RNA
gcacatgaggatcacccatgtgctttcatctgccatcacgtgctcagt

SEQ ID NO: 634 - RNA, 48 nt, synthetic construct
  modified_base 24..27: mod_base = OTHER; note = thymine
  modified_base 29: mod_base = OTHER; note = thymine
  modified_base 31: mod_base = OTHER; note = thymine
  modified_base 36: mod_base = OTHER; note = thymine
  misc_feature 1..48: note = Synthetic
  source 1..48: mol_type = other RNA
gcacatgaggatcacccatgtgcttttctctgccatcacgtgctcagt

SEQ ID NO: 635 - RNA, 48 nt, synthetic construct
  modified_base 24..26: mod_base = OTHER; note = thymine
  modified_base 29: mod_base = OTHER; note = thymine
  modified_base 31: mod_base = OTHER; note = thymine
  modified_base 36: mod_base = OTHER; note = thymine
  misc_feature 1..48: note = Synthetic
  source 1..48: mol_type = other RNA
gcacatgaggatcacccatgtgctttgctctgccatcacgtgctcagt

SEQ ID NO: 636 - RNA, 48 nt, synthetic construct
  modified_base 24..26: mod_base = OTHER; note = thymine
  modified_base 29: mod_base = OTHER; note = thymine
  modified_base 31: mod_base = OTHER; note = thymine
  modified_base 36: mod_base = OTHER; note = thymine
  misc_feature 1..48: note = Synthetic
  source 1..48: mol_type = other RNA
gcacatgaggatcacccatgtgctttactctgccatcacgtgctcagt

SEQ ID NO: 637 - RNA, 48 nt, synthetic construct
  modified_base 24..25: mod_base = OTHER; note = thymine
  modified_base 29: mod_base = OTHER; note = thymine
  modified_base 31: mod_base = OTHER; note = thymine
  modified_base 36: mod_base = OTHER; note = thymine
  misc_feature 1..48: note = Synthetic
  source 1..48: mol_type = other RNA
gcacatgaggatcacccatgtgcttgcctctgccatcacgtgctcagt

SEQ ID NO: 638 - RNA, 48 nt, synthetic construct
  modified_base 24..25: mod_base = OTHER; note = thymine
  modified_base 29: mod_base = OTHER; note = thymine
  modified_base 31: mod_base = OTHER; note = thymine
  modified_base 36: mod_base = OTHER; note = thymine
  misc_feature 1..48: note = Synthetic
  source 1..48: mol_type = other RNA
gcacatgaggatcacccatgtgcttccctctgccatcacgtgctcagt

SEQ ID NO: 639 - RNA, 48 nt, synthetic construct
  modified_base 24..25: mod_base = OTHER; note = thymine
  modified_base 29: mod_base = OTHER; note = thymine
  modified_base 31: mod_base = OTHER; note = thymine
  modified_base 36: mod_base = OTHER; note = thymine
  misc_feature 1..48: note = Synthetic
  source 1..48: mol_type = other RNA
gcacatgaggatcacccatgtgcttacctctgccatcacgtgctcagt

SEQ ID NO: 640 - RNA, 48 nt, synthetic construct
  modified_base 24: mod_base = OTHER; note = thymine
  modified_base 26: mod_base = OTHER; note = thymine
  modified_base 29: mod_base = OTHER; note = thymine
  modified_base 31: mod_base = OTHER; note = thymine
  modified_base 36: mod_base = OTHER; note = thymine
  misc_feature 1..48: note = Synthetic
  source 1..48: mol_type = other RNA
gcacatgaggatcacccatgtgctgtcctctgccatcacgtgctcagt

SEQ ID NO: 641 - RNA, 48 nt, synthetic construct
  modified_base 24: mod_base = OTHER; note = thymine
  modified_base 26: mod_base = OTHER; note = thymine
  modified_base 29: mod_base = OTHER; note = thymine
  modified_base 31: mod_base = OTHER; note = thymine
  modified_base 36: mod_base = OTHER; note = thymine
  misc_feature 1..48: note = Synthetic
  source 1..48: mol_type = other RNA
gcacatgaggatcacccatgtgctctcctctgccatcacgtgctcagt

SEQ ID NO: 642 - RNA, 48 nt, synthetic construct
  modified_base 24: mod_base = OTHER; note = thymine
  modified_base 26: mod_base = OTHER; note = thymine
  modified_base 29: mod_base = OTHER; note = thymine
  modified_base 31: mod_base = OTHER; note = thymine
  modified_base 36: mod_base = OTHER; note = thymine
  misc_feature 1..48: note = Synthetic
  source 1..48: mol_type = other RNA
gcacatgaggatcacccatgtgctatcctctgccatcacgtgctcagt

SEQ ID NO: 643 - RNA, 48 nt, synthetic construct
  modified_base 25..26: mod_base = OTHER; note = thymine
  modified_base 29: mod_base = OTHER; note = thymine
  modified_base 31: mod_base = OTHER; note = thymine
  modified_base 36: mod_base = OTHER; note = thymine
  misc_feature 1..48: note = Synthetic
  source 1..48: mol_type = other RNA
gcacatgaggatcacccatgtgcgttcctctgccatcacgtgctcagt

SEQ ID NO: 644 - RNA, 48 nt, synthetic construct
  modified_base 25..26: mod_base = OTHER; note = thymine
  modified_base 29: mod_base = OTHER; note = thymine
  modified_base 31: mod_base = OTHER; note = thymine
  modified_base 36: mod_base = OTHER; note = thymine
  misc_feature 1..48: note = Synthetic
  source 1..48: mol_type = other RNA
gcacatgaggatcacccatgtgccttcctctgccatcacgtgctcagt

SEQ ID NO: 645 - RNA, 48 nt, synthetic construct
  modified_base 25..26: mod_base = OTHER; note = thymine
  modified_base 29: mod_base = OTHER; note = thymine
  modified_base 31: mod_base = OTHER; note = thymine
  modified_base 36: mod_base = OTHER; note = thymine
  misc_feature 1..48: note = Synthetic
  source 1..48: mol_type = other RNA
gcacatgaggatcacccatgtgcattcctctgccatcacgtgctcagt

SEQ ID NO: 646 - RNA, 48 nt, synthetic construct
  modified_base 25..27: mod_base = OTHER; note = thymine
  modified_base 30: mod_base = OTHER; note = thymine
  modified_base 32: mod_base = OTHER; note = thymine
  modified_base 36: mod_base = OTHER; note = thymine
  misc_feature 1..48: note = Synthetic
  source 1..48: mol_type = other RNA
gcacatgaggatcacccatgtgcctttcctctgcatcacgtgctcagt

SEQ ID NO: 647 - RNA, 53 nt, synthetic construct
  modified_base 26..27: mod_base = OTHER; note = thymine
  modified_base 30..32: mod_base = OTHER; note = thymine
  modified_base 35: mod_base = OTHER; note = thymine
  modified_base 37: mod_base = OTHER; note = thymine
  modified_base 41: mod_base = OTHER; note = thymine
  misc_feature 1..53: note = Synthetic
  source 1..53: mol_type = other RNA
gcacatgaggatcacccatgtgcgcttcctttcctctgcatcacgtgctcagt

SEQ ID NO: 648 - RNA, 63 nt, synthetic construct
  modified_base 36..37: mod_base = OTHER; note = thymine
  modified_base 40..42: mod_base = OTHER; note = thymine
  modified_base 45: mod_base = OTHER; note = thymine
  modified_base 47: mod_base = OTHER; note = thymine
  modified_base 51: mod_base = OTHER; note = thymine
  misc_feature 1..63: note = Synthetic
  source 1..63: mol_type = other RNA
gcacatgaggatcacccatgtgcaggaagcagggcttcctttcctctgcatcacgtgctcagt

SEQ ID NO: 649 - RNA, 83 nt, synthetic construct
  modified_base 24: mod_base = OTHER; note = thymine
  modified_base 26: mod_base = OTHER; note = thymine
  modified_base 29: mod_base = OTHER; note = thymine
  modified_base 39: mod_base = OTHER; note = thymine
  modified_base 41: mod_base = OTHER; note = thymine
  modified_base 56..57: mod_base = OTHER; note = thymine
  modified_base 60..62: mod_base = OTHER; note = thymine
  modified_base 65: mod_base = OTHER; note = thymine
  modified_base 67: mod_base = OTHER; note = thymine
  modified_base 71: mod_base = OTHER; note = thymine
  misc_feature 1..83: note = Synthetic
  source 1..83: mol_type = other RNA
gcacatgaggatcacccatgtgctgtcctgcgacgccctctggaggaagcagggcttcctttcctctgcatcacgtgctcagt

SEQ ID NO: 650 - RNA, 48 nt, synthetic construct
  modified_base 25..26: mod_base = OTHER; note = thymine
  modified_base 29..31: mod_base = OTHER; note = thymine
  modified_base 34: mod_base = OTHER; note = thymine
  modified_base 36: mod_base = OTHER; note = thymine
  misc_feature 1..48: note = Synthetic
  source 1..48: mol_type = other RNA
gcacatgaggatcacccatgtgccttcctttcctatcacgtgctcagt

SEQ ID NO: 651 - RNA, 53 nt, synthetic construct
  modified_base 30..31: mod_base = OTHER; note = thymine
  modified_base 34..36: mod_base = OTHER; note = thymine
  modified_base 39: mod_base = OTHER; note = thymine
  modified_base 41: mod_base = OTHER; note = thymine
  misc_feature 1..53: note = Synthetic
  source 1..53: mol_type = other RNA
gcacatgaggatcacccatgtgccagggcttcctttcctatcacgtgctcagt

SEQ ID NO: 652 - RNA, 63 nt, synthetic construct
  modified_base 25: mod_base = OTHER; note = thymine
  modified_base 40..41: mod_base = OTHER; note = thymine
  modified_base 44..46: mod_base = OTHER; note = thymine
  modified_base 49: mod_base = OTHER; note = thymine
  modified_base 51: mod_base = OTHER; note = thymine
  misc_feature 1..63: note = Synthetic
  source 1..63: mol_type = other RNA
gcacatgaggatcacccatgtgcctggaggaagcagggcttcctttcctatcacgtgctcagt

SEQ ID NO: 653 - RNA, 83 nt, synthetic construct
  modified_base 28: mod_base = OTHER; note = thymine
  modified_base 30: mod_base = OTHER; note = thymine
  modified_base 33: mod_base = OTHER; note = thymine
  modified_base 43: mod_base = OTHER; note = thymine
  modified_base 45: mod_base = OTHER; note = thymine
  modified_base 60..61: mod_base = OTHER; note = thymine
  modified_base 64..66: mod_base = OTHER; note = thymine
  modified_base 69: mod_base = OTHER; note = thymine
  modified_base 71: mod_base = OTHER; note = thymine
  misc_feature 1..83: note = Synthetic
  source 1..83: mol_type = other RNA
gcacatgaggatcacccatgtgcaagctgtcctgcgacgccctctggaggaagcagggcttcctttcctatcacgtgctcagt

SEQ ID NO: 654 - RNA, 48 nt, synthetic construct
  modified_base 30..31: mod_base = OTHER; note = thymine
  modified_base 34: mod_base = OTHER; note = thymine
  modified_base 36: mod_base = OTHER; note = thymine
  misc_feature 1..48: note = Synthetic
  source 1..48: mol_type = other RNA
gcacatgaggatcacccatgtgccagggcttcctatcacgtgctcagt

SEQ ID NO: 655 - RNA, 53 nt, synthetic construct
  modified_base 35..36: mod_base = OTHER; note = thymine
  modified_base 39: mod_base = OTHER; note = thymine
  modified_base 41: mod_base = OTHER; note = thymine
  misc_feature 1..53: note = Synthetic
  source 1..53: mol_type = other RNA
gcacatgaggatcacccatgtgcggaagcagggcttcctatcacgtgctcagt

SEQ ID NO: 656 - RNA, 63 nt, synthetic construct
  modified_base 28: mod_base = OTHER; note = thymine
  modified_base 30: mod_base = OTHER; note = thymine
  modified_base 45..46: mod_base = OTHER; note = thymine
  modified_base 49: mod_base = OTHER; note = thymine
  modified_base 51: mod_base = OTHER; note = thymine
  misc_feature 1..63: note = Synthetic
  source 1..63: mol_type = other RNA
gcacatgaggatcacccatgtgcgccctctggaggaagcagggcttcctatcacgtgctcagt

SEQ ID NO: 657 - RNA, 83 nt, synthetic construct
  modified_base 33: mod_base = OTHER; note = thymine
  modified_base 35: mod_base = OTHER; note = thymine
  modified_base 38: mod_base = OTHER; note = thymine
  modified_base 48: mod_base = OTHER; note = thymine
  modified_base 50: mod_base = OTHER; note = thymine
  modified_base 65..66: mod_base = OTHER; note = thymine
  modified_base 69: mod_base = OTHER; note = thymine
  modified_base 71: mod_base = OTHER; note = thymine
  misc_feature 1..83: note = Synthetic
  source 1..83: mol_type = other RNA
gcacatgaggatcacccatgtgcaggaaaagctgtcctgcgacgccctctggaggaagcagggcttcctatcacgtgctcagt

SEQ ID NO: 658 - RNA, 48 nt, synthetic construct
  modified_base 28: mod_base = OTHER; note = thymine
  modified_base 30: mod_base = OTHER; note = thymine
  modified_base 36: mod_base = OTHER; note = thymine
  misc_feature 1..48: note = Synthetic
  source 1..48: mol_type = other RNA
gcacatgaggatcacccatgtgcgccctctggagatcacgtgctcagt

SEQ ID NO: 659 - RNA, 53 nt, synthetic construct
  modified_base 33: mod_base = OTHER; note = thymine
  modified_base 35: mod_base = OTHER; note = thymine
  modified_base 41: mod_base = OTHER; note = thymine
  misc_feature 1..53: note = Synthetic
  source 1..53: mol_type = other RNA
gcacatgaggatcacccatgtgcgcgacgccctctggagatcacgtgctcagt

SEQ ID NO: 660 - RNA, 63 nt, synthetic construct
  modified_base 28: mod_base = OTHER; note = thymine
  modified_base 30: mod_base = OTHER; note = thymine
  modified_base 33: mod_base = OTHER; note = thymine
  modified_base 43: mod_base = OTHER; note = thymine
  modified_base 45: mod_base = OTHER; note = thymine
  modified_base 51: mod_base = OTHER; note = thymine
  misc_feature 1..63: note = Synthetic
  source 1..63: mol_type = other RNA
gcacatgaggatcacccatgtgcaagctgtcctgcgacgccctctggagatcacgtgctcagt

SEQ ID NO: 661 - RNA, 83 nt, synthetic construct
  modified_base 24: mod_base = OTHER; note = thymine
  modified_base 27: mod_base = OTHER; note = thymine
  modified_base 34: mod_base = OTHER; note = thymine
  modified_base 36: mod_base = OTHER; note = thymine
  modified_base 38: mod_base = OTHER; note = thymine
  modified_base 48: mod_base = OTHER; note = thymine
  modified_base 50: mod_base = OTHER; note = thymine
  modified_base 53: mod_base = OTHER; note = thymine
  modified_base 63: mod_base = OTHER; note = thymine
  modified_base 65: mod_base = OTHER; note = thymine
  modified_base 71: mod_base = OTHER; note = thymine
  misc_feature 1..83: note = Synthetic
  source 1..83: mol_type = other RNA
gcacatgaggatcacccatgtgctactagcccctgtctaggaaaagctgtcctgcgacgccctctggagatcacgtgctcagt

SEQ ID NO: 662 - RNA, 48 nt, synthetic construct
  modified_base 24: mod_base = OTHER; note = thymine
  modified_base 26: mod_base = OTHER; note = thymine
  modified_base 28: mod_base = OTHER; note = thymine
  modified_base 36: mod_base = OTHER; note = thymine
  misc_feature 1..48: note = Synthetic
  source 1..48: mol_type = other RNA
gcacatgaggatcacccatgtgctgtctaggaaaatcacgtgctcagt

SEQ ID NO: 663 - RNA, 53 nt, synthetic construct
  modified_base 29: mod_base = OTHER; note = thymine
  modified_base 31: mod_base = OTHER; note = thymine
  modified_base 33: mod_base = OTHER; note = thymine
  modified_base 41: mod_base = OTHER; note = thymine
  misc_feature 1..53: note = Synthetic
  source 1..53: mol_type = other RNA
gcacatgaggatcacccatgtgcgcccctgtctaggaaaatcacgtgctcagt

SEQ ID NO: 664 - RNA, 63 nt, synthetic construct
  modified_base 29: mod_base = OTHER; note = thymine
  modified_base 32: mod_base = OTHER; note = thymine
  modified_base 39: mod_base = OTHER; note = thymine
  modified_base 41: mod_base = OTHER; note = thymine
  modified_base 43: mod_base = OTHER; note = thymine
  modified_base 51: mod_base = OTHER; note = thymine
  misc_feature 1..63: note = Synthetic
  source 1..63: mol_type = other RNA
gcacatgaggatcacccatgtgcgcacatactagcccctgtctaggaaaatcacgtgctcagt

SEQ ID NO: 665 - RNA, 83 nt, synthetic construct
  modified_base 26: mod_base = OTHER; note = thymine
  modified_base 28: mod_base = OTHER; note = thymine
  modified_base 34: mod_base = OTHER; note = thymine
  modified_base 43: mod_base = OTHER; note = thymine
  modified_base 49: mod_base = OTHER; note = thymine
  modified_base 52: mod_base = OTHER; note = thymine
  modified_base 59: mod_base = OTHER; note = thymine
  modified_base 61: mod_base = OTHER; note = thymine
  modified_base 63: mod_base = OTHER; note = thymine
  modified_base 71: mod_base = OTHER; note = thymine
  misc_feature 1..83: note = Synthetic
  source 1..83: mol_type = other RNA
gcacatgaggatcacccatgtgcagtatcccggtgcaggagctgcacatactagcccctgtctaggaaaatcacgtgctcagt

SEQ ID NO: 666 - RNA, 48 nt, synthetic construct
  modified_base 24..25: mod_base = OTHER; note = thymine
  modified_base 28: mod_base = OTHER; note = thymine
  modified_base 30: mod_base = OTHER; note = thymine
  modified_base 34: mod_base = OTHER; note = thymine
  modified_base 36: mod_base = OTHER; note = thymine
  misc_feature 1..48: note = Synthetic
  source 1..48: mol_type = other RNA
gcacatgaggatcacccatgtgcttcctctgcctatcacgtgctcagt

SEQ ID NO: 667 - RNA, 53 nt, synthetic construct
  modified_base 25..26: mod_base = OTHER; note = thymine
  modified_base 29..30: mod_base = OTHER; note = thymine
  modified_base 33: mod_base = OTHER; note = thymine
  modified_base 35: mod_base = OTHER; note = thymine
  modified_base 39: mod_base = OTHER; note = thymine
  modified_base 41: mod_base = OTHER; note = thymine
  misc_feature 1..53: note = Synthetic
  source 1..53: mol_type = other RNA
gcacatgaggatcacccatgtgccttccttcctctgcctatcacgtgctcagt

SEQ ID NO: 668 - RNA, 63 nt, synthetic construct
  modified_base 35..36: mod_base = OTHER; note = thymine
  modified_base 39..40: mod_base = OTHER; note = thymine
  modified_base 43: mod_base = OTHER; note = thymine
  modified_base 45: mod_base = OTHER; note = thymine
  modified_base 49: mod_base = OTHER; note = thymine
  modified_base 51: mod_base = OTHER; note = thymine
  misc_feature 1..63: note = Synthetic
  source 1..63: mol_type = other RNA
gcacatgaggatcacccatgtgcggaagcagggcttccttcctctgcctatcacgtgctcagt

SEQ ID NO: 669 - RNA, 83 nt, synthetic construct
  modified_base 25: mod_base = OTHER; note = thymine
  modified_base 28: mod_base = OTHER; note = thymine
  modified_base 38: mod_base = OTHER; note = thymine
  modified_base 40: mod_base = OTHER; note = thymine
  modified_base 55..56: mod_base = OTHER; note = thymine
  modified_base 59..60: mod_base = OTHER; note = thymine
  modified_base 63: mod_base = OTHER; note = thymine
  modified_base 65: mod_base = OTHER; note = thymine
  modified_base 69: mod_base = OTHER; note = thymine
  modified_base 71: mod_base = OTHER; note = thymine
  misc_feature 1..83: note = Synthetic
  source 1..83: mol_type = other RNA
gcacatgaggatcacccatgtgcgtcctgcgacgccctctggaggaagcagggcttccttcctctgcctatcacgtgctcagt

SEQ ID NO: 670 - RNA, 50 nt, synthetic construct
  modified_base 24..25: mod_base = OTHER; note = thymine
  modified_base 28: mod_base = OTHER; note = thymine
  modified_base 30: mod_base = OTHER; note = thymine
  modified_base 34..35: mod_base = OTHER; note = thymine
  modified_base 38: mod_base = OTHER; note = thymine
  misc_feature 1..50: note = Synthetic
  source 1..50: mol_type = other RNA
gcacatgaggatcacccatgtgcttcctctgccttaatcacgtgctcagt

SEQ ID NO: 671 - RNA, 55 nt, synthetic construct
  modified_base 25..26: mod_base = OTHER; note = thymine
  modified_base 29..30: mod_base = OTHER; note = thymine
  modified_base 33: mod_base = OTHER; note = thymine
  modified_base 35: mod_base = OTHER; note = thymine
  modified_base 39..40: mod_base = OTHER; note = thymine
  modified_base 43: mod_base = OTHER; note = thymine
  misc_feature 1..55: note = Synthetic
  source 1..55: mol_type = other RNA
gcacatgaggatcacccatgtgccttccttcctctgccttaatcacgtgctcagt

SEQ ID NO: 672 - RNA, 65 nt, synthetic construct
  modified_base 35..36: mod_base = OTHER; note = thymine
  modified_base 39..40: mod_base = OTHER; note = thymine
  modified_base 43: mod_base = OTHER; note = thymine
  modified_base 45: mod_base = OTHER; note = thymine
  modified_base 49..50: mod_base = OTHER; note = thymine
  modified_base 53: mod_base = OTHER; note = thymine
  misc_feature 1..65: note = Synthetic
  source 1..65: mol_type = other RNA
gcacatgaggatcacccatgtgcggaagcagggcttccttcctctgccttaatcacgtgctcagt

SEQ ID NO: 673 - RNA, 85 nt, synthetic construct
  modified_base 25: mod_base = OTHER; note = thymine
  modified_base 28: mod_base = OTHER; note = thymine
  modified_base 38: mod_base = OTHER; note = thymine
  modified_base 40: mod_base = OTHER; note = thymine
  modified_base 55..56: mod_base = OTHER; note = thymine
  modified_base 59..60: mod_base = OTHER; note = thymine
  modified_base 63: mod_base = OTHER; note = thymine
  modified_base 65: mod_base = OTHER; note = thymine
  modified_base 69..70: mod_base = OTHER; note = thymine
  modified_base 73: mod_base = OTHER; note = thymine
  misc_feature 1..85: note = Synthetic
  source 1..85: mol_type = other RNA
gcacatgaggatcacccatgtgcgtcctgcgacgccctctggaggaagcagggcttccttcctctgccttaatcacgtgctcagt

SEQ ID NO: 674 - RNA, 56 nt, synthetic construct
  modified_base 24..25: mod_base = OTHER; note = thymine
  modified_base 28: mod_base = OTHER; note = thymine
  modified_base 30: mod_base = OTHER; note = thymine
  modified_base 44: mod_base = OTHER; note = thymine
  misc_feature 1..56: note = Synthetic
  source 1..56: mol_type = other RNA
gcacatgaggatcacccatgtgcttcctctgccggagaaccaatcacgtgctcagt

SEQ ID NO: 675 - RNA, 61 nt, synthetic construct
  modified_base 25..26: mod_base = OTHER; note = thymine
  modified_base 29..30: mod_base = OTHER; note = thymine
  modified_base 33: mod_base = OTHER; note = thymine
  modified_base 35: mod_base = OTHER; note = thymine
  modified_base 49: mod_base = OTHER; note = thymine
  misc_feature 1..61: note = Synthetic
  source 1..61: mol_type = other RNA
gcacatgaggatcacccatgtgccttccttcctctgccggagaaccaatcacgtgctcagt

SEQ ID NO: 676 - RNA, 71 nt, synthetic construct
  modified_base 35..36: mod_base = OTHER; note = thymine
  modified_base 39..40: mod_base = OTHER; note = thymine
  modified_base 43: mod_base = OTHER; note = thymine
  modified_base 45: mod_base = OTHER; note = thymine
  modified_base 59: mod_base = OTHER; note = thymine
  misc_feature 1..71: note = Synthetic
  source 1..71: mol_type = other RNA
gcacatgaggatcacccatgtgcggaagcagggcttccttcctctgccggagaaccaatcacgtgctcagt

SEQ ID NO: 677 - RNA, 91 nt, synthetic construct
  modified_base 25: mod_base = OTHER; note = thymine
  modified_base 28: mod_base = OTHER; note = thymine
  modified_base 38: mod_base = OTHER; note = thymine
  modified_base 40: mod_base = OTHER; note = thymine
  modified_base 55..56: mod_base = OTHER; note = thymine
  modified_base 59..60: mod_base = OTHER; note = thymine
  modified_base 63: mod_base = OTHER; note = thymine
  modified_base 65: mod_base = OTHER; note = thymine
  modified_base 79: mod_base = OTHER; note = thymine
  misc_feature 1..91: note = Synthetic
  source 1..91: mol_type = other RNA
gcacatgaggatcacccatgtgcgtcctgcgacgccctctggaggaagcagggcttccttcctctgccggagaaccaatcacgtgctcagt

SEQ ID NO: 678 - RNA, 68 nt, synthetic construct
  modified_base 24..25: mod_base = OTHER; note = thymine
  modified_base 28: mod_base = OTHER; note = thymine
  modified_base 30: mod_base = OTHER; note = thymine
  modified_base 43: mod_base = OTHER; note = thymine
  modified_base 47..48: mod_base = OTHER; note = thymine
  modified_base 56: mod_base = OTHER; note = thymine
  misc_feature 1..68: note = Synthetic
  source 1..68: mol_type = other RNA
gcacatgaggatcacccatgtgcttcctctgccccaagagagtgcattagcgagatcacgtgctcagt

SEQ ID NO: 679 - RNA, 73 nt, synthetic construct
  modified_base 25..26: mod_base = OTHER; note = thymine
  modified_base 29..30: mod_base = OTHER; note = thymine
  modified_base 33: mod_base = OTHER; note = thymine
  modified_base 35: mod_base = OTHER; note = thymine
  modified_base 48: mod_base = OTHER; note = thymine
  modified_base 52..53: mod_base = OTHER; note = thymine
  modified_base 61: mod_base = OTHER; note = thymine
  misc_feature 1..73: note = Synthetic
  source 1..73: mol_type = other RNA
gcacatgaggatcacccatgtgccttccttcctctgccccaagagagtgcattagcgagatcacgtgctcagt

SEQ ID NO: 680 - RNA, 83 nt, synthetic construct
  modified_base 35..36: mod_base = OTHER; note = thymine
  modified_base 39..40: mod_base = OTHER; note = thymine
  modified_base 43: mod_base = OTHER; note = thymine
  modified_base 45: mod_base = OTHER; note = thymine
  modified_base 58: mod_base = OTHER; note = thymine
  modified_base 62..63: mod_base = OTHER; note = thymine
  modified_base 71: mod_base = OTHER; note = thymine
  misc_feature 1..83: note = Synthetic
  source 1..83: mol_type = other RNA
gcacatgaggatcacccatgtgcggaagcagggcttccttcctctgccccaagagagtgcattagcgagatcacgtgctcagt

SEQ ID NO: 681 - RNA, 103 nt, synthetic construct
  modified_base 25: mod_base = OTHER; note = thymine
  modified_base 28: mod_base = OTHER; note = thymine
  modified_base 38: mod_base = OTHER; note = thymine
  modified_base 40: mod_base = OTHER; note = thymine
  modified_base 55..56: mod_base = OTHER; note = thymine
  modified_base 59..60: mod_base = OTHER; note = thymine
  modified_base 63: mod_base = OTHER; note = thymine
  modified_base 65: mod_base = OTHER; note = thymine
  modified_base 78: mod_base = OTHER; note = thymine
  modified_base 82..83: mod_base = OTHER; note = thymine
  modified_base 91: mod_base = OTHER; note = thymine
  misc_feature 1..103: note = Synthetic
  source 1..103: mol_type = other RNA
gcacatgaggatcacccatgtgcgtcctgcgacgccctctggaggaagcagggcttccttcctctgccccaagagagtgcattagcgagatcacgtgctcagt

SEQ ID NO: 682 - RNA, 86 nt, synthetic construct
  modified_base 24..25: mod_base = OTHER; note = thymine
  modified_base 28: mod_base = OTHER; note = thymine
  modified_base 30: mod_base = OTHER; note = thymine
  modified_base 34: mod_base = OTHER; note = thymine
  modified_base 40: mod_base = OTHER; note = thymine
  modified_base 42: mod_base = OTHER; note = thymine
  modified_base 44: mod_base = OTHER; note = thymine
  modified_base 54: mod_base = OTHER; note = thymine
  modified_base 62: mod_base = OTHER; note = thymine
  modified_base 65: mod_base = OTHER; note = thymine
  modified_base 68: mod_base = OTHER; note = thymine
  modified_base 74: mod_base = OTHER; note = thymine
  misc_feature 1..86: note = Synthetic
  source 1..86: mol_type = other RNA
gcacatgaggatcacccatgtgcttcctctgcctcgaagtatatcagcacacatgaaaagataatgatcacgatcacgtgctcagt

SEQ ID NO: 683 - RNA, 91 nt, synthetic construct
  modified_base 25..26: mod_base = OTHER; note = thymine
  modified_base 29..30: mod_base = OTHER; note = thymine
  modified_base 33: mod_base = OTHER; note = thymine
  modified_base 35: mod_base = OTHER; note = thymine
  modified_base 39: mod_base = OTHER; note = thymine
  modified_base 45: mod_base = OTHER; note = thymine
  modified_base 47: mod_base = OTHER; note = thymine
  modified_base 49: mod_base = OTHER; note = thymine
  modified_base 59: mod_base = OTHER; note = thymine
  modified_base 67: mod_base = OTHER; note = thymine
  modified_base 70: mod_base = OTHER; note = thymine
  modified_base 73: mod_base = OTHER; note = thymine
  modified_base 79: mod_base = OTHER; note = thymine
  misc_feature 1..91: note = Synthetic
  source 1..91: mol_type = other RNA
gcacatgaggatcacccatgtgccttccttcctctgcctcgaagtatatcagcacacatgaaaagataatgatcacgatcacgtgctcagt

SEQ ID NO: 684 - RNA, 101 nt, synthetic construct
  modified_base 35..36: mod_base = OTHER; note = thymine
  modified_base 39..40: mod_base = OTHER; note = thymine
  modified_base 43: mod_base = OTHER; note = thymine
  modified_base 45: mod_base = OTHER; note = thymine
  modified_base 49: mod_base = OTHER; note = thymine
  modified_base 55: mod_base = OTHER; note = thymine
  modified_base 57: mod_base = OTHER; note = thymine
  modified_base 59: mod_base = OTHER; note = thymine
  modified_base 69: mod_base = OTHER; note = thymine
  modified_base 77: mod_base = OTHER; note = thymine
  modified_base 80: mod_base = OTHER; note = thymine
  modified_base 83: mod_base = OTHER; note = thymine
  modified_base 89: mod_base = OTHER; note = thymine
  misc_feature 1..101: note = Synthetic
  source 1..101: mol_type = other RNA
gcacatgaggatcacccatgtgcggaagcagggcttccttcctctgcctcgaagtatatcagcacacatgaaaagataatgatcacgatcacgtgctcagt

SEQ ID NO: 685 - RNA, 110 nt, synthetic construct
  modified_base 27: mod_base = OTHER; note = thymine
  modified_base 29: mod_base = OTHER; note = thymine
  modified_base 44..45: mod_base = OTHER; note = thymine
  modified_base 48..49: mod_base = OTHER; note = thymine
  modified_base 52: mod_base = OTHER; note = thymine
  modified_base 54: mod_base = OTHER; note = thymine
  modified_base 58: mod_base = OTHER; note = thymine
  modified_base 64: mod_base = OTHER; note = thymine
  modified_base 66: mod_base = OTHER; note = thymine
  modified_base 68: mod_base = OTHER; note = thymine
  modified_base 78: mod_base = OTHER; note = thymine
  modified_base 86: mod_base = OTHER; note = thymine
  modified_base 89: mod_base = OTHER; note = thymine
  modified_base 92: mod_base = OTHER; note = thymine
  modified_base 98: mod_base = OTHER; note = thymine
  misc_feature 1..110: note = Synthetic
  source 1..110: mol_type = other RNA
gcacatgaggatcacccatgtgcccctctggaggaagcagggcttccttcctctgcctcgaagtatatcagcacacatgaaaagataatgatcacgatcacgtgctcagt

SEQ ID NO: 686 - RNA, 58 nt, synthetic construct; identical to SEQ ID NO: 483
  modified_base 24: mod_base = OTHER; note = thymine
  modified_base 29: mod_base = OTHER; note = thymine
  modified_base 31: mod_base = OTHER; note = thymine
  modified_base 39: mod_base = OTHER; note = thymine
  modified_base 42: mod_base = OTHER; note = thymine
  misc_feature 1..58: note = Synthetic
  source 1..58: mol_type = other RNA

SEQ ID NO: 687 - RNA, 58 nt, synthetic construct; identical to SEQ ID NO: 483
  misc_feature 1..58: note = Synthetic
  source 1..58: mol_type = other RNA

SEQ ID NO: 688 - RNA, 52 nt, synthetic construct
  modified_base 24: mod_base = OTHER; note = thymine
  modified_base 29: mod_base = OTHER; note = thymine
  modified_base 31: mod_base = OTHER; note = thymine
  modified_base 39: mod_base = OTHER; note = thymine
  modified_base 42: mod_base = OTHER; note = thymine
  misc_feature 1..52: note = Synthetic
  source 1..52: mol_type = other RNA
gcacatgaggatcacccatgtgctgccatctggagcagtgatctggcctgca

SEQ ID NO: 689 - RNA, 58 nt, synthetic construct; identical to SEQ ID NO: 483
  modified_base 24: mod_base = OTHER; note = thymine
  modified_base 29: mod_base = OTHER; note = thymine
  modified_base 31: mod_base = OTHER; note = thymine
  misc_feature 1..58: note = Synthetic
  source 1..58: mol_type = other RNA

SEQ ID NO: 690 - RNA, 58 nt, synthetic construct; identical to SEQ ID NO: 483
  modified_base 24: mod_base = OTHER; note = thymine
  modified_base 29: mod_base = OTHER; note = thymine
  modified_base 31: mod_base = OTHER; note = thymine
  modified_base 39: mod_base = OTHER; note = thymine
  misc_feature 1..58: note = Synthetic
  source 1..58: mol_type = other RNA

SEQ ID NO: 691 - RNA, 58 nt, synthetic construct; identical to SEQ ID NO: 483
  modified_base 24: mod_base = OTHER; note = thymine
  modified_base 29: mod_base = OTHER; note = thymine
  modified_base 31: mod_base = OTHER; note = thymine
  modified_base 39: mod_base = OTHER; note = thymine
  misc_feature 1..58: note = Synthetic
  source 1..58: mol_type = other RNA

SEQ ID NO: 692 - RNA, 58 nt, synthetic construct; identical to SEQ ID NO: 483
  modified_base 24: mod_base = OTHER; note = thymine
  modified_base 29: mod_base = OTHER; note = thymine
  modified_base 31: mod_base = OTHER; note = thymine
  modified_base 39: mod_base = OTHER; note = thymine
  misc_feature 1..58: note = Synthetic
  source 1..58: mol_type = other RNA

SEQ ID NO: 693 - RNA, 58 nt, synthetic construct; identical to SEQ ID NO: 483
  modified_base 24: mod_base = OTHER; note = thymine
  modified_base 29: mod_base = OTHER; note = thymine
  modified_base 31: mod_base = OTHER; note = thymine
  modified_base 39: mod_base = OTHER; note = thymine
  modified_base 42: mod_base = OTHER; note = thymine
  misc_feature 1..58: note = Synthetic
  source 1..58: mol_type = other RNA

SEQ ID NO: 694 - RNA, 58 nt, synthetic construct; identical to SEQ ID NO: 483
  modified_base 24: mod_base = OTHER; note = thymine
  modified_base 29: mod_base = OTHER; note = thymine
  modified_base 31: mod_base = OTHER; note = thymine
  modified_base 39: mod_base = OTHER; note = thymine
  modified_base 42: mod_base = OTHER; note = thymine
  misc_feature 1..58: note = Synthetic
  source 1..58: mol_type = other RNA

SEQ ID NO: 695 - RNA, 58 nt, synthetic construct; identical to SEQ ID NO: 483
  modified_base 24: mod_base = OTHER; note = thymine
  modified_base 29: mod_base = OTHER; note = thymine
  modified_base 31: mod_base = OTHER; note = thymine
  modified_base 39: mod_base = OTHER; note = thymine
  modified_base 42: mod_base = OTHER; note = thymine
  modified_base 44: mod_base = OTHER; note = thymine
  misc_feature 1..58: note = Synthetic
  source 1..58: mol_type = other RNA

SEQ ID NO: 696 - RNA, 58 nt, synthetic construct; identical to SEQ ID NO: 483
  modified_base 24: mod_base = OTHER; note = thymine
  modified_base 29: mod_base = OTHER; note = thymine
  modified_base 31: mod_base = OTHER; note = thymine
  modified_base 39: mod_base = OTHER; note = thymine
  modified_base 42: mod_base = OTHER; note = thymine
  modified_base 44: mod_base = OTHER; note = thymine
  misc_feature 1..58: note = Synthetic
  source 1..58: mol_type = other RNA

SEQ ID NO: 697 - RNA, 58 nt, synthetic construct; identical to SEQ ID NO: 483
  modified_base 24: mod_base = OTHER; note = thymine
  modified_base 29: mod_base = OTHER; note = thymine
  modified_base 31: mod_base = OTHER; note = thymine
  modified_base 39: mod_base = OTHER; note = thymine
  modified_base 42: mod_base = OTHER; note = thymine
  modified_base 44: mod_base = OTHER; note = thymine
  misc_feature 1..58: note = Synthetic
  source 1..58: mol_type = other RNA

SEQ ID NO: 698 - RNA, 58 nt, synthetic construct; identical to SEQ ID NO: 483
  misc_feature 1..58: note = Synthetic
  source 1..58: mol_type = other RNA

SEQ ID NO: 699 - RNA, 44 nt, synthetic construct
  modified_base 24..26: mod_base = OTHER; note = thymine
  modified_base 29: mod_base = OTHER; note = thymine
  modified_base 31: mod_base = OTHER; note = thymine
  modified_base 36: mod_base = OTHER; note = thymine
  misc_feature 1..44: note = Synthetic
  source 1..44: mol_type = other RNA
gcacatgaggatcacccatgtgctttcctctgcgatcacgtgct

SEQ ID NO: 700 - RNA, 45 nt, synthetic construct
  modified_base 24..26: mod_base = OTHER; note = thymine
  modified_base 29: mod_base = OTHER; note = thymine
  modified_base 31: mod_base = OTHER; note = thymine
  modified_base 36: mod_base = OTHER; note = thymine
  misc_feature 1..45: note = Synthetic
  source 1..45: mol_type = other RNA
gcacatgaggatcacccatgtgctttcctctgcgatcacgtgctc

SEQ ID NO: 701 - RNA, 46 nt, synthetic construct
  modified_base 24..26: mod_base = OTHER; note = thymine
  modified_base 29: mod_base = OTHER; note = thymine
  modified_base 31: mod_base = OTHER; note = thymine
  modified_base 36: mod_base = OTHER; note = thymine
  misc_feature 1..46: note = Synthetic
  source 1..46: mol_type = other RNA
gcacatgaggatcacccatgtgctttcctctgcgatcacgtgctca

SEQ ID NO: 702 - RNA, 47 nt, synthetic construct
  modified_base 24..26: mod_base = OTHER; note = thymine
  modified_base 29: mod_base = OTHER; note = thymine
  modified_base 31: mod_base = OTHER; note = thymine
  modified_base 36: mod_base = OTHER; note = thymine
  misc_feature 1..47: note = Synthetic
  source 1..47: mol_type = other RNA
gcacatgaggatcacccatgtgctttcctctgcgatcacgtgctcag

SEQ ID NO: 703 - RNA, 49 nt, synthetic construct
  modified_base 24..26: mod_base = OTHER; note = thymine
  modified_base 29: mod_base = OTHER; note = thymine
  modified_base 31: mod_base = OTHER; note = thymine
  modified_base 36: mod_base = OTHER; note = thymine
  misc_feature 1..49: note = Synthetic
  source 1..49: mol_type = other RNA
gcacatgaggatcacccatgtgctttcctctgcgatcacgtgctcagtc

SEQ ID NO: 704 - RNA, 50 nt, synthetic construct
  modified_base 24..26: mod_base = OTHER; note = thymine
  modified_base 29: mod_base = OTHER; note = thymine
  modified_base 31: mod_base = OTHER; note = thymine
  modified_base 36: mod_base = OTHER; note = thymine
  misc_feature 1..50: note = Synthetic
  source 1..50: mol_type = other RNA
gcacatgaggatcacccatgtgctttcctctgcgatcacgtgctcagtct

SEQ ID NO: 705 - RNA, 51 nt, synthetic construct
  modified_base 24..26: mod_base = OTHER; note = thymine
  modified_base 29: mod_base = OTHER; note = thymine
  modified_base 31: mod_base = OTHER; note = thymine
  modified_base 36: mod_base = OTHER; note = thymine
  misc_feature 1..51: note = Synthetic
  source 1..51: mol_type = other RNA
gcacatgaggatcacccatgtgctttcctctgcgatcacgtgctcagtctg

SEQ ID NO: 706 - RNA, 52 nt, synthetic construct
  modified_base 24..26: mod_base = OTHER; note = thymine
  modified_base 29: mod_base = OTHER; note = thymine
  modified_base 31: mod_base = OTHER; note = thymine
  modified_base 36: mod_base = OTHER; note = thymine
  misc_feature 1..52: note = Synthetic
  source 1..52: mol_type = other RNA
gcacatgaggatcacccatgtgctttcctctgcgatcacgtgctcagtctgg

SEQ ID NO: 707 - RNA, 53 nt, synthetic construct
  modified_base 24..26: mod_base = OTHER; note = thymine
  modified_base 29: mod_base = OTHER; note = thymine
  modified_base 31: mod_base = OTHER; note = thymine
  modified_base 36: mod_base = OTHER; note = thymine
  misc_feature 1..53: note = Synthetic
  source 1..53: mol_type = other RNA
gcacatgaggatcacccatgtgctttcctctgcgatcacgtgctcagtctggg

SEQ ID NO: 708 - RNA, 54 nt, synthetic construct
  modified_base 24..26: mod_base = OTHER; note = thymine
  modified_base 29: mod_base = OTHER; note = thymine
  modified_base 31: mod_base = OTHER; note = thymine
  modified_base 36: mod_base = OTHER; note = thymine
  misc_feature 1..54: note = Synthetic
  source 1..54: mol_type = other RNA
gcacatgaggatcacccatgtgctttcctctgcgatcacgtgctcagtctgggc

SEQ ID NO: 709 - RNA, 55 nt, synthetic construct
  modified_base 24..26: mod_base = OTHER; note = thymine
  modified_base 29: mod_base = OTHER; note = thymine
  modified_base 31: mod_base = OTHER; note = thymine
  modified_base 36: mod_base = OTHER; note = thymine
  misc_feature 1..55: note = Synthetic
  source 1..55: mol_type = other RNA
gcacatgaggatcacccatgtgctttcctctgcgatcacgtgctcagtctgggcc

SEQ ID NO: 710 - RNA, 52 nt, synthetic construct; identical to SEQ ID NO: 688
  misc_feature 1..52: note = Synthetic
  source 1..52: mol_type = other RNA

SEQ ID NO: 711 - RNA, 23 nt, synthetic construct
  misc_feature 1..23: note = Synthetic
  source 1..23: mol_type = other RNA
gcacatgaggatcacccatgtgc

SEQ ID NO: 712 - RNA, 52 nt, synthetic construct
  modified_base 24: mod_base = OTHER; note = thymine
  modified_base 29: mod_base = OTHER; note = thymine
  modified_base 31: mod_base = OTHER; note = thymine
  modified_base 39: mod_base = OTHER; note = thymine
  modified_base 42: mod_base = OTHER; note = thymine
  modified_base 44: mod_base = OTHER; note = thymine
  misc_feature 1..52: note = Synthetic
  source 1..52: mol_type = other RNA
gcacatgaggatcacccatgtgctgccatctggagccctcatctggcctgca

SEQ ID NO: 713 - RNA, 52 nt, synthetic construct; identical to SEQ ID NO: 688
  modified_base 24: mod_base = OTHER; note = thymine
  modified_base 29: mod_base = OTHER; note = thymine
  modified_base 31: mod_base = OTHER; note = thymine
  modified_base 39: mod_base = OTHER; note = thymine
  modified_base 42: mod_base = OTHER; note = thymine
  modified_base 44: mod_base = OTHER; note = thymine
  misc_feature 1..52: note = Synthetic
  source 1..52: mol_type = other RNA

SEQ ID NO: 714 - RNA, 75 nt, synthetic construct
  modified_base 24: mod_base = OTHER; note = thymine
  modified_base 29: mod_base = OTHER; note = thymine
  modified_base 31: mod_base = OTHER; note = thymine
  modified_base 39: mod_base = OTHER; note = thymine
  modified_base 42: mod_base = OTHER; note = thymine
  modified_base 44: mod_base = OTHER; note = thymine
  misc_feature 1..75: note = Synthetic
  source 1..75: mol_type = other RNA
gcacatgaggatcacccatgtgctgccatctggagcagtgatctggcctgcagcacatgaggatcacccatgtgc

SEQ ID NO: 715 - RNA, 53 nt, synthetic construct
  modified_base 2: mod_base = OTHER; note = thymine
  modified_base 7: mod_base = OTHER; note = thymine
  modified_base 9: mod_base = OTHER; note = thymine
  modified_base 17: mod_base = OTHER; note = thymine
  modified_base 20: mod_base = OTHER; note = thymine
  modified_base 22: mod_base = OTHER; note = thymine
  misc_feature 1..53: note = Synthetic
  source 1..53: mol_type = other RNA
gtgccatctggagcagtgatctggcctgcagcacatgaggatcacccatgtgc

SEQ ID NO: 716 - RNA, 52 nt, synthetic construct; identical to SEQ ID NO: 688
  modified_base 24: mod_base = OTHER; note = thymine
  modified_base 29: mod_base = OTHER; note = thymine
  modified_base 31: mod_base = OTHER; note = thymine
  modified_base 39: mod_base = OTHER; note = thymine
  modified_base 42: mod_base = OTHER; note = thymine
  modified_base 44: mod_base = OTHER; note = thymine
  misc_feature 1..52: note = Synthetic
  source 1..52: mol_type = other RNA

SEQ ID NO: 717 - RNA, 53 nt, synthetic construct; identical to SEQ ID NO: 715
  modified_base 2: mod_base = OTHER; note = thymine
  modified_base 7: mod_base = OTHER; note = thymine
  modified_base 9: mod_base = OTHER; note = thymine
  modified_base 17: mod_base = OTHER; note = thymine
  modified_base 20: mod_base = OTHER; note = thymine
  modified_base 22: mod_base = OTHER; note = thymine
  misc_feature 1..53: note = Synthetic
  source 1..53: mol_type = other RNA

SEQ ID NO: 718 - RNA, 75 nt, synthetic construct; identical to SEQ ID NO: 714
  modified_base 24: mod_base = OTHER; note = thymine
  modified_base 29: mod_base = OTHER; note = thymine
  modified_base 31: mod_base = OTHER; note = thymine
  modified_base 39: mod_base = OTHER; note = thymine
  modified_base 42: mod_base = OTHER; note = thymine
  modified_base 44: mod_base = OTHER; note = thymine
  misc_feature 1..75: note = Synthetic
  source 1..75: mol_type = other RNA

SEQ ID NO: 719 - RNA, 52 nt, synthetic construct
  modified_base 24: mod_base = OTHER; note = thymine
  modified_base 29: mod_base = OTHER; note = thymine
  modified_base 31: mod_base = OTHER; note = thymine
  modified_base 39: mod_base = OTHER; note = thymine
  modified_base 41..42: mod_base = OTHER; note = thymine
  modified_base 44: mod_base = OTHER; note = thymine
  misc_feature 1..52: note = Synthetic
  source 1..52: mol_type = other RNA
gcacatgaggatcacccatgtgctgccatctggagccctcttctggcctgca

SEQ ID NO: 720 - RNA, 52 nt, synthetic construct
  modified_base 24: mod_base = OTHER; note = thymine
  modified_base 29: mod_base = OTHER; note = thymine
  modified_base 31: mod_base = OTHER; note = thymine
  modified_base 39: mod_base = OTHER; note = thymine
  modified_base 42: mod_base = OTHER; note = thymine
  modified_base 44: mod_base = OTHER; note = thymine
  misc_feature 1..52: note = Synthetic
  source 1..52: mol_type = other RNA
gcacatgaggatcacccatgtgctgccatctggagccctcgtctggcctgca

SEQ ID NO: 721 - RNA, 52 nt, synthetic construct
  modified_base 24: mod_base = OTHER; note = thymine
  modified_base 29: mod_base = OTHER; note = thymine
  modified_base 31: mod_base = OTHER; note = thymine
  modified_base 39: mod_base = OTHER; note = thymine
  modified_base 42: mod_base = OTHER; note = thymine
  modified_base 44: mod_base = OTHER; note = thymine
  misc_feature 1..52: note = Synthetic
  source 1..52: mol_type = other RNA
gcacatgaggatcacccatgtgctgccatctggagccctcctctggcctgca

SEQ ID NO: 722 - RNA, 52 nt, synthetic construct
  modified_base 24: mod_base = OTHER; note = thymine
  modified_base 29: mod_base = OTHER; note = thymine
  modified_base 31: mod_base = OTHER; note = thymine
  modified_base 39..40: mod_base = OTHER; note = thymine
  modified_base 42: mod_base = OTHER; note = thymine
  modified_base 44: mod_base = OTHER; note = thymine
  misc_feature 1..52: note = Synthetic
  source 1..52: mol_type = other RNA
gcacatgaggatcacccatgtgctgccatctggagcccttatctggcctgca

SEQ ID NO: 723 - RNA, 52 nt, synthetic construct
  modified_base 24: mod_base = OTHER; note = thymine
  modified_base 29: mod_base = OTHER; note = thymine
  modified_base 31: mod_base = OTHER; note = thymine
  modified_base 39: mod_base = OTHER; note = thymine
  modified_base 42: mod_base = OTHER; note = thymine
  modified_base 44: mod_base = OTHER; note = thymine
  misc_feature 1..52: note = Synthetic
  source 1..52: mol_type = other RNA
gcacatgaggatcacccatgtgctgccatctggagccctgatctggcctgca

SEQ ID NO: 724 - RNA, 52 nt, synthetic construct
  modified_base 24: mod_base = OTHER; note = thymine
  modified_base 29: mod_base = OTHER; note = thymine
  modified_base 31: mod_base = OTHER; note = thymine
  modified_base 39: mod_base = OTHER; note = thymine
  modified_base 42: mod_base = OTHER; note = thymine
  modified_base 44: mod_base = OTHER; note = thymine
  misc_feature 1..52: note = Synthetic
  source 1..52: mol_type = other RNA
gcacatgaggatcacccatgtgctgccatctggagccctaatctggcctgca

SEQ ID NO: 725 - RNA, 52 nt, synthetic construct
  modified_base 24: mod_base = OTHER; note = thymine
  modified_base 29: mod_base = OTHER; note = thymine
  modified_base 31: mod_base = OTHER; note = thymine
  modified_base 42: mod_base = OTHER; note = thymine
  modified_base 44: mod_base = OTHER; note = thymine
  misc_feature 1..52: note = Synthetic
  source 1..52: mol_type = other RNA
gcacatgaggatcacccatgtgctgccatctggagcccacatctggcctgca

SEQ ID NO: 726 - RNA, 52 nt, synthetic construct
  modified_base 24: mod_base = OTHER; note = thymine
  modified_base 29: mod_base = OTHER; note = thymine
  modified_base 31: mod_base = OTHER; note = thymine
  modified_base 42: mod_base = OTHER; note = thymine
  modified_base 44: mod_base = OTHER; note = thymine
  misc_feature 1..52: note = Synthetic
  source 1..52: mol_type = other RNA
gcacatgaggatcacccatgtgctgccatctggagcccccatctggcctgca

SEQ ID NO: 727 - RNA, 52 nt, synthetic construct
  modified_base 24: mod_base = OTHER; note = thymine
  modified_base 29: mod_base = OTHER; note = thymine
  modified_base 31: mod_base = OTHER; note = thymine
  modified_base 42: mod_base = OTHER; note = thymine
  modified_base 44: mod_base = OTHER; note = thymine
  misc_feature 1..52: note = Synthetic
  source 1..52: mol_type = other RNA
gcacatgaggatcacccatgtgctgccatctggagcccgcatctggcctgca

SEQ ID NO: 728 - RNA, 52 nt, synthetic construct
  modified_base 24: mod_base = OTHER; note = thymine
  modified_base 29: mod_base = OTHER; note = thymine
  modified_base 31: mod_base = OTHER; note = thymine
  modified_base 39: mod_base = OTHER; note = thymine
  modified_base 42: mod_base = OTHER; note = thymine
  modified_base 44: mod_base = OTHER; note = thymine
  misc_feature 1..52: note = Synthetic
  source 1..52: mol_type = other RNA
gcacatgaggatcacccatgtgctgccatctggagccgtcatctggcctgca

SEQ ID NO: 729 - RNA, 52 nt, synthetic construct
  modified_base 24: mod_base = OTHER; note = thymine
  modified_base 29: mod_base = OTHER; note = thymine
  modified_base 31: mod_base = OTHER; note = thymine
  modified_base 39: mod_base = OTHER; note = thymine
  modified_base 42: mod_base = OTHER; note = thymine
  modified_base 44: mod_base = OTHER; note = thymine
  misc_feature 1..52: note = Synthetic
  source 1..52: mol_type = other RNA
gcacatgaggatcacccatgtgctgccatctggagccatcatctggcctgca

SEQ ID NO: 730 - RNA, 52 nt, synthetic construct
  modified_base 24: mod_base = OTHER; note = thymine
  modified_base 29: mod_base = OTHER; note = thymine
  modified_base 31: mod_base = OTHER; note = thymine
  modified_base 38..39: mod_base = OTHER; note = thymine
  modified_base 42: mod_base = OTHER; note = thymine
  modified_base 44: mod_base = OTHER; note = thymine
  misc_feature 1..52: note = Synthetic
  source 1..52: mol_type = other RNA
gcacatgaggatcacccatgtgctgccatctggagccttcatctggcctgca

SEQ ID NO: 731 - RNA, 52 nt, synthetic construct
  modified_base 24: mod_base = OTHER; note = thymine
  modified_base 29: mod_base = OTHER; note = thymine
  modified_base 31: mod_base = OTHER; note = thymine
  modified_base 39: mod_base = OTHER; note = thymine
  modified_base 42: mod_base = OTHER; note = thymine
  modified_base 44: mod_base = OTHER; note = thymine
  misc_feature 1..52: note = Synthetic
  source 1..52: mol_type = other RNA
gcacatgaggatcacccatgtgctgccatctggagcgctcatctggcctgca

SEQ ID NO: 732 - RNA, 52 nt, synthetic construct
  modified_base 24: mod_base = OTHER; note = thymine
  modified_base 29: mod_base = OTHER; note = thymine
  modified_base 31: mod_base = OTHER; note = thymine
  modified_base 39: mod_base = OTHER; note = thymine
  modified_base 42: mod_base = OTHER; note = thymine
  modified_base 44: mod_base = OTHER; note = thymine
  misc_feature 1..52: note = Synthetic
  source 1..52: mol_type = other RNA
gcacatgaggatcacccatgtgctgccatctggagcactcatctggcctgca

SEQ ID NO: 733 - RNA, 52 nt, synthetic construct
  modified_base 24: mod_base = OTHER; note = thymine
  modified_base 29: mod_base = OTHER; note = thymine
  modified_base 31: mod_base = OTHER; note = thymine
  modified_base 37: mod_base = OTHER; note = thymine
  modified_base 39: mod_base = OTHER; note = thymine
  modified_base 42: mod_base = OTHER; note = thymine
  modified_base 44: mod_base = OTHER; note = thymine
  misc_feature 1..52: note = Synthetic
  source 1..52: mol_type = other RNA
gcacatgaggatcacccatgtgctgccatctggagctctcatctggcctgca

SEQ ID NO: 734 - RNA, 52 nt, synthetic construct
  modified_base 24: mod_base = OTHER; note = thymine
  modified_base 29: mod_base = OTHER; note = thymine
  modified_base 31: mod_base = OTHER; note = thymine
  modified_base 36: mod_base = OTHER; note = thymine
  modified_base 39: mod_base = OTHER; note = thymine
  modified_base 42: mod_base = OTHER; note = thymine
  modified_base 44: mod_base = OTHER; note = thymine
  misc_feature 1..52: note = Synthetic
  source 1..52: mol_type = other RNA
gcacatgaggatcacccatgtgctgccatctggagtcctcatctggcctgca

SEQ ID NO: 735 - RNA, 52 nt, synthetic construct
  modified_base 24: mod_base = OTHER; note = thymine
  modified_base 29: mod_base = OTHER; note = thymine
  modified_base 31: mod_base = OTHER; note = thymine
  modified_base 39: mod_base = OTHER; note = thymine
  modified_base 42: mod_base = OTHER; note = thymine
  modified_base 44: mod_base = OTHER; note = thymine
  misc_feature 1..52: note = Synthetic
  source 1..52: mol_type = other RNA
gcacatgaggatcacccatgtgctgccatctggaggcctcatctggcctgca

SEQ ID NO: 736 - RNA, 52 nt, synthetic construct
  modified_base 24: mod_base = OTHER; note = thymine
  modified_base 29: mod_base = OTHER; note = thymine
  modified_base 31: mod_base = OTHER; note = thymine
  modified_base 39: mod_base = OTHER; note = thymine
  modified_base 42: mod_base = OTHER; note = thymine
  modified_base 44: mod_base = OTHER; note = thymine
  misc_feature 1..52: note = Synthetic
  source 1..52: mol_type = other RNA
gcacatgaggatcacccatgtgctgccatctggagacctcatctggcctgca

SEQ ID NO: 737 - RNA, 52 nt, synthetic construct
  modified_base 24: mod_base = OTHER; note = thymine
  modified_base 29: mod_base = OTHER; note = thymine
  modified_base 31: mod_base = OTHER; note = thymine
  modified_base 39: mod_base = OTHER; note = thymine
  modified_base 42: mod_base = OTHER; note = thymine
  modified_base 44: mod_base = OTHER; note = thymine
  misc_feature 1..52: note = Synthetic
  source 1..52: mol_type = other RNA
gcacatgaggatcacccatgtgctgccatctggcgccctcatctggcctgca

SEQ ID NO: 738 - RNA, 52 nt, synthetic construct
  modified_base 24: mod_base = OTHER; note = thymine
  modified_base 29: mod_base = OTHER; note = thymine
  modified_base 31: mod_base = OTHER; note = thymine
  modified_base 39: mod_base = OTHER; note = thymine
  modified_base 42: mod_base = OTHER; note = thymine
  modified_base 44: mod_base = OTHER; note = thymine
  misc_feature 1..52: note = Synthetic
  source 1..52: mol_type = other RNA
gcacatgaggatcacccatgtgctgccatctggggccctcatctggcctgca

SEQ ID NO: 739 - RNA, 52 nt, synthetic construct
  modified_base 24: mod_base = OTHER; note = thymine
  modified_base 29: mod_base = OTHER; note = thymine
  modified_base 31: mod_base = OTHER; note = thymine
  modified_base 34: mod_base = OTHER; note = thymine
  modified_base 39: mod_base = OTHER; note = thymine
  modified_base 42: mod_base = OTHER; note = thymine
  modified_base 44: mod_base = OTHER; note = thymine
  misc_feature 1..52: note = Synthetic
  source 1..52: mol_type = other RNA
gcacatgaggatcacccatgtgctgccatctggtgccctcatctggcctgca

SEQ ID NO: 740 - RNA, 52 nt, synthetic construct
  modified_base 24: mod_base = OTHER; note = thymine
  modified_base 29: mod_base = OTHER; note = thymine
  modified_base 31: mod_base = OTHER; note = thymine
  modified_base 39: mod_base = OTHER; note = thymine
  modified_base 42: mod_base = OTHER; note = thymine
  modified_base 44: mod_base = OTHER; note = thymine
  misc_feature 1..52: note = Synthetic
  source 1..52: mol_type = other RNA
gcacatgaggatcacccatgtgctgccatctcgagccctcatctggcctgca

SEQ ID NO: 741 - RNA, 52 nt, synthetic construct
  modified_base 24: mod_base = OTHER; note = thymine
  modified_base 29: mod_base = OTHER; note = thymine
  modified_base 31: mod_base = OTHER; note = thymine
  modified_base 39: mod_base = OTHER; note = thymine
  modified_base 42: mod_base = OTHER; note = thymine
  modified_base 44: mod_base = OTHER; note = thymine
  misc_feature 1..52: note = Synthetic
  source 1..52: mol_type = other RNA
gcacatgaggatcacccatgtgctgccatctagagccctcatctggcctgca

SEQ ID NO: 742 - RNA, 52 nt, synthetic construct
  modified_base 24: mod_base = OTHER; note = thymine
  modified_base 29: mod_base = OTHER; note = thymine
  modified_base 31..32: mod_base = OTHER; note = thymine
  modified_base 39: mod_base = OTHER; note = thymine
  modified_base 42: mod_base = OTHER; note = thymine
  modified_base 44: mod_base = OTHER; note = thymine
  misc_feature 1..52: note = Synthetic
  source 1..52: mol_type = other RNA
gcacatgaggatcacccatgtgctgccatcttgagccctcatctggcctgca

SEQ ID NO: 743 - RNA, 52 nt, synthetic construct
  modified_base 24: mod_base = OTHER; note = thymine
  modified_base 29: mod_base = OTHER; note = thymine
  modified_base 31: mod_base = OTHER; note = thymine
  modified_base 39: mod_base = OTHER; note = thymine
  modified_base 42: mod_base = OTHER; note = thymine
  modified_base 44: mod_base = OTHER; note = thymine
  misc_feature 1..52: note = Synthetic
  source 1..52: mol_type = other RNA
gcacatgaggatcacccatgtgctgccatgtggagccctcatctggcctgca

SEQ ID NO: 744 - RNA, 52 nt, synthetic construct
  modified_base 24: mod_base = OTHER; note = thymine
  modified_base 29: mod_base = OTHER; note = thymine
  modified_base 31: mod_base = OTHER; note = thymine
  modified_base 39: mod_base = OTHER; note = thymine
  modified_base 42: mod_base = OTHER; note = thymine
  modified_base 44: mod_base = OTHER; note = thymine
  misc_feature 1..52: note = Synthetic
  source 1..52: mol_type = other RNA
gcacatgaggatcacccatgtgctgccatatggagccctcatctggcctgca

SEQ ID NO: 745 - RNA, 52 nt, synthetic construct
  modified_base 24: mod_base = OTHER; note = thymine
  modified_base 29..31: mod_base = OTHER; note = thymine
  modified_base 39: mod_base = OTHER; note = thymine
  modified_base 42: mod_base = OTHER; note = thymine
  modified_base 44: mod_base = OTHER; note = thymine
  misc_feature 1..52: note = Synthetic
  source 1..52: mol_type = other RNA
gcacatgaggatcacccatgtgctgccatttggagccctcatctggcctgca

SEQ ID NO: 746 - RNA, 52 nt, synthetic construct
  modified_base 24: mod_base = OTHER; note = thymine
  modified_base 29: mod_base = OTHER; note = thymine
  modified_base 31: mod_base = OTHER; note = thymine
  modified_base 39: mod_base = OTHER; note = thymine
  modified_base 42: mod_base = OTHER; note = thymine
  modified_base 44: mod_base = OTHER; note = thymine
  misc_feature 1..52: note = Synthetic
  source 1..52: mol_type = other RNA
gcacatgaggatcacccatgtgctgccctctggagccctcatctggcctgca

SEQ ID NO: 747 - RNA, 52 nt, synthetic construct
  modified_base 24: mod_base = OTHER; note = thymine
  modified_base 29: mod_base = OTHER; note = thymine
  modified_base 31: mod_base = OTHER; note = thymine
  modified_base 39: mod_base = OTHER; note = thymine
  modified_base 42: mod_base = OTHER; note = thymine
  modified_base 44: mod_base = OTHER; note = thymine
  misc_feature 1..52: note = Synthetic
  source 1..52: mol_type = other RNA
gcacatgaggatcacccatgtgctgccgtctggagccctcatctggcctgca

SEQ ID NO: 748 - RNA, 52 nt, synthetic construct
  modified_base 24: mod_base = OTHER; note = thymine
  modified_base 28..29: mod_base = OTHER; note = thymine
  modified_base 31: mod_base = OTHER; note = thymine
  modified_base 39: mod_base = OTHER; note = thymine
  modified_base 42: mod_base = OTHER; note = thymine
  modified_base 44: mod_base = OTHER; note = thymine
  misc_feature 1..52: note = Synthetic
  source 1..52: mol_type = other RNA
gcacatgaggatcacccatgtgctgccttctggagccctcatctggcctgca

SEQ ID NO: 749 - RNA, 52 nt, synthetic construct
  modified_base 24: mod_base = OTHER; note = thymine
  modified_base 29: mod_base = OTHER; note = thymine
  modified_base 31: mod_base = OTHER; note = thymine
  modified_base 39: mod_base = OTHER; note = thymine
  modified_base 42: mod_base = OTHER; note = thymine
  modified_base 44: mod_base = OTHER; note = thymine
  misc_feature 1..52: note = Synthetic
  source 1..52: mol_type = other RNA
gcacatgaggatcacccatgtgctggcatctggagccctcatctggcctgca

SEQ ID NO: 750 - RNA, 52 nt, synthetic construct
  modified_base 24: mod_base = OTHER; note = thymine
  modified_base 29: mod_base = OTHER; note = thymine
  modified_base 31: mod_base = OTHER; note = thymine
  modified_base 39: mod_base = OTHER; note = thymine
  modified_base 42: mod_base = OTHER; note = thymine
  modified_base 44: mod_base = OTHER; note = thymine
  misc_feature 1..52: note = Synthetic
  source 1..52: mol_type = other RNA
gcacatgaggatcacccatgtgctgacatctggagccctcatctggcctgca

SEQ ID NO: 751 - RNA, 52 nt, synthetic construct
  modified_base 24: mod_base = OTHER; note = thymine
  modified_base 26: mod_base = OTHER; note = thymine
  modified_base 29: mod_base = OTHER; note = thymine
  modified_base 31: mod_base = OTHER; note = thymine
  modified_base 39: mod_base = OTHER; note = thymine
  modified_base 42: mod_base = OTHER; note = thymine
  modified_base 44: mod_base = OTHER; note = thymine
  misc_feature 1..52: note = Synthetic
  source 1..52: mol_type = other RNA
gcacatgaggatcacccatgtgctgtcatctggagccctcatctggcctgca

SEQ ID NO: 752 - RNA, 52 nt, synthetic construct
  modified_base 29: mod_base = OTHER; note = thymine
  modified_base 31: mod_base = OTHER; note = thymine
  modified_base 39: mod_base = OTHER; note = thymine
  modified_base 42: mod_base = OTHER; note = thymine
  modified_base 44: mod_base = OTHER; note = thymine
  misc_feature 1..52: note = Synthetic
  source 1..52: mol_type = other RNA
gcacatgaggatcacccatgtgccgccatctggagccctcatctggcctgca

SEQ ID NO: 753 - RNA, 52 nt, synthetic construct
  modified_base 29: mod_base = OTHER; note = thymine
  modified_base 31: mod_base = OTHER; note = thymine
  modified_base 39: mod_base = OTHER; note = thymine
  modified_base 42: mod_base = OTHER; note = thymine
  modified_base 44: mod_base = OTHER; note = thymine
  misc_feature 1..52: note = Synthetic
  source 1..52: mol_type = other RNA
gcacatgaggatcacccatgtgcagccatctggagccctcatctggcctgca

SEQ ID NO: 754 - RNA, 52 nt, synthetic construct
  modified_base 29: mod_base = OTHER; note = thymine
  modified_base 31: mod_base = OTHER; note = thymine
  modified_base 39: mod_base = OTHER; note = thymine
  modified_base 42: mod_base = OTHER; note = thymine
  modified_base 44: mod_base = OTHER; note = thymine
  misc_feature 1..52: note = Synthetic
  source 1..52: mol_type = other RNA
gcacatgaggatcacccatgtgcggccatctggagccctcatctggcctgca

SEQ ID NO: 755 - RNA, 44 nt, synthetic construct
  modified_base 24: mod_base = OTHER; note = thymine
  modified_base 32: mod_base = OTHER; note = thymine
  modified_base 34: mod_base = OTHER; note = thymine
  modified_base 36: mod_base = OTHER; note = thymine
  misc_feature 1..44: note = Synthetic
  source 1..44: mol_type = other RNA
gcacatgaggatcacccatgtgctggagccctatctggcctgca

SEQ ID NO: 756 - RNA, 44 nt, synthetic construct
  modified_base 29: mod_base = OTHER; note = thymine
  modified_base 31: mod_base = OTHER; note = thymine
  modified_base 34: mod_base = OTHER; note = thymine
  modified_base 36: mod_base = OTHER; note = thymine
  misc_feature 1..44: note = Synthetic
  source 1..44: mol_type = other RNA
gcacatgaggatcacccatgtgcgacaatgtgatctggcctgca

SEQ ID NO: 757 - RNA, 44 nt, synthetic construct
  modified_base 30: mod_base = OTHER; note = thymine
  modified_base 34: mod_base = OTHER; note = thymine
  modified_base 36: mod_base = OTHER; note = thymine
  misc_feature 1..44: note = Synthetic
  source 1..44: mol_type = other RNA
gcacatgaggatcacccatgtgccagggctggatctggcctgca

SEQ ID NO: 758 - RNA, 44 nt, synthetic construct
  modified_base 34: mod_base = OTHER; note = thymine
  modified_base 36: mod_base = OTHER; note = thymine
  misc_feature 1..44: note = Synthetic
  source 1..44: mol_type = other RNA
gcacatgaggatcacccatgtgcgagggaaggatctggcctgca

SEQ ID NO: 759 - RNA, 44 nt, synthetic construct
  modified_base 24..25: mod_base = OTHER; note = thymine
  modified_base 30..32: mod_base = OTHER; note = thymine
  modified_base 34: mod_base = OTHER; note = thymine
  modified_base 36: mod_base = OTHER; note = thymine
  misc_feature 1..44: note = Synthetic
  source 1..44: mol_type = other RNA
gcacatgaggatcacccatgtgcttcaactttatctggcctgca

SEQ ID NO: 760 - RNA, 52 nt, synthetic construct
  modified_base 25: mod_base = OTHER; note = thymine
  modified_base 30: mod_base = OTHER; note = thymine
  modified_base 32: mod_base = OTHER; note = thymine
  modified_base 40: mod_base = OTHER; note = thymine
  modified_base 42: mod_base = OTHER; note = thymine
  modified_base 44: mod_base = OTHER; note = thymine
  misc_feature 1..52: note = Synthetic
  source 1..52: mol_type = other RNA
gcacatgaggatcacccatgtgcgtgccatctggagccctatctggcctgca

SEQ ID NO: 761 - RNA, 52 nt, synthetic construct
  modified_base 25: mod_base = OTHER; note = thymine
  modified_base 29: mod_base = OTHER; note = thymine
  modified_base 31: mod_base = OTHER; note = thymine
  modified_base 37: mod_base = OTHER; note = thymine
  modified_base 39: mod_base = OTHER; note = thymine
  modified_base 42: mod_base = OTHER; note = thymine
  modified_base 44: mod_base = OTHER; note = thymine
  misc_feature 1..52: note = Synthetic
  source 1..52: mol_type = other RNA
gcacatgaggatcacccatgtgcgtccctctgacaatgtgatctggcctgca

SEQ ID NO: 762 - RNA, 52 nt, synthetic construct
  modified_base 38: mod_base = OTHER; note = thymine
  modified_base 42: mod_base = OTHER; note = thymine
  modified_base 44: mod_base = OTHER; note = thymine
  misc_feature 1..52: note = Synthetic
  source 1..52: mol_type = other RNA
gcacatgaggatcacccatgtgcagagagcccagggctggatctggcctgca

SEQ ID NO: 763 - RNA, 52 nt, synthetic construct
  modified_base 24..25: mod_base = OTHER; note = thymine
  modified_base 27: mod_base = OTHER; note = thymine
  modified_base 31: mod_base = OTHER; note = thymine
  modified_base 42: mod_base = OTHER; note = thymine
  modified_base 44: mod_base = OTHER; note = thymine
  misc_feature 1..52: note = Synthetic
  source 1..52: mol_type = other RNA
gcacatgaggatcacccatgtgcttctggctgagggaaggatctggcctgca

SEQ ID NO: 764 - RNA, 52 nt, synthetic construct
  modified_base 32..33: mod_base = OTHER; note = thymine
  modified_base 38..40: mod_base = OTHER; note = thymine
  modified_base 42: mod_base = OTHER; note = thymine
  modified_base 44: mod_base = OTHER; note = thymine
  misc_feature 1..52: note = Synthetic
  source 1..52: mol_type = other RNA
gcacatgaggatcacccatgtgcgaccaacattcaactttatctggcctgca

SEQ ID NO: 765 - RNA, 64 nt, synthetic construct
  modified_base 27: mod_base = OTHER; note = thymine
  modified_base 29: mod_base = OTHER; note = thymine
  modified_base 35: mod_base = OTHER; note = thymine
  modified_base 37: mod_base = OTHER; note = thymine
  modified_base 42: mod_base = OTHER; note = thymine
  modified_base 44: mod_base = OTHER; note = thymine
  modified_base 52: mod_base = OTHER; note = thymine
  modified_base 54: mod_base = OTHER; note = thymine
  modified_base 56: mod_base = OTHER; note = thymine
  misc_feature 1..64: note = Synthetic
  source 1..64: mol_type = other RNA
gcacatgaggatcacccatgtgcccctctgacaatgtgccatctggagccctatctggcctgca

SEQ ID NO: 766 - RNA, 64 nt, synthetic construct
  modified_base 33: mod_base = OTHER; note = thymine
  modified_base 35: mod_base = OTHER; note = thymine
  modified_base 37: mod_base = OTHER; note = thymine
  modified_base 41: mod_base = OTHER; note = thymine
  modified_base 43: mod_base = OTHER; note = thymine
  modified_base 49: mod_base = OTHER; note = thymine
  modified_base 51: mod_base = OTHER; note = thymine
  modified_base 54: mod_base = OTHER; note = thymine
  modified_base 56: mod_base = OTHER; note = thymine
  misc_feature 1..64: note = Synthetic
  source 1..64: mol_type = other RNA
gcacatgaggatcacccatgtgcgggccacagtgtgtccctctgacaatgtgatctggcctgca

SEQ ID NO: 767 - RNA, 64 nt, synthetic construct
  modified_base 24: mod_base = OTHER; note = thymine
  modified_base 27..28: mod_base = OTHER; note = thymine
  modified_base 31: mod_base = OTHER; note = thymine
  modified_base 33: mod_base = OTHER; note = thymine
  modified_base 50: mod_base = OTHER; note = thymine
  modified_base 54: mod_base = OTHER; note = thymine
  modified_base 56: mod_base = OTHER; note = thymine
  misc_feature 1..64: note = Synthetic
  source 1..64: mol_type = other RNA
gcacatgaggatcacccatgtgctgcttcatgtacagagagcccagggctggatctggcctgca

SEQ ID NO: 768 - RNA, 64 nt, synthetic construct
  modified_base 24: mod_base = OTHER; note = thymine
  modified_base 26: mod_base = OTHER; note = thymine
  modified_base 36..37: mod_base = OTHER; note = thymine
  modified_base 39: mod_base = OTHER; note = thymine
  modified_base 43: mod_base = OTHER; note = thymine
  modified_base 54: mod_base = OTHER; note = thymine
  modified_base 56: mod_base = OTHER; note = thymine
  misc_feature 1..64: note = Synthetic
  source 1..64: mol_type = other RNA
gcacatgaggatcacccatgtgctctccaagggaattctggctgagggaaggatctggcctgca

SEQ ID NO: 769 - RNA, 64 nt, synthetic construct
  modified_base 27: mod_base = OTHER; note = thymine
  modified_base 29: mod_base = OTHER; note = thymine
  modified_base 35: mod_base = OTHER; note = thymine
  modified_base 44..45: mod_base = OTHER; note = thymine
  modified_base 50..52: mod_base = OTHER; note = thymine
  modified_base 54: mod_base = OTHER; note = thymine
  modified_base 56: mod_base = OTHER; note = thymine
  misc_feature 1..64: note = Synthetic
  source 1..64: mol_type = other RNA
gcacatgaggatcacccatgtgcgcctctgaaaatgaccaacattcaactttatctggcctgca

SEQ ID NO: 770 - RNA, 50 nt, synthetic construct
  modified_base 26: mod_base = OTHER; note = thymine
  modified_base 28: mod_base = OTHER; note = thymine
  modified_base 37: mod_base = OTHER; note = thymine
  modified_base 40: mod_base = OTHER; note = thymine
  modified_base 42: mod_base = OTHER; note = thymine
  misc_feature 1..50: note = Synthetic
  source 1..50: mol_type = other RNA
gcacatgaggatcacccatgtgccatctggagcacctcatctggcctgca

SEQ ID NO: 771 - RNA, 55 nt, synthetic construct
  modified_base 24: mod_base = OTHER; note = thymine
  modified_base 26: mod_base = OTHER; note = thymine
  modified_base 31: mod_base = OTHER; note = thymine
  modified_base 33: mod_base = OTHER; note = thymine
  modified_base 42: mod_base = OTHER; note = thymine
  modified_base 45: mod_base = OTHER; note = thymine
  modified_base 47: mod_base = OTHER; note = thymine
  misc_feature 1..55: note = Synthetic
  source 1..55: mol_type = other RNA
gcacatgaggatcacccatgtgctgtgccatctggagcacctcatctggcctgca

SEQ ID NO: 772 - RNA, 65 nt, synthetic construct
  modified_base 26: mod_base = OTHER; note = thymine
  modified_base 28: mod_base = OTHER; note = thymine
  modified_base 34: mod_base = OTHER; note = thymine
  modified_base 36: mod_base = OTHER; note = thymine
  modified_base 41: mod_base = OTHER; note = thymine
  modified_base 43: mod_base = OTHER; note = thymine
  modified_base 52: mod_base = OTHER; note = thymine
  modified_base 55: mod_base = OTHER; note = thymine
  modified_base 57: mod_base = OTHER; note = thymine
  misc_feature 1..65: note = Synthetic
  source 1..65: mol_type = other RNA
gcacatgaggatcacccatgtgccctctgacaatgtgccatctggagcacctcatctggcctgca

SEQ ID NO: 773 - RNA, 52 nt, synthetic construct
  modified_base 26: mod_base = OTHER; note = thymine
  modified_base 28: mod_base = OTHER; note = thymine
  modified_base 34..35: mod_base = OTHER; note = thymine
  modified_base 39: mod_base = OTHER; note = thymine
  modified_base 42: mod_base = OTHER; note = thymine
  modified_base 44: mod_base = OTHER; note = thymine
  misc_feature 1..52: note = Synthetic
  source 1..52: mol_type = other RNA
gcacatgaggatcacccatgtgccatctggagcttacctcatctggcctgca

SEQ ID NO: 774 - RNA, 57 nt, synthetic construct
  modified_base 24: mod_base = OTHER; note = thymine
  modified_base 26: mod_base = OTHER; note = thymine
  modified_base 31: mod_base = OTHER; note = thymine
  modified_base 33: mod_base = OTHER; note = thymine
  modified_base 39..40: mod_base = OTHER; note = thymine
  modified_base 44: mod_base = OTHER; note = thymine
  modified_base 47: mod_base = OTHER; note = thymine
  modified_base 49: mod_base = OTHER; note = thymine
  misc_feature 1..57: note = Synthetic
  source 1..57: mol_type = other RNA
gcacatgaggatcacccatgtgctgtgccatctggagcttacctcatctggcctgca

SEQ ID NO: 775 - RNA, 67 nt, synthetic construct
  modified_base 26: mod_base = OTHER; note = thymine
  modified_base 28: mod_base = OTHER; note = thymine
  modified_base 34: mod_base = OTHER; note = thymine
  modified_base 36: mod_base = OTHER; note = thymine
  modified_base 41: mod_base = OTHER; note = thymine
  modified_base 43: mod_base = OTHER; note = thymine
  modified_base 49..50: mod_base = OTHER; note = thymine
  modified_base 54: mod_base = OTHER; note = thymine
  modified_base 57: mod_base = OTHER; note = thymine
  modified_base 59: mod_base = OTHER; note = thymine
  misc_feature 1..67: note = Synthetic
  source 1..67: mol_type = other RNA
gcacatgaggatcacccatgtgccctctgacaatgtgccatctggagcttacctcatctggcctgca

SEQ ID NO: 776 - RNA, 58 nt, synthetic construct
  modified_base 26: mod_base = OTHER; note = thymine
  modified_base 28: mod_base = OTHER; note = thymine
  modified_base 45: mod_base = OTHER; note = thymine
  modified_base 48: mod_base = OTHER; note = thymine
  modified_base 50: mod_base = OTHER; note = thymine
  misc_feature 1..58: note = Synthetic
  source 1..58: mol_type = other RNA
gcacatgaggatcacccatgtgccatctggagcggagaaccacctcatctggcctgca

SEQ ID NO: 777 - RNA, 63 nt, synthetic construct
  modified_base 24: mod_base = OTHER; note = thymine
  modified_base 26: mod_base = OTHER; note = thymine
  modified_base 31: mod_base = OTHER; note = thymine
  modified_base 33: mod_base = OTHER; note = thymine
  modified_base 50: mod_base = OTHER; note = thymine
  modified_base 53: mod_base = OTHER; note = thymine
  modified_base 55: mod_base = OTHER; note = thymine
  misc_feature 1..63: note = Synthetic
  source 1..63: mol_type = other RNA
gcacatgaggatcacccatgtgctgtgccatctggagcggagaaccacctcatctggcctgca

SEQ ID NO: 778 - RNA, 73 nt, synthetic construct
  modified_base 26: mod_base = OTHER; note = thymine
  modified_base 28: mod_base = OTHER; note = thymine
  modified_base 34: mod_base = OTHER; note = thymine
  modified_base 36: mod_base = OTHER; note = thymine
  modified_base 41: mod_base = OTHER; note = thymine
  modified_base 43: mod_base = OTHER; note = thymine
  modified_base 60: mod_base = OTHER; note = thymine
  modified_base 63: mod_base = OTHER; note = thymine
  modified_base 65: mod_base = OTHER; note = thymine
  misc_feature 1..73: note = Synthetic
  source 1..73: mol_type = other RNA
gcacatgaggatcacccatgtgccctctgacaatgtgccatctggagcggagaaccacctcatctggcctgca

SEQ ID NO: 779 - RNA, 70 nt, synthetic construct
  modified_base 26: mod_base = OTHER; note = thymine
  modified_base 28: mod_base = OTHER; note = thymine
  modified_base 43: mod_base = OTHER; note = thymine
  modified_base 47..48: mod_base = OTHER; note = thymine
  modified_base 57: mod_base = OTHER; note = thymine
  modified_base 60: mod_base = OTHER; note = thymine
  modified_base 62: mod_base = OTHER; note = thymine
  misc_feature 1..70: note = Synthetic
  source 1..70: mol_type = other RNA
gcacatgaggatcacccatgtgccatctggagcccaagagagtgcattagcgagcctcatctggcctgca

SEQ ID NO: 780 - RNA, 75 nt, synthetic construct
  modified_base 24: mod_base = OTHER; note = thymine
  modified_base 26: mod_base = OTHER; note = thymine
  modified_base 31: mod_base = OTHER; note = thymine
  modified_base 33: mod_base = OTHER; note = thymine
  modified_base 48: mod_base = OTHER; note = thymine
  modified_base 52..53: mod_base = OTHER; note = thymine
  modified_base 62: mod_base = OTHER; note = thymine
  modified_base 65: mod_base = OTHER; note = thymine
  modified_base 67: mod_base = OTHER; note = thymine
  misc_feature 1..75: note = Synthetic
  source 1..75: mol_type = other RNA
gcacatgaggatcacccatgtgctgtgccatctggagcccaagagagtgcattagcgagcctcatctggcctgca

SEQ ID NO: 781 - RNA, 85 nt, synthetic construct
  modified_base 26: mod_base = OTHER; note = thymine
  modified_base 28: mod_base = OTHER; note = thymine
  modified_base 34: mod_base = OTHER; note = thymine
  modified_base 36: mod_base = OTHER; note = thymine
  modified_base 41: mod_base = OTHER; note = thymine
  modified_base 43: mod_base = OTHER; note = thymine
  modified_base 58: mod_base = OTHER; note = thymine
  modified_base 62..63: mod_base = OTHER; note = thymine
  modified_base 72: mod_base = OTHER; note = thymine
  modified_base 75: mod_base = OTHER; note = thymine
  modified_base 77: mod_base = OTHER; note = thymine
  misc_feature 1..85: note = Synthetic
  source 1..85: mol_type = other RNA
gcacatgaggatcacccatgtgccctctgacaatgtgccatctggagcccaagagagtgcattagcgagcctcatctggcctgca

SEQ ID NO: 782 - RNA, 73 nt, synthetic construct
  modified_base 26: mod_base = OTHER; note = thymine
  modified_base 28: mod_base = OTHER; note = thymine
  modified_base 35: mod_base = OTHER; note = thymine
  modified_base 39: mod_base = OTHER; note = thymine
  modified_base 47: mod_base = OTHER; note = thymine
  modified_base 50..51: mod_base = OTHER; note = thymine
  modified_base 53: mod_base = OTHER; note = thymine
  modified_base 60: mod_base = OTHER; note = thymine
  modified_base 63: mod_base = OTHER; note = thymine
  modified_base 65: mod_base = OTHER; note = thymine
  misc_feature 1..73: note = Synthetic
  source 1..73: mol_type = other RNA
gcacatgaggatcacccatgtgccatctggagcatcaatacggaactgcttatcgcacctcatctggcctgca

SEQ ID NO: 783 - RNA, 78 nt, synthetic construct
  modified_base 24: mod_base = OTHER; note = thymine
  modified_base 26: mod_base = OTHER; note = thymine
  modified_base 31: mod_base = OTHER; note = thymine
  modified_base 33: mod_base = OTHER; note = thymine
  modified_base 40: mod_base = OTHER; note = thymine
  modified_base 44: mod_base = OTHER; note = thymine
  modified_base 52: mod_base = OTHER; note = thymine
  modified_base 55..56: mod_base = OTHER; note = thymine
  modified_base 58: mod_base = OTHER; note = thymine
  modified_base 65: mod_base = OTHER; note = thymine
  modified_base 68: mod_base = OTHER; note = thymine
  modified_base 70: mod_base = OTHER; note = thymine
  misc_feature 1..78: note = Synthetic
  source 1..78: mol_type = other RNA
gcacatgaggatcacccatgtgctgtgccatctggagcatcaatacggaactgcttatcgcacctcatctggcctgca

SEQ ID NO: 784 - RNA, 88 nt, synthetic construct
  modified_base 26: mod_base = OTHER; note = thymine
  modified_base 28: mod_base = OTHER; note = thymine
  modified_base 34: mod_base = OTHER; note = thymine
  modified_base 36: mod_base = OTHER; note = thymine
  modified_base 41: mod_base = OTHER; note = thymine
  modified_base 43: mod_base = OTHER; note = thymine
  modified_base 50: mod_base = OTHER; note = thymine
  modified_base 54: mod_base = OTHER; note = thymine
  modified_base 62: mod_base = OTHER; note = thymine
  modified_base 65..66: mod_base = OTHER; note = thymine
  modified_base 68: mod_base = OTHER; note = thymine
  modified_base 75: mod_base = OTHER; note = thymine
  modified_base 78: mod_base = OTHER; note = thymine
  modified_base 80: mod_base = OTHER; note = thymine
  misc_feature 1..88: note = Synthetic
  source 1..88: mol_type = other RNA
gcacatgaggatcacccatgtgccctctgacaatgtgccatctggagcatcaatacggaactgcttatcgcacctcatctggcctgca

SEQ ID NO: 785 - RNA, 88 nt, synthetic construct
  modified_base 26: mod_base = OTHER; note = thymine
  modified_base 28: mod_base = OTHER; note = thymine
  modified_base 34: mod_base = OTHER; note = thymine
  modified_base 40: mod_base = OTHER; note = thymine
  modified_base 42: mod_base = OTHER; note = thymine
  modified_base 44: mod_base = OTHER; note = thymine
  modified_base 54: mod_base = OTHER; note = thymine
  modified_base 62: mod_base = OTHER; note = thymine
  modified_base 65: mod_base = OTHER; note = thymine
  modified_base 68: mod_base = OTHER; note = thymine
  modified_base 75: mod_base = OTHER; note = thymine
  modified_base 78: mod_base = OTHER; note = thymine
  modified_base 80: mod_base = OTHER; note = thymine
  misc_feature 1..88: note = Synthetic
  source 1..88: mol_type = other RNA
gcacatgaggatcacccatgtgccatctggagctcgaagtatatcagcacacatgaaaagataatgatcacgcctcatctggcctgca

SEQ ID NO: 786 - RNA, 93 nt, synthetic construct
  modified_base 24: mod_base = OTHER; note = thymine
  modified_base 26: mod_base = OTHER; note = thymine
  modified_base 31: mod_base = OTHER; note = thymine
  modified_base 33: mod_base = OTHER; note = thymine
  modified_base 39: mod_base = OTHER; note = thymine
  modified_base 45: mod_base = OTHER; note = thymine
  modified_base 47: mod_base = OTHER; note = thymine
  modified_base 49: mod_base = OTHER; note = thymine
  modified_base 59: mod_base = OTHER; note = thymine
  modified_base 67: mod_base = OTHER; note = thymine
  modified_base 70: mod_base = OTHER; note = thymine
  modified_base 73: mod_base = OTHER; note = thymine
  modified_base 80: mod_base = OTHER; note = thymine
  modified_base 83: mod_base = OTHER; note = thymine
  modified_base 85: mod_base = OTHER; note = thymine
  misc_feature 1..93: note = Synthetic
  source 1..93: mol_type = other RNA
gcacatgaggatcacccatgtgctgtgccatctggagctcgaagtatatcagcacacatgaaaagataatgatcacgcctcatctggcctgca

SEQ ID NO: 787 - RNA, 103 nt, synthetic construct
  modified_base 26: mod_base = OTHER; note = thymine
  modified_base 28: mod_base = OTHER; note = thymine
  modified_base 34: mod_base = OTHER; note = thymine
  modified_base 36: mod_base = OTHER; note = thymine
  modified_base 41: mod_base = OTHER; note = thymine
  modified_base 43: mod_base = OTHER; note = thymine
  modified_base 49: mod_base = OTHER; note = thymine
  modified_base 55: mod_base = OTHER; note = thymine
  modified_base 57: mod_base = OTHER; note = thymine
  modified_base 59: mod_base = OTHER; note = thymine
  modified_base 69: mod_base = OTHER; note = thymine
  modified_base 77: mod_base = OTHER; note = thymine
  modified_base 80: mod_base = OTHER; note = thymine
  modified_base 83: mod_base = OTHER; note = thymine
  modified_base 90: mod_base = OTHER; note = thymine
  modified_base 93: mod_base = OTHER; note = thymine
  modified_base 95: mod_base = OTHER; note = thymine
  misc_feature 1..103: note = Synthetic
  source 1..103: mol_type = other RNA
gcacatgaggatcacccatgtgccctctgacaatgtgccatctggagctcgaagtatatcagcacacatgaaaagataatgatcacgcctcatctggcctgca

SEQ ID NO: 788 - RNA, 52 nt, synthetic construct
  modified_base 24: mod_base = OTHER; note = thymine
  modified_base 29: mod_base = OTHER; note = thymine
  modified_base 31: mod_base = OTHER; note = thymine
  modified_base 39: mod_base = OTHER; note = thymine
  modified_base 42: mod_base = OTHER; note = thymine
  modified_base 44: mod_base = OTHER; note = thymine
  misc_feature 1..52: note = Synthetic
  source 1..52: mol_type = other RNA
gcacatgaggatcacccatgtgctgccatctggagcagtgatctggcctgct

SEQ ID NO: 789 - RNA, 52 nt, synthetic construct
  modified_base 24: mod_base = OTHER; note = thymine
  modified_base 29: mod_base = OTHER; note = thymine
  modified_base 31: mod_base = OTHER; note = thymine
  modified_base 39: mod_base = OTHER; note = thymine
  modified_base 42: mod_base = OTHER; note = thymine
  modified_base 44: mod_base = OTHER; note = thymine
  misc_feature 1..52: note = Synthetic
  source 1..52: mol_type = other RNA
gcacatgaggatcacccatgtgctgccatctggagcagtgatctggcctgga

SEQ ID NO: 790 - RNA, 52 nt, synthetic construct
  modified_base 24: mod_base = OTHER; note = thymine
  modified_base 29: mod_base = OTHER; note = thymine
  modified_base 31: mod_base = OTHER; note = thymine
  modified_base 39: mod_base = OTHER; note = thymine
  modified_base 42: mod_base = OTHER; note = thymine
  modified_base 44: mod_base = OTHER; note = thymine
  misc_feature 1..52: note = Synthetic
  source 1..52: mol_type = other RNA
gcacatgaggatcacccatgtgctgccatctggagcagtgatctggcctcca

SEQ ID NO: 791 - RNA, 52 nt, synthetic construct
  modified_base 24: mod_base = OTHER; note = thymine
  modified_base 29: mod_base = OTHER; note = thymine
  modified_base 31: mod_base = OTHER; note = thymine
  modified_base 39: mod_base = OTHER; note = thymine
  modified_base 42: mod_base = OTHER; note = thymine
  modified_base 44: mod_base = OTHER; note = thymine
  misc_feature 1..52: note = Synthetic
  source 1..52: mol_type = other RNA
gcacatgaggatcacccatgtgctgccatctggagcagtgatctggccagca

SEQ ID NO: 792 - RNA, 52 nt, synthetic construct
  modified_base 24: mod_base = OTHER; note = thymine
  modified_base 29: mod_base = OTHER; note = thymine
  modified_base 31: mod_base = OTHER; note = thymine
  modified_base 39: mod_base = OTHER; note = thymine
  modified_base 42: mod_base = OTHER; note = thymine
  modified_base 44: mod_base = OTHER; note = thymine
  misc_feature 1..52: note = Synthetic
  source 1..52: mol_type = other RNA
gcacatgaggatcacccatgtgctgccatctggagcagtgatctggcgtgca

SEQ ID NO: 793 - RNA, 52 nt, synthetic construct
  modified_base 24: mod_base = OTHER; note = thymine
  modified_base 29: mod_base = OTHER; note = thymine
  modified_base 31: mod_base = OTHER; note = thymine
  modified_base 39: mod_base = OTHER; note = thymine
  modified_base 42: mod_base = OTHER; note = thymine
  modified_base 44: mod_base = OTHER; note = thymine
  misc_feature 1..52: note = Synthetic
  source 1..52: mol_type = other RNA
gcacatgaggatcacccatgtgctgccatctggagcagtgatctgggctgca

SEQ ID NO: 794 - RNA, 52 nt, synthetic construct
  modified_base 24: mod_base = OTHER; note = thymine
  modified_base 29: mod_base = OTHER; note = thymine
  modified_base 31: mod_base = OTHER; note = thymine
  modified_base 39: mod_base = OTHER; note = thymine
  modified_base 42: mod_base = OTHER; note = thymine
  modified_base 44: mod_base = OTHER; note = thymine
  misc_feature 1..52: note = Synthetic
  source 1..52: mol_type = other RNA
gcacatgaggatcacccatgtgctgccatctggagcagtgatctgccctgca

SEQ ID NO: 795 - RNA, 52 nt, synthetic construct
  modified_base 24: mod_base = OTHER; note = thymine
  modified_base 29: mod_base = OTHER; note = thymine
  modified_base 31: mod_base = OTHER; note = thymine
  modified_base 39: mod_base = OTHER; note = thymine
  modified_base 42: mod_base = OTHER; note = thymine
  modified_base 44: mod_base = OTHER; note = thymine
  misc_feature 1..52: note = Synthetic
  source 1..52: mol_type = other RNA
gcacatgaggatcacccatgtgctgccatctggagcagtgatctcgcctgca

SEQ ID NO: 796 - RNA, 52 nt, synthetic construct
  modified_base 24: mod_base = OTHER; note = thymine
  modified_base 29: mod_base = OTHER; note = thymine
  modified_base 31: mod_base = OTHER; note = thymine
  modified_base 39: mod_base = OTHER; note = thymine
  modified_base 42: mod_base = OTHER; note = thymine
  misc_feature 1..52: note = Synthetic
  source 1..52: mol_type = other RNA
gcacatgaggatcacccatgtgctgccatctggagcagtgatcaggcctgca

SEQ ID NO: 797 - RNA, 52 nt, synthetic construct
  modified_base 24: mod_base = OTHER; note = thymine
  modified_base 29: mod_base = OTHER; note = thymine
  modified_base 31: mod_base = OTHER; note = thymine
  modified_base 39: mod_base = OTHER; note = thymine
  modified_base 42: mod_base = OTHER; note = thymine
  modified_base 44: mod_base = OTHER; note = thymine
  misc_feature 1..52: note = Synthetic
  source 1..52: mol_type = other RNA
gcacatgaggatcacccatgtgctgccatctggagcagtgatgtggcctgca

SEQ ID NO: 798 - RNA, 52 nt, synthetic construct
  modified_base 24: mod_base = OTHER; note = thymine
  modified_base 29: mod_base = OTHER; note = thymine
  modified_base 31: mod_base = OTHER; note = thymine
  modified_base 39: mod_base = OTHER; note = thymine
  modified_base 44: mod_base = OTHER; note = thymine
  misc_feature 1..52: note = Synthetic
  source 1..52: mol_type = other RNA
gcacatgaggatcacccatgtgctgccatctggagcagtgaactggcctgca

SEQ ID NO: 799 - RNA, 58 nt, synthetic construct; identical to SEQ ID NO: 483
  misc_feature 1..58: note = Synthetic
  source 1..58: mol_type = other RNA

SEQ ID NO: 800 - RNA, 31 nt, synthetic construct
  modified_base 2: mod_base = OTHER; note = thymine
  modified_base 8: mod_base = OTHER; note = thymine
  modified_base 16: mod_base = OTHER; note = thymine
  modified_base 19: mod_base = OTHER; note = thymine
  misc_feature 1..31: note = Synthetic
  source 1..31: mol_type = other RNA
gtggaaatagacacgtaatcttactggaagt

SEQ ID NO: 801 - RNA, 83 nt, synthetic construct
  modified_base 49: mod_base = OTHER; note = thymine
  modified_base 54: mod_base = OTHER; note = thymine
  modified_base 56: mod_base = OTHER; note = thymine
  modified_base 64: mod_base = OTHER; note = thymine
  modified_base 67: mod_base = OTHER; note = thymine
  misc_feature 1..83: note = Synthetic
  source 1..83: mol_type = other RNA
gcacatgaggatcacccatgtgcatgcacatgaggatcacccatgtgctgccatctggagcagtgatctggcctgcagacatc

SEQ ID NO: 802 - RNA, 59 nt, synthetic construct
  modified_base 2: mod_base = OTHER; note = thymine
  modified_base 7: mod_base = OTHER; note = thymine
  modified_base 9: mod_base = OTHER; note = thymine
  modified_base 17: mod_base = OTHER; note = thymine
  modified_base 20: mod_base = OTHER; note = thymine
  misc_feature 1..59: note = Synthetic
  source 1..59: mol_type = other RNA
gtgccatctggagcagtgatctggcctgcagacatcgcacatgaggatcacccatgtgc

SEQ ID NO: 803 - RNA, 84 nt, synthetic construct
  modified_base 2: mod_base = OTHER; note = thymine
  modified_base 7: mod_base = OTHER; note = thymine
  modified_base 9: mod_base = OTHER; note = thymine
  modified_base 17: mod_base = OTHER; note = thymine
  modified_base 20: mod_base = OTHER; note = thymine
  misc_feature 1..84: note = Synthetic
  source 1..84: mol_type = other RNA
gtgccatctggagcagtgatctggcctgcagacatcgcacatgaggatcacccatgtgcatgcacatgaggatcacccatgtgc

SEQ ID NO: 804 - RNA, 81 nt, synthetic construct
  modified_base 24: mod_base = OTHER; note = thymine
  modified_base 29: mod_base = OTHER; note = thymine
  modified_base 31: mod_base = OTHER; note = thymine
  modified_base 39: mod_base = OTHER; note = thymine
  modified_base 42: mod_base = OTHER; note = thymine
  misc_feature 1..81: note = Synthetic
  source 1..81: mol_type = other RNA
gcacatgaggatcacccatgtgctgccatctggagcagtgatctggcctgcagacatcgcacatgaggatcacccatgtgc

SEQ ID NO: 805 - RNA, 58 nt, synthetic construct; identical to SEQ ID NO: 483
  modified_base 24: mod_base = OTHER; note = thymine
  modified_base 29: mod_base = OTHER; note = thymine
  modified_base 31: mod_base = OTHER; note = thymine
  modified_base 39: mod_base = OTHER; note = thymine
  modified_base 42: mod_base = OTHER; note = thymine
  misc_feature 1..58: note = Synthetic
  source 1..58: mol_type = other RNA

SEQ ID NO: 806 - RNA, 58 nt, synthetic construct; identical to SEQ ID NO: 483
  modified_base 24: mod_base = OTHER; note = thymine
  modified_base 29: mod_base = OTHER; note = thymine
  modified_base 31: mod_base = OTHER; note = thymine
  modified_base 39: mod_base = OTHER; note = thymine
  modified_base 42: mod_base = OTHER; note = thymine
  misc_feature 1..58: note = Synthetic
  source 1..58: mol_type = other RNA

SEQ ID NO: 807 - RNA, 58 nt, synthetic construct; identical to SEQ ID NO: 483
  modified_base 24: mod_base = OTHER; note = thymine
  modified_base 29: mod_base = OTHER; note = thymine
  modified_base 31: mod_base = OTHER; note = thymine
  modified_base 39: mod_base = OTHER; note = thymine
  modified_base 42: mod_base = OTHER; note = thymine
  misc_feature 1..58: note = Synthetic
  source 1..58: mol_type = other RNA

SEQ ID NO: 808 - RNA, 58 nt, synthetic construct; identical to SEQ ID NO: 483
  modified_base 24: mod_base = OTHER; note = thymine
  modified_base 29: mod_base = OTHER; note = thymine
  modified_base 31: mod_base = OTHER; note = thymine
  modified_base 39: mod_base = OTHER; note = thymine
  modified_base 42: mod_base = OTHER; note = thymine
  misc_feature 1..58: note = Synthetic
  source 1..58: mol_type = other RNA

SEQ ID NO: 809 - RNA, 58 nt, synthetic construct
  modified_base 24: mod_base = OTHER; note = thymine
  modified_base 29: mod_base = OTHER; note = thymine
  modified_base 31: mod_base = OTHER; note = thymine
  modified_base 39: mod_base = OTHER; note = thymine
  modified_base 42: mod_base = OTHER; note = thymine
  misc_feature 1..58: note = Synthetic
  source 1..58: mol_type = other RNA
gcacatgaggatcagggtacacgtgccatctggagcagtgatctggcctgcagacatc

SEQ ID NO: 810 - RNA, 58 nt, synthetic construct
  modified_base 24: mod_base = OTHER; note = thymine
  modified_base 29: mod_base = OTHER; note = thymine
  modified_base 31: mod_base = OTHER; note = thymine
  modified_base 39: mod_base = OTHER; note = thymine
  modified_base 42: mod_base = OTHER; note = thymine
  misc_feature 1..58: note = Synthetic
  source 1..58: mol_type = other RNA
cgtgtactccatcacccatgtgctgccatctggagcagtgatctggcctgcagacatc

SEQ ID NO: 811 - RNA, 58 nt, synthetic construct; identical to SEQ ID NO: 483
  modified_base 24: mod_base = OTHER; note = thymine
  modified_base 29: mod_base = OTHER; note = thymine
  modified_base 31: mod_base = OTHER; note = thymine
  modified_base 39: mod_base = OTHER; note = thymine
  modified_base 42: mod_base = OTHER; note = thymine
  misc_feature 1..58: note = Synthetic
  source 1..58: mol_type = other RNA

SEQ ID NO: 812 - RNA, 58 nt, synthetic construct; identical to SEQ ID NO: 483
  modified_base 24: mod_base = OTHER; note = thymine
  modified_base 29: mod_base = OTHER; note = thymine
  modified_base 31: mod_base = OTHER; note = thymine
  modified_base 39: mod_base = OTHER; note = thymine
  modified_base 42: mod_base = OTHER; note = thymine
  misc_feature 1..58: note = Synthetic
  source 1..58: mol_type = other RNA

SEQ ID NO: 813 - RNA, 58 nt, synthetic construct; identical to SEQ ID NO: 483
  modified_base 24: mod_base = OTHER; note = thymine
  modified_base 29: mod_base = OTHER; note = thymine
  modified_base 31: mod_base = OTHER; note = thymine
  modified_base 39: mod_base = OTHER; note = thymine
  modified_base 42: mod_base = OTHER; note = thymine
  misc_feature 1..58: note = Synthetic
  source 1..58: mol_type = other RNA

SEQ ID NO: 814 - RNA, 58 nt, synthetic construct; identical to SEQ ID NO: 483
  modified_base 24: mod_base = OTHER; note = thymine
  modified_base 29: mod_base = OTHER; note = thymine
  modified_base 31: mod_base = OTHER; note = thymine
  modified_base 39: mod_base = OTHER; note = thymine
  modified_base 42: mod_base = OTHER; note = thymine
  misc_feature 1..58: note = Synthetic
  source 1..58: mol_type = other RNA

SEQ ID NO: 815 - RNA, 32 nt, synthetic construct
  modified_base 3: mod_base = OTHER; note = thymine
  modified_base 9: mod_base = OTHER; note = thymine
  modified_base 17: mod_base = OTHER; note = thymine
  modified_base 20: mod_base = OTHER; note = thymine
  misc_feature 1..32: note = Synthetic
  source 1..32: mol_type = other RNA
agtggaaatagacacgtaatcttactggaagt

SEQ ID NO: 816 - RNA, 60 nt, synthetic construct
  modified_base 24: mod_base = OTHER; note = thymine
  modified_base 29: mod_base = OTHER; note = thymine
  modified_base 31: mod_base = OTHER; note = thymine
  modified_base 39: mod_base = OTHER; note = thymine
  modified_base 42: mod_base = OTHER; note = thymine
  misc_feature 1..60: note = Synthetic
  source 1..60: mol_type = other RNA
gcacatgaggatcacccatgtgctgccatctggagcagtgatctggcctgcagacatcta

SEQ ID NO: 817 - RNA, 61 nt, synthetic construct
  modified_base 24: mod_base = OTHER; note = thymine
  modified_base 29: mod_base = OTHER; note = thymine
  modified_base 31: mod_base = OTHER; note = thymine
  modified_base 39: mod_base = OTHER; note = thymine
  modified_base 42: mod_base = OTHER; note = thymine
  misc_feature 1..61: note = Synthetic
  source 1..61: mol_type = other RNA
gcacatgaggatcacccatgtgctgccatctggagcagtgatctggcctgcagacatctag

SEQ ID NO: 818 - RNA, 58 nt, synthetic construct; identical to SEQ ID NO: 483
  modified_base 24: mod_base = OTHER; note = thymine
  modified_base 29: mod_base = OTHER; note = thymine
  modified_base 31: mod_base = OTHER; note = thymine
  modified_base 39: mod_base = OTHER; note = thymine
  modified_base 42: mod_base = OTHER; note = thymine
  misc_feature 1..58: note = Synthetic
  source 1..58: mol_type = other RNA

SEQ ID NO: 819 - RNA, 58 nt, synthetic construct; identical to SEQ ID NO: 483
  modified_base 24: mod_base = OTHER; note = thymine
  modified_base 29: mod_base = OTHER; note = thymine
  modified_base 31: mod_base = OTHER; note = thymine
  modified_base 39: mod_base = OTHER; note = thymine
  modified_base 42: mod_base = OTHER; note = thymine
  misc_feature 1..58: note = Synthetic
  source 1..58: mol_type = other RNA

SEQ ID NO: 820 - RNA, 58 nt, synthetic construct; identical to SEQ ID NO: 483
  modified_base 24: mod_base = OTHER; note = thymine
  modified_base 29: mod_base = OTHER; note = thymine
  modified_base 31: mod_base = OTHER; note = thymine
  modified_base 39: mod_base = OTHER; note = thymine
  modified_base 42: mod_base = OTHER; note = thymine
  misc_feature 1..58: note = Synthetic
  source 1..58: mol_type = other RNA

SEQ ID NO: 821 - RNA, 58 nt, synthetic construct; identical to SEQ ID NO: 483
  modified_base 24: mod_base = OTHER; note = thymine
  modified_base 29: mod_base = OTHER; note = thymine
  modified_base 31: mod_base = OTHER; note = thymine
  modified_base 39: mod_base = OTHER; note = thymine
  modified_base 42: mod_base = OTHER; note = thymine
  misc_feature 1..58: note = Synthetic
  source 1..58: mol_type = other RNA

SEQ ID NO: 822 - RNA, 58 nt, synthetic construct; identical to SEQ ID NO: 483
  modified_base 24: mod_base = OTHER; note = thymine
  modified_base 29: mod_base = OTHER; note = thymine
  modified_base 31: mod_base = OTHER; note = thymine
  modified_base 39: mod_base = OTHER; note = thymine
  modified_base 42: mod_base = OTHER; note = thymine
  misc_feature 1..58: note = Synthetic
  source 1..58: mol_type = other RNA

SEQ ID NO: 823 - RNA, 58 nt, synthetic construct; identical to SEQ ID NO: 483
  modified_base 24: mod_base = OTHER; note = thymine
  modified_base 29: mod_base = OTHER; note = thymine
  modified_base 31: mod_base = OTHER; note = thymine
  modified_base 39: mod_base = OTHER; note = thymine
  modified_base 42: mod_base = OTHER; note = thymine
  misc_feature 1..58: note = Synthetic
  source 1..58: mol_type = other RNA

SEQ ID NO: 824 - RNA, 58 nt, synthetic construct; identical to SEQ ID NO: 483
  modified_base 24: mod_base = OTHER; note = thymine
  modified_base 29: mod_base = OTHER; note = thymine
  modified_base 31: mod_base = OTHER; note = thymine
  modified_base 39: mod_base = OTHER; note = thymine
  modified_base 42: mod_base = OTHER; note = thymine
  misc_feature 1..58: note = Synthetic
  source 1..58: mol_type = other RNA

SEQ ID NO: 825 - RNA, 58 nt, synthetic construct; identical to SEQ ID NO: 483
  modified_base 24: mod_base = OTHER; note = thymine
  modified_base 29: mod_base = OTHER; note = thymine
  modified_base 31: mod_base = OTHER; note = thymine
  modified_base 39: mod_base = OTHER; note = thymine
  modified_base 42: mod_base = OTHER; note = thymine
  misc_feature 1..58: note = Synthetic
  source 1..58: mol_type = other RNA

SEQ ID NO: 826 - RNA, 58 nt, synthetic construct; identical to SEQ ID NO: 483
  modified_base 24: mod_base = OTHER; note = thymine
  modified_base 29: mod_base = OTHER; note = thymine
  modified_base 31: mod_base = OTHER; note = thymine
  modified_base 39: mod_base = OTHER; note = thymine
  modified_base 42: mod_base = OTHER; note = thymine
  misc_feature 1..58: note = Synthetic
  source 1..58: mol_type = other RNA

SEQ ID NO: 827 - RNA, 58 nt, synthetic construct; identical to SEQ ID NO: 483
  modified_base 24: mod_base = OTHER; note = thymine
  modified_base 29: mod_base = OTHER; note = thymine
  modified_base 31: mod_base = OTHER; note = thymine
  modified_base 39: mod_base = OTHER; note = thymine
  modified_base 42: mod_base = OTHER; note = thymine
  misc_feature 1..58: note = Synthetic
  source 1..58: mol_type = other RNA

SEQ ID NO: 828 - RNA, 58 nt, synthetic construct; identical to SEQ ID NO: 483
  modified_base 24: mod_base = OTHER; note = thymine
  modified_base 29: mod_base = OTHER; note = thymine
  modified_base 31: mod_base = OTHER; note = thymine
  modified_base 39: mod_base = OTHER; note = thymine
  modified_base 42: mod_base = OTHER; note = thymine
  misc_feature 1..58: note = Synthetic
  source 1..58: mol_type = other RNA

SEQ ID NO: 829 - RNA, 58 nt, synthetic construct; identical to SEQ ID NO: 483
  modified_base 24: mod_base = OTHER; note = thymine
  modified_base 29: mod_base = OTHER; note = thymine
  modified_base 31: mod_base = OTHER; note = thymine
  modified_base 39: mod_base = OTHER; note = thymine
  modified_base 42: mod_base = OTHER; note = thymine
  misc_feature 1..58: note = Synthetic
  source 1..58: mol_type = other RNA

SEQ ID NO: 830 - RNA, 58 nt, synthetic construct; identical to SEQ ID NO: 483
  modified_base 24: mod_base = OTHER; note = thymine
  modified_base 29: mod_base = OTHER; note = thymine
  modified_base 31: mod_base = OTHER; note = thymine
  modified_base 39: mod_base = OTHER; note = thymine
  modified_base 42: mod_base = OTHER; note = thymine
  misc_feature 1..58: note = Synthetic
  source 1..58: mol_type = other RNA

SEQ ID NO: 831 - RNA, 58 nt, synthetic construct; identical to SEQ ID NO: 483
  modified_base 24: mod_base = OTHER; note = thymine
  modified_base 29: mod_base = OTHER; note = thymine
  modified_base 31: mod_base = OTHER; note = thymine
  modified_base 39: mod_base = OTHER; note = thymine
  modified_base 42: mod_base = OTHER; note = thymine
  misc_feature 1..58: note = Synthetic
  source 1..58: mol_type = other RNA

SEQ ID NO: 832 - RNA, 58 nt, synthetic construct; identical to SEQ ID NO: 483
  modified_base 24: mod_base = OTHER; note = thymine
  modified_base 29: mod_base = OTHER; note = thymine
  modified_base 31: mod_base = OTHER; note = thymine
  modified_base 39: mod_base = OTHER; note = thymine
  modified_base 42: mod_base = OTHER; note = thymine
  misc_feature 1..58: note = Synthetic
  source 1..58: mol_type = other RNA

SEQ ID NO: 833 - RNA, 58 nt, synthetic construct; identical to SEQ ID NO: 483
  modified_base 24: mod_base = OTHER; note = thymine
  modified_base 29: mod_base = OTHER; note = thymine
  modified_base 31: mod_base = OTHER; note = thymine
  modified_base 39: mod_base = OTHER; note = thymine
  modified_base 42: mod_base = OTHER; note = thymine
  misc_feature 1..58: note = Synthetic
  source 1..58: mol_type = other RNA

SEQ ID NO: 834 - RNA, 58 nt, synthetic construct; identical to SEQ ID NO: 483
  modified_base 24: mod_base = OTHER; note = thymine
  modified_base 29: mod_base = OTHER; note = thymine
  modified_base 31: mod_base = OTHER; note = thymine
  modified_base 39: mod_base = OTHER; note = thymine
  modified_base 42: mod_base = OTHER; note = thymine
  misc_feature 1..58: note = Synthetic
  source 1..58: mol_type = other RNA

SEQ ID NO: 835 - RNA, 58 nt, synthetic construct; identical to SEQ ID NO: 483
  modified_base 24: mod_base = OTHER; note = thymine
  modified_base 29: mod_base = OTHER; note = thymine
  modified_base 31: mod_base = OTHER; note = thymine
  modified_base 39: mod_base = OTHER; note = thymine
  modified_base 42: mod_base = OTHER; note = thymine
  misc_feature 1..58: note = Synthetic
  source 1..58: mol_type = other RNA

SEQ ID NO: 836 - RNA, 58 nt, synthetic construct; identical to SEQ ID NO: 483
  modified_base 24: mod_base = OTHER; note = thymine
  modified_base 29: mod_base = OTHER; note = thymine
  modified_base 31: mod_base = OTHER; note = thymine
  modified_base 39: mod_base = OTHER; note = thymine
  modified_base 42: mod_base = OTHER; note = thymine
  misc_feature 1..58: note = Synthetic
  source 1..58: mol_type = other RNA

SEQ ID NO: 837 - RNA, 58 nt, synthetic construct; identical to SEQ ID NO: 483
  modified_base 24: mod_base = OTHER; note = thymine
  modified_base 29: mod_base = OTHER; note = thymine
  modified_base 31: mod_base = OTHER; note = thymine
  modified_base 39: mod_base = OTHER; note = thymine
  modified_base 42: mod_base = OTHER; note = thymine
  misc_feature 1..58: note = Synthetic
  source 1..58: mol_type = other RNA

SEQ ID NO: 838 - RNA, 30 nt, synthetic construct
  modified_base 5: mod_base = OTHER; note = thymine
  modified_base 13: mod_base = OTHER; note = thymine
  modified_base 16: mod_base = OTHER; note = thymine
  misc_feature 1..30: note = Synthetic
  source 1..30: mol_type = other RNA
gaaatagacacgtaatcttactggaagttt

SEQ ID NO: 839 - RNA, 30 nt, synthetic construct; identical to SEQ ID NO: 838
  modified_base 5: mod_base = OTHER; note = thymine
  modified_base 13: mod_base = OTHER; note = thymine
  modified_base 16: mod_base = OTHER; note = thymine
  misc_feature 1..30: note = Synthetic
  source 1..30: mol_type = other RNA

SEQ ID NO: 840 - RNA, 58 nt, synthetic construct; identical to SEQ ID NO: 483
  modified_base 24: mod_base = OTHER; note = thymine
  modified_base 29: mod_base = OTHER; note = thymine
  modified_base 31: mod_base = OTHER; note = thymine
  modified_base 39: mod_base = OTHER; note = thymine
  modified_base 42: mod_base = OTHER; note = thymine
  misc_feature 1..58: note = Synthetic
  source 1..58: mol_type = other RNA

SEQ ID NO: 841 - RNA, 30 nt, synthetic construct; identical to SEQ ID NO: 838
  modified_base 5: mod_base = OTHER; note = thymine
  modified_base 13: mod_base = OTHER; note = thymine
  modified_base 16: mod_base = OTHER; note = thymine
  misc_feature 1..30: note = Synthetic
  source 1..30: mol_type = other RNA

SEQ ID NO: 842 - RNA, 58 nt, synthetic construct; identical to SEQ ID NO: 483
  modified_base 24: mod_base = OTHER; note = thymine
  modified_base 29: mod_base = OTHER; note = thymine
  modified_base 31: mod_base = OTHER; note = thymine
  modified_base 39: mod_base = OTHER; note = thymine
  modified_base 42: mod_base = OTHER; note = thymine
  misc_feature 1..58: note = Synthetic
  source 1..58: mol_type = other RNA

SEQ ID NO: 843 - RNA, 58 nt, synthetic construct; identical to SEQ ID NO: 483
  modified_base 24: mod_base = OTHER; note = thymine
  modified_base 29: mod_base = OTHER; note = thymine
  modified_base 31: mod_base = OTHER; note = thymine
  modified_base 39: mod_base = OTHER; note = thymine
  modified_base 42: mod_base = OTHER; note = thymine
  misc_feature 1..58: note = Synthetic
  source 1..58: mol_type = other RNA

SEQ ID NO: 844 - RNA, 58 nt, synthetic construct; identical to SEQ ID NO: 483
  modified_base 24: mod_base = OTHER; note = thymine
  modified_base 29: mod_base = OTHER; note = thymine
  modified_base 31: mod_base = OTHER; note = thymine
  modified_base 39: mod_base = OTHER; note = thymine
  modified_base 42: mod_base = OTHER; note = thymine
  misc_feature 1..58: note = Synthetic
  source 1..58: mol_type = other RNA

SEQ ID NO: 845-847 - skipped (3 entries)

SEQ ID NO: 848 - RNA, 58 nt, synthetic construct; identical to SEQ ID NO: 483
  modified_base 24: mod_base = OTHER; note = thymine
  modified_base 29: mod_base = OTHER; note = thymine
  modified_base 31: mod_base = OTHER; note = thymine
  modified_base 39: mod_base = OTHER; note = thymine
  modified_base 42: mod_base = OTHER; note = thymine
  misc_feature 1..58: note = Synthetic
  source 1..58: mol_type = other RNA

SEQ ID NO: 849 - RNA, 58 nt, synthetic construct; identical to SEQ ID NO: 483
  modified_base 24: mod_base = OTHER; note = thymine
  modified_base 29: mod_base = OTHER; note = thymine
  modified_base 31: mod_base = OTHER; note = thymine
  modified_base 39: mod_base = OTHER; note = thymine
  modified_base 42: mod_base = OTHER; note = thymine
  misc_feature 1..58: note = Synthetic
  source 1..58: mol_type = other RNA

SEQ ID NO: 850 - RNA, 58 nt, synthetic construct; identical to SEQ ID NO: 483
  modified_base 24: mod_base = OTHER; note = thymine
  modified_base 29: mod_base = OTHER; note = thymine
  modified_base 31: mod_base = OTHER; note = thymine
  modified_base 39: mod_base = OTHER; note = thymine
  misc_feature 1..58: note = Synthetic
  source 1..58: mol_type = other RNA

SEQ ID NO: 851 - RNA, 58 nt, synthetic construct; identical to SEQ ID NO: 483
  modified_base 24: mod_base = OTHER; note = thymine
  modified_base 29: mod_base = OTHER; note = thymine
  modified_base 31: mod_base = OTHER; note = thymine
  modified_base 39: mod_base = OTHER; note = thymine
  modified_base 42: mod_base = OTHER; note = thymine
  misc_feature 1..58: note = Synthetic
  source 1..58: mol_type = other RNA

SEQ ID NO: 852 - RNA, 58 nt, synthetic construct; identical to SEQ ID NO: 483
  modified_base 24: mod_base = OTHER; note = thymine
  modified_base 29: mod_base = OTHER; note = thymine
  modified_base 31: mod_base = OTHER; note = thymine
  modified_base 39: mod_base = OTHER; note = thymine
  modified_base 42: mod_base = OTHER; note = thymine
  misc_feature 1..58: note = Synthetic
  source 1..58: mol_type = other RNA

SEQ ID NO: 853 - RNA, 58 nt, synthetic construct; identical to SEQ ID NO: 483
  modified_base 24: mod_base = OTHER; note = thymine
  modified_base 29: mod_base = OTHER; note = thymine
  modified_base 31: mod_base = OTHER; note = thymine
  modified_base 39: mod_base = OTHER; note = thymine
  modified_base 42: mod_base = OTHER; note = thymine
  misc_feature 1..58: note = Synthetic
  source 1..58: mol_type = other RNA

SEQ ID NO: 854 - RNA, 58 nt, synthetic construct; identical to SEQ ID NO: 483
  modified_base 24: mod_base = OTHER; note = thymine
  modified_base 29: mod_base = OTHER; note = thymine
  modified_base 31: mod_base = OTHER; note = thymine
  modified_base 39: mod_base = OTHER; note = thymine
  modified_base 42: mod_base = OTHER; note = thymine
  misc_feature 1..58: note = Synthetic
  source 1..58: mol_type = other RNA

SEQ ID NO: 855 - RNA, 58 nt, synthetic construct; identical to SEQ ID NO: 483
  modified_base 24: mod_base = OTHER; note = thymine
  modified_base 29: mod_base = OTHER; note = thymine
  modified_base 31: mod_base = OTHER; note = thymine
  modified_base 39: mod_base = OTHER; note = thymine
  modified_base 42: mod_base = OTHER; note = thymine
  misc_feature 1..58: note = Synthetic
  source 1..58: mol_type = other RNA

SEQ ID NO: 856 - RNA, 58 nt, synthetic construct; identical to SEQ ID NO: 483
  modified_base 24: mod_base = OTHER; note = thymine
  modified_base 29: mod_base = OTHER; note = thymine
  modified_base 31: mod_base = OTHER; note = thymine
  modified_base 39: mod_base = OTHER; note = thymine
  modified_base 42: mod_base = OTHER; note = thymine
  misc_feature 1..58: note = Synthetic
  source 1..58: mol_type = other RNA

SEQ ID NO: 857 - RNA, 58 nt, synthetic construct; identical to SEQ ID NO: 483
  modified_base 24: mod_base = OTHER; note = thymine
  modified_base 29: mod_base = OTHER; note = thymine
  modified_base 31: mod_base = OTHER; note = thymine
  modified_base 39: mod_base = OTHER; note = thymine
  modified_base 42: mod_base = OTHER; note = thymine
  misc_feature 1..58: note = Synthetic
  source 1..58: mol_type = other RNA

SEQ ID NO: 858 - RNA, 58 nt, synthetic construct; identical to SEQ ID NO: 483
  modified_base 24: mod_base = OTHER; note = thymine
  modified_base 29: mod_base = OTHER; note = thymine
  modified_base 31: mod_base = OTHER; note = thymine
  modified_base 39: mod_base = OTHER; note = thymine
  modified_base 42: mod_base = OTHER; note = thymine
  misc_feature 1..58: note = Synthetic
  source 1..58: mol_type = other RNA

SEQ ID NO: 859 - RNA, 58 nt, synthetic construct; identical to SEQ ID NO: 483
  modified_base 24: mod_base = OTHER; note = thymine
  modified_base 29: mod_base = OTHER; note = thymine
  modified_base 31: mod_base = OTHER; note = thymine
  modified_base 39: mod_base = OTHER; note = thymine
  modified_base 42: mod_base = OTHER; note = thymine
  misc_feature 1..58: note = Synthetic
  source 1..58: mol_type = other RNA

SEQ ID NO: 860 - RNA, 58 nt, synthetic construct; identical to SEQ ID NO: 483
  modified_base 24: mod_base = OTHER; note = thymine
  modified_base 29: mod_base = OTHER; note = thymine
  modified_base 31: mod_base = OTHER; note = thymine
  modified_base 39: mod_base = OTHER; note = thymine
  modified_base 42: mod_base = OTHER; note = thymine
  misc_feature 1..58: note = Synthetic
  source 1..58: mol_type = other RNA

SEQ ID NO: 861 - RNA, 58 nt, synthetic construct; identical to SEQ ID NO: 483
  modified_base 24: mod_base = OTHER; note = thymine
  modified_base 29: mod_base = OTHER; note = thymine
  modified_base 31: mod_base = OTHER; note = thymine
  modified_base 39: mod_base = OTHER; note = thymine
  modified_base 42: mod_base = OTHER; note = thymine
  misc_feature 1..58: note = Synthetic
  source 1..58: mol_type = other RNA

SEQ ID NO: 862 - RNA, 58 nt, synthetic construct; identical to SEQ ID NO: 483
  modified_base 24: mod_base = OTHER; note = thymine
  modified_base 29: mod_base = OTHER; note = thymine
  modified_base 31: mod_base = OTHER; note = thymine
  modified_base 39: mod_base = OTHER; note = thymine
  modified_base 42: mod_base = OTHER; note = thymine
  misc_feature 1..58: note = Synthetic
  source 1..58: mol_type = other RNA

SEQ ID NO: 863 - RNA, 58 nt, synthetic construct; identical to SEQ ID NO: 483
  modified_base 24: mod_base = OTHER; note = thymine
  modified_base 29: mod_base = OTHER; note = thymine
  modified_base 31: mod_base = OTHER; note = thymine
  modified_base 39: mod_base = OTHER; note = thymine
  modified_base 42: mod_base = OTHER; note = thymine
  misc_feature 1..58: note = Synthetic
  source 1..58: mol_type = other RNA

SEQ ID NO: 864 - RNA, 58 nt, synthetic construct; identical to SEQ ID NO: 483
  modified_base 24: mod_base = OTHER; note = thymine
  modified_base 29: mod_base = OTHER; note = thymine
  modified_base 31: mod_base = OTHER; note = thymine
  modified_base 39: mod_base = OTHER; note = thymine
  modified_base 42: mod_base = OTHER; note = thymine
  misc_feature 1..58: note = Synthetic
  source 1..58: mol_type = other RNA

SEQ ID NO: 865 - RNA, 58 nt, synthetic construct; identical to SEQ ID NO: 483
  modified_base 24: mod_base = OTHER; note = thymine
  modified_base 29: mod_base = OTHER; note = thymine
  modified_base 31: mod_base = OTHER; note = thymine
  modified_base 39: mod_base = OTHER; note = thymine
  modified_base 42: mod_base = OTHER; note = thymine
  misc_feature 1..58: note = Synthetic
  source 1..58: mol_type = other RNA

SEQ ID NO: 866 - RNA, 58 nt, synthetic construct; identical to SEQ ID NO: 483
  modified_base 24: mod_base = OTHER; note = thymine
  modified_base 29: mod_base = OTHER; note = thymine
  modified_base 31: mod_base = OTHER; note = thymine
  misc_feature 1..58: note = Synthetic
  source 1..58: mol_type = other RNA

SEQ ID NO: 867 - RNA, 58 nt, synthetic construct; identical to SEQ ID NO: 483
  modified_base 24: mod_base = OTHER; note = thymine
  modified_base 29: mod_base = OTHER; note = thymine
  modified_base 31: mod_base = OTHER; note = thymine
  modified_base 39: mod_base = OTHER; note = thymine
  misc_feature 1..58: note = Synthetic
  source 1..58: mol_type = other RNA

SEQ ID NO: 868 - RNA, 58 nt, synthetic construct; identical to SEQ ID NO: 483
  modified_base 24: mod_base = OTHER; note = thymine
  modified_base 29: mod_base = OTHER; note = thymine
  modified_base 31: mod_base = OTHER; note = thymine
  modified_base 39: mod_base = OTHER; note = thymine
  misc_feature 1..58: note = Synthetic
  source 1..58: mol_type = other RNA

SEQ ID NO: 869 - RNA, 58 nt, synthetic construct; identical to SEQ ID NO: 483
  modified_base 24: mod_base = OTHER; note = thymine
  modified_base 29: mod_base = OTHER; note = thymine
  modified_base 31: mod_base = OTHER; note = thymine
  modified_base 39: mod_base = OTHER; note = thymine
  misc_feature 1..58: note = Synthetic
  source 1..58: mol_type = other RNA

SEQ ID NO: 870 - skipped

SEQ ID NO: 871 - RNA, 58 nt, synthetic construct; identical to SEQ ID NO: 483
  modified_base 24: mod_base = OTHER; note = thymine
  modified_base 29: mod_base = OTHER; note = thymine
  modified_base 31: mod_base = OTHER; note = thymine
  modified_base 39: mod_base = OTHER; note = thymine
  modified_base 42: mod_base = OTHER; note = thymine
  misc_feature 1..58: note = Synthetic
  source 1..58: mol_type = other RNA

SEQ ID NO: 872 - RNA, 58 nt, synthetic construct; identical to SEQ ID NO: 483
  modified_base 24: mod_base = OTHER; note = thymine
  modified_base 29: mod_base = OTHER; note = thymine
  modified_base 31: mod_base = OTHER; note = thymine
  modified_base 39: mod_base = OTHER; note = thymine
  modified_base 42: mod_base = OTHER; note = thymine
  modified_base 44: mod_base = OTHER; note = thymine
  misc_feature 1..58: note = Synthetic
  source 1..58: mol_type = other RNA

SEQ ID NO: 873 - RNA, 58 nt, synthetic construct; identical to SEQ ID NO: 483
  modified_base 24: mod_base = OTHER; note = thymine
  modified_base 29: mod_base = OTHER; note = thymine
  modified_base 31: mod_base = OTHER; note = thymine
  modified_base 39: mod_base = OTHER; note = thymine
  modified_base 42: mod_base = OTHER; note = thymine
  modified_base 44: mod_base = OTHER; note = thymine
  misc_feature 1..58: note = Synthetic
  source 1..58: mol_type = other RNA

SEQ ID NO: 874 - RNA, 58 nt, synthetic construct; identical to SEQ ID NO: 483
  modified_base 24: mod_base = OTHER; note = thymine
  modified_base 29: mod_base = OTHER; note = thymine
  modified_base 31: mod_base = OTHER; note = thymine
  modified_base 39: mod_base = OTHER; note = thymine
  modified_base 42: mod_base = OTHER; note = thymine
  modified_base 44: mod_base = OTHER; note = thymine
  misc_feature 1..58: note = Synthetic
  source 1..58: mol_type = other RNA

SEQ ID NO: 875 - RNA, 60 nt, synthetic construct
  modified_base 24: mod_base = OTHER; note = thymine
  modified_base 26: mod_base = OTHER; note = thymine
  modified_base 31: mod_base = OTHER; note = thymine
  modified_base 33: mod_base = OTHER; note = thymine
  modified_base 41: mod_base = OTHER; note = thymine
  modified_base 44: mod_base = OTHER; note = thymine
  misc_feature 1..60: note = Synthetic
  source 1..60: mol_type = other RNA
gcacatgaggatcacccatgtgctgtgccatctggagcagtgatctggcctgcagacatc

SEQ ID NO: 876 - RNA, 65 nt, synthetic construct
  modified_base 29: mod_base = OTHER; note = thymine
  modified_base 31: mod_base = OTHER; note = thymine
  modified_base 36: mod_base = OTHER; note = thymine
  modified_base 38: mod_base = OTHER; note = thymine
  modified_base 46: mod_base = OTHER; note = thymine
  modified_base 49: mod_base = OTHER; note = thymine
  misc_feature 1..65: note = Synthetic
  source 1..65: mol_type = other RNA
gcacatgaggatcacccatgtgcgacaatgtgccatctggagcagtgatctggcctgcagacatc

SEQ ID NO: 877 - RNA, 70 nt, synthetic construct
  modified_base 26: mod_base = OTHER; note = thymine
  modified_base 28: mod_base = OTHER; note = thymine
  modified_base 34: mod_base = OTHER; note = thymine
  modified_base 36: mod_base = OTHER; note = thymine
  modified_base 41: mod_base = OTHER; note = thymine
  modified_base 43: mod_base = OTHER; note = thymine
  modified_base 51: mod_base = OTHER; note = thymine
  modified_base 54: mod_base = OTHER; note = thymine
  misc_feature 1..70: note = Synthetic
  source 1..70: mol_type = other RNA
gcacatgaggatcacccatgtgccctctgacaatgtgccatctggagcagtgatctggcctgcagacatc

SEQ ID NO: 878 - RNA, 75 nt, synthetic construct
  modified_base 25: mod_base = OTHER; note = thymine
  modified_base 27: mod_base = OTHER; note = thymine
  modified_base 31: mod_base = OTHER; note = thymine
  modified_base 33: mod_base = OTHER; note = thymine
  modified_base 39: mod_base = OTHER; note = thymine
  modified_base 41: mod_base = OTHER; note = thymine
  modified_base 46: mod_base = OTHER; note = thymine
  modified_base 48: mod_base = OTHER; note = thymine
  modified_base 56: mod_base = OTHER; note = thymine
  modified_base 59: mod_base = OTHER; note = thymine
  misc_feature 1..75: note = Synthetic
  source 1..75: mol_type = other RNA
gcacatgaggatcacccatgtgcgtgtccctctgacaatgtgccatctggagcagtgatctggcctgcagacatc

SEQ ID NO: 879 - RNA, 60 nt, synthetic construct
  modified_base 24: mod_base = OTHER; note = thymine
  modified_base 29: mod_base = OTHER; note = thymine
  modified_base 31: mod_base = OTHER; note = thymine
  modified_base 39: mod_base = OTHER; note = thymine
  modified_base 42: mod_base = OTHER; note = thymine
  misc_feature 1..60: note = Synthetic
  source 1..60: mol_type = other RNA
gcacatgaggatcacccatgtgctgccatctggagcagtgatctggcctgcagacatcaa

SEQ ID NO: 880 - RNA, 56 nt, synthetic construct
  modified_base 24: mod_base = OTHER; note = thymine
  modified_base 29: mod_base = OTHER; note = thymine
  modified_base 31: mod_base = OTHER; note = thymine
  modified_base 39: mod_base = OTHER; note = thymine
  modified_base 42: mod_base = OTHER; note = thymine
  misc_feature 1..56: note = Synthetic
  source 1..56: mol_type = other RNA
gcacatgaggatcacccatgtgctgccatctggagcagtgatctggcctgcagaca

SEQ ID NO: 881 - RNA, 54 nt, synthetic construct
  modified_base 24: mod_base = OTHER; note = thymine
  modified_base 29: mod_base = OTHER; note = thymine
  modified_base 31: mod_base = OTHER; note = thymine
  modified_base 39: mod_base = OTHER; note = thymine
  modified_base 42: mod_base = OTHER; note = thymine
  misc_feature 1..54: note = Synthetic
  source 1..54: mol_type = other RNA
gcacatgaggatcacccatgtgctgccatctggagcagtgatctggcctgcaga

SEQ ID NO: 882 - RNA, 52 nt, synthetic construct; identical to SEQ ID NO: 688
  modified_base 24: mod_base = OTHER; note = thymine
  modified_base 29: mod_base = OTHER; note = thymine
  modified_base 31: mod_base = OTHER; note = thymine
  modified_base 39: mod_base = OTHER; note = thymine
  modified_base 42: mod_base = OTHER; note = thymine
  misc_feature 1..52: note = Synthetic
  source 1..52: mol_type = other RNA

SEQ ID NO: 883 - RNA, 58 nt, synthetic construct; identical to SEQ ID NO: 483
  modified_base 24: mod_base = OTHER; note = thymine
  modified_base 29: mod_base = OTHER; note = thymine
  modified_base 31: mod_base = OTHER; note = thymine
  modified_base 42: mod_base = OTHER; note = thymine
  misc_feature 1..58: note = Synthetic
  source 1..58: mol_type = other RNA

SEQ ID NO: 884 - RNA, 59 nt, synthetic construct
  modified_base 24: mod_base = OTHER; note = thymine
  modified_base 29: mod_base = OTHER; note = thymine
  modified_base 31: mod_base = OTHER; note = thymine
  modified_base 39: mod_base = OTHER; note = thymine
  modified_base 43: mod_base = OTHER; note = thymine
  misc_feature 1..59: note = Synthetic
  source 1..59: mol_type = other RNA
gcacatgaggatcacccatgtgctgccatctggagcagtgattctggcctgcagacatc

SEQ ID NO: 885 - RNA, 59 nt, synthetic construct
  modified_base 24: mod_base = OTHER; note = thymine
  modified_base 29: mod_base = OTHER; note = thymine
  modified_base 31: mod_base = OTHER; note = thymine
  modified_base 39: mod_base = OTHER; note = thymine
  modified_base 42: mod_base = OTHER; note = thymine
  misc_feature 1..59: note = Synthetic
  source 1..59: mol_type = other RNA
gcacatgaggatcacccatgtgctgccatctggagcagtgatctggcctgcagacatct

SEQ ID NO: 886 - RNA, 60 nt, synthetic construct
  modified_base 24: mod_base = OTHER; note = thymine
  modified_base 29: mod_base = OTHER; note = thymine
  modified_base 31: mod_base = OTHER; note = thymine
  modified_base 39: mod_base = OTHER; note = thymine
  modified_base 43: mod_base = OTHER; note = thymine
  misc_feature 1..60: note = Synthetic
  source 1..60: mol_type = other RNA
gcacatgaggatcacccatgtgctgccatctggagcagtgattctggcctgcagacatct

SEQ ID NO: 887 - RNA, 109 nt, synthetic construct; identical to SEQ ID NO: 537
  modified_base 79: mod_base = OTHER; note = thymine
  modified_base 84: mod_base = OTHER; note = thymine
  modified_base 86: mod_base = OTHER; note = thymine
  modified_base 94: mod_base = OTHER; note = thymine
  modified_base 97: mod_base = OTHER; note = thymine
  misc_feature 1..109: note = Synthetic
  source 1..109: mol_type = other RNA

SEQ ID NO: 888 - RNA, 109 nt, synthetic construct; identical to SEQ ID NO: 537
  modified_base 79: mod_base = OTHER; note = thymine
  modified_base 84: mod_base = OTHER; note = thymine
  modified_base 86: mod_base = OTHER; note = thymine
  modified_base 94: mod_base = OTHER; note = thymine
  modified_base 97: mod_base = OTHER; note = thymine
  modified_base 99: mod_base = OTHER; note = thymine
  misc_feature 1..109: note = Synthetic
  source 1..109: mol_type = other RNA

SEQ ID NO: 889 - RNA, 121 nt, synthetic construct
  modified_base 91: mod_base = OTHER; note = thymine
  modified_base 96: mod_base = OTHER; note = thymine
  modified_base 98: mod_base = OTHER; note = thymine
  modified_base 106: mod_base = OTHER; note = thymine
  modified_base 109: mod_base = OTHER; note = thymine
  misc_feature 1..121: note = Synthetic
  source 1..121: mol_type = other RNA
gatgtctgcaggccagatgagttttagagctagaaatagcaagttaaaataaggctagtccgttatcacgaaagggcaccgagtcggtgctgccatctggagcagtgatctggcctgcagt

SEQ ID NO: 890 - RNA, 121 nt, synthetic construct; identical to SEQ ID NO: 889
  modified_base 91: mod_base = OTHER; note = thymine
  modified_base 96: mod_base = OTHER; note = thymine
  modified_base 98: mod_base = OTHER; note = thymine
  modified_base 106: mod_base = OTHER; note = thymine
  modified_base 109: mod_base = OTHER; note = thymine
  modified_base 111: mod_base = OTHER; note = thymine
  misc_feature 1..121: note = Synthetic
  source 1..121: mol_type = other RNA

SEQ ID NO: 891 - RNA, 109 nt, synthetic construct
  modified_base 86: mod_base = OTHER; note = thymine
  modified_base 94: mod_base = OTHER; note = thymine
  modified_base 97: mod_base = OTHER; note = thymine
  misc_feature 1..109: note = Synthetic
  source 1..109: mol_type = other RNA
aagtgacttccagtaagattgttttagagctatagcaagttaaaataaggctagtccgttatcacgggcaccgagtcggtgcaaatagacacgtaatcttactggaagt

SEQ ID NO: 892 - RNA, 109 nt, synthetic construct; identical to SEQ ID NO: 537
  modified_base 79: mod_base = OTHER; note = thymine
  modified_base 84: mod_base = OTHER; note = thymine
  modified_base 86: mod_base = OTHER; note = thymine
  modified_base 94: mod_base = OTHER; note = thymine
  modified_base 97: mod_base = OTHER; note = thymine
  modified_base 99: mod_base = OTHER; note = thymine
  misc_feature 1..109: note = Synthetic
  source 1..109: mol_type = other RNA

SEQ ID NO: 893 - RNA, 109 nt, synthetic construct; identical to SEQ ID NO: 537
  modified_base 79: mod_base = OTHER; note = thymine
  modified_base 84: mod_base = OTHER; note = thymine
  modified_base 86: mod_base = OTHER; note = thymine
  modified_base 94: mod_base = OTHER; note = thymine
  modified_base 97: mod_base = OTHER; note = thymine
  modified_base 99: mod_base = OTHER; note = thymine
  misc_feature 1..109: note = Synthetic
  source 1..109: mol_type = other RNA

SEQ ID NO: 894 - RNA, 109 nt, synthetic construct; identical to SEQ ID NO: 537
  modified_base 79: mod_base = OTHER; note = thymine
  modified_base 84: mod_base = OTHER; note = thymine
  modified_base 86: mod_base = OTHER; note = thymine
  modified_base 94: mod_base = OTHER; note = thymine
  modified_base 97: mod_base = OTHER; note = thymine
  modified_base 99: mod_base = OTHER; note = thymine
  misc_feature 1..109: note = Synthetic
  source 1..109: mol_type = other RNA

SEQ ID NO: 895 - RNA, 109 nt, synthetic construct; identical to SEQ ID NO: 537
  modified_base 79: mod_base = OTHER; note = thymine
  modified_base 84: mod_base = OTHER; note = thymine
  modified_base 86: mod_base = OTHER; note = thymine
  modified_base 94: mod_base = OTHER; note = thymine
  modified_base 97: mod_base = OTHER; note = thymine
  modified_base 99: mod_base = OTHER; note = thymine
  misc_feature 1..109: note = Synthetic
  source 1..109: mol_type = other RNA

SEQ ID NO: 896 - RNA, 121 nt, synthetic construct; identical to SEQ ID NO: 889
  modified_base 91: mod_base = OTHER; note = thymine
  modified_base 96: mod_base = OTHER; note = thymine
  modified_base 98: mod_base = OTHER; note = thymine
  modified_base 106: mod_base = OTHER; note = thymine
  modified_base 109: mod_base = OTHER; note = thymine
  modified_base 111: mod_base = OTHER; note = thymine
  misc_feature 1..121: note = Synthetic
  source 1..121: mol_type = other RNA

SEQ ID NO: 897 - RNA, 121 nt, synthetic construct; identical to SEQ ID NO: 889
  modified_base 91: mod_base = OTHER; note = thymine
  modified_base 96: mod_base = OTHER; note = thymine
  modified_base 98: mod_base = OTHER; note = thymine
  modified_base 106: mod_base = OTHER; note = thymine
  modified_base 109: mod_base = OTHER; note = thymine
  modified_base 111: mod_base = OTHER; note = thymine
  misc_feature 1..121: note = Synthetic
  source 1..121: mol_type = other RNA

SEQ ID NO: 898 - RNA, 121 nt, synthetic construct; identical to SEQ ID NO: 889
  modified_base 91: mod_base = OTHER; note = thymine
  modified_base 96: mod_base = OTHER; note = thymine
  modified_base 98: mod_base = OTHER; note = thymine
  modified_base 106: mod_base = OTHER; note = thymine
  modified_base 109: mod_base = OTHER; note = thymine
  modified_base 111: mod_base = OTHER; note = thymine
  misc_feature 1..121: note = Synthetic
  source 1..121: mol_type = other RNA

SEQ ID NO: 899 - RNA, 121 nt, synthetic construct; identical to SEQ ID NO: 889
  modified_base 91: mod_base = OTHER; note = thymine
  modified_base 96: mod_base = OTHER; note = thymine
  modified_base 98: mod_base = OTHER; note = thymine
  modified_base 106: mod_base = OTHER; note = thymine
  modified_base 109: mod_base = OTHER; note = thymine
  modified_base 111: mod_base = OTHER; note = thymine
  misc_feature 1..121: note = Synthetic
  source 1..121: mol_type = other RNA

SEQ ID NO: 900 - RNA, 109 nt, synthetic construct; identical to SEQ ID NO: 537
  modified_base 79: mod_base = OTHER; note = thymine
  modified_base 84: mod_base = OTHER; note = thymine
  modified_base 86: mod_base = OTHER; note = thymine
  modified_base 94: mod_base = OTHER; note = thymine
  modified_base 97: mod_base = OTHER; note = thymine
  misc_feature 1..109: note = Synthetic
  source 1..109: mol_type = other RNA

SEQ ID NO: 901 - RNA, 109 nt, synthetic construct; identical to SEQ ID NO: 537
  modified_base 79: mod_base = OTHER; note = thymine
  modified_base 84: mod_base = OTHER; note = thymine
  modified_base 86: mod_base = OTHER; note = thymine
  modified_base 94: mod_base = OTHER; note = thymine
  modified_base 97: mod_base = OTHER; note = thymine
  modified_base 99: mod_base = OTHER; note = thymine
  misc_feature 1..109: note = Synthetic
  source 1..109: mol_type = other RNA

SEQ ID NO: 902 - RNA, 109 nt, synthetic construct; identical to SEQ ID NO: 537
  modified_base 79: mod_base = OTHER; note = thymine
  modified_base 84: mod_base = OTHER; note = thymine
  modified_base 86: mod_base = OTHER; note = thymine
  modified_base 94: mod_base = OTHER; note = thymine
  modified_base 97: mod_base = OTHER; note = thymine
  modified_base 99: mod_base = OTHER; note = thymine
  misc_feature 1..109: note = Synthetic
  source 1..109: mol_type = other RNA

SEQ ID NO: 903 - RNA, 109 nt, synthetic construct; identical to SEQ ID NO: 537
  modified_base 79: mod_base = OTHER; note = thymine
  modified_base 84: mod_base = OTHER; note = thymine
  modified_base 86: mod_base = OTHER; note = thymine
  modified_base 94: mod_base = OTHER; note = thymine
  modified_base 97: mod_base = OTHER; note = thymine
  modified_base 99: mod_base = OTHER; note = thymine
  misc_feature 1..109: note = Synthetic
  source 1..109: mol_type = other RNA

SEQ ID NO: 904 - RNA, 109 nt, synthetic construct; identical to SEQ ID NO: 537
  modified_base 79: mod_base = OTHER; note = thymine
  modified_base 84: mod_base = OTHER; note = thymine
  modified_base 86: mod_base = OTHER; note = thymine
  modified_base 94: mod_base = OTHER; note = thymine
  modified_base 97: mod_base = OTHER; note = thymine
  modified_base 99: mod_base = OTHER; note = thymine
  misc_feature 1..109: note = Synthetic
  source 1..109: mol_type = other RNA

SEQ ID NO: 905 - RNA, 109 nt, synthetic construct; identical to SEQ ID NO: 537
  modified_base 79: mod_base = OTHER; note = thymine
  modified_base 84: mod_base = OTHER; note = thymine
  modified_base 86: mod_base = OTHER; note = thymine
  modified_base 94: mod_base = OTHER; note = thymine
  modified_base 97: mod_base = OTHER; note = thymine
  modified_base 99: mod_base = OTHER; note = thymine
  misc_feature 1..109: note = Synthetic
  source 1..109: mol_type = other RNA

SEQ ID NO: 906 - RNA, 121 nt, synthetic construct; identical to SEQ ID NO: 889
  modified_base 91: mod_base = OTHER; note = thymine
  modified_base 96: mod_base = OTHER; note = thymine
  modified_base 98: mod_base = OTHER; note = thymine
  modified_base 106: mod_base = OTHER; note = thymine
  modified_base 109: mod_base = OTHER; note = thymine
  misc_feature 1..121: note = Synthetic
  source 1..121: mol_type = other RNA

SEQ ID NO: 907 - RNA, 121 nt, synthetic construct; identical to SEQ ID NO: 889
  modified_base 91: mod_base = OTHER; note = thymine
  modified_base 96: mod_base = OTHER; note = thymine
  modified_base 98: mod_base = OTHER; note = thymine
  modified_base 106: mod_base = OTHER; note = thymine
  modified_base 109: mod_base = OTHER; note = thymine
  modified_base 111: mod_base = OTHER; note = thymine
  misc_feature 1..121: note = Synthetic
  source 1..121: mol_type = other RNA

SEQ ID NO: 908 - RNA, 121 nt, synthetic construct; identical to SEQ ID NO: 889
  modified_base 91: mod_base = OTHER; note = thymine
  modified_base 96: mod_base = OTHER; note = thymine
  modified_base 98: mod_base = OTHER; note = thymine
  modified_base 106: mod_base = OTHER; note = thymine
  modified_base 109: mod_base = OTHER; note = thymine
  modified_base 111: mod_base = OTHER; note = thymine
  misc_feature 1..121: note = Synthetic
  source 1..121: mol_type = other RNA

SEQ ID NO: 909 - RNA, 121 nt, synthetic construct; identical to SEQ ID NO: 889
  modified_base 91: mod_base = OTHER; note = thymine
  modified_base 96: mod_base = OTHER; note = thymine
  modified_base 98: mod_base = OTHER; note = thymine
  modified_base 106: mod_base = OTHER; note = thymine
  modified_base 109: mod_base = OTHER; note = thymine
  modified_base 111: mod_base = OTHER; note = thymine
  misc_feature 1..121: note = Synthetic
  source 1..121: mol_type = other RNA

SEQ ID NO: 910 - RNA, 121 nt, synthetic construct; identical to SEQ ID NO: 889
  modified_base 91: mod_base = OTHER; note = thymine
  modified_base 96: mod_base = OTHER; note = thymine
  modified_base 98: mod_base = OTHER; note = thymine
  modified_base 106: mod_base = OTHER; note = thymine
  modified_base 109: mod_base = OTHER; note = thymine
  modified_base 111: mod_base = OTHER; note = thymine
  misc_feature 1..121: note = Synthetic
  source 1..121: mol_type = other RNA

SEQ ID NO: 911 - RNA, 121 nt, synthetic construct; identical to SEQ ID NO: 889
  modified_base 91: mod_base = OTHER; note = thymine
  modified_base 96: mod_base = OTHER; note = thymine
  modified_base 98: mod_base = OTHER; note = thymine
  modified_base 106: mod_base = OTHER; note = thymine
  modified_base 109: mod_base = OTHER; note = thymine
  modified_base 111: mod_base = OTHER; note = thymine
  misc_feature 1..121: note = Synthetic
  source 1..121: mol_type = other RNA

SEQ ID NO: 912 - DNA, 23 bp, synthetic construct
  misc_feature 1..23: note = Synthetic
  source 1..23: mol_type = other DNA
tctgcgatcacgtgctcagtttg

SEQ ID NO: 913 - RNA, 23 nt, synthetic construct
  modified_base 1: mod_base = OTHER; note = thymine
  modified_base 3: mod_base = OTHER; note = thymine
  modified_base 8: mod_base = OTHER; note = thymine
  modified_base 13: mod_base = OTHER; note = thymine
  modified_base 16: mod_base = OTHER; note = thymine
  misc_feature 1..23: note = Synthetic
  source 1..23: mol_type = other RNA
tctgcgatcacgtgctcagtctg

SEQ ID NO: 914 - RNA, 23 nt, synthetic construct
  modified_base 1: mod_base = OTHER; note = thymine
  modified_base 3: mod_base = OTHER; note = thymine
  modified_base 8: mod_base = OTHER; note = thymine
  modified_base 13: mod_base = OTHER; note = thymine
  misc_feature 1..23: note = Synthetic
  source 1..23: mol_type = other RNA
tctgcgatcacgtgctcagtctg

SEQ ID NO: 915 - RNA, 23 nt, synthetic construct
  modified_base 1: mod_base = OTHER; note = thymine
  modified_base 3: mod_base = OTHER; note = thymine
  modified_base 8: mod_base = OTHER; note = thymine
  misc_feature 1..23: note = Synthetic
  source 1..23: mol_type = other RNA
tctgcgatcacgtgctcagtctg

SEQ ID NO: 916 - RNA, 23 nt, synthetic construct
  modified_base 1: mod_base = OTHER; note = thymine
  modified_base 3: mod_base = OTHER; note = thymine
  modified_base 8: mod_base = OTHER; note = thymine
  misc_feature 1..23: note = Synthetic
  source 1..23: mol_type = other RNA
tctgcgatcacgtgctcagtctg

SEQ ID NO: 917 - RNA, 23 nt, synthetic construct
  modified_base 1: mod_base = OTHER; note = thymine
  modified_base 3: mod_base = OTHER; note = thymine
  modified_base 8: mod_base = OTHER; note = thymine
  misc_feature 1..23: note = Synthetic
  source 1..23: mol_type = other RNA
tctgcgatcacgtgctcagtctg

SEQ ID NO: 918 - RNA, 23 nt, synthetic construct
  modified_base 1: mod_base = OTHER; note = thymine
  modified_base 3: mod_base = OTHER; note = thymine
  modified_base 8: mod_base = OTHER; note = thymine
  misc_feature 1..23: note = Synthetic
  source 1..23: mol_type = other RNA
tctgcgatcacgtgctcagtctg

SEQ ID NO: 919 - RNA, 23 nt, synthetic construct
  modified_base 1: mod_base = OTHER; note = thymine
  modified_base 3: mod_base = OTHER; note = thymine
  modified_base 8: mod_base = OTHER; note = thymine
  misc_feature 1..23: note = Synthetic
  source 1..23: mol_type = other RNA
tctgcgatcacgtgctcagtctg

SEQ ID NO: 920 - RNA, 23 nt, synthetic construct
  modified_base 1: mod_base = OTHER; note = thymine
  modified_base 3: mod_base = OTHER; note = thymine
  misc_feature 1..23: note = Synthetic
  source 1..23: mol_type = other RNA
tctgcgatcacgtgctcagtctg

SEQ ID NO: 921 - RNA, 23 nt, synthetic construct
  modified_base 1: mod_base = OTHER; note = thymine
  modified_base 3: mod_base = OTHER; note = thymine
  misc_feature 1..23: note = Synthetic
  source 1..23: mol_type = other RNA
tctgcgatcacgtgctcagtctg

SEQ ID NO: 922 - RNA, 23 nt, synthetic construct
  misc_feature 1..23: note = Synthetic
  source 1..23: mol_type = other RNA
tctgcgatcacgtgctcagtctg

SEQ ID NO: 923 - RNA, 23 nt, synthetic construct
  misc_feature 1..23: note = Synthetic
  source 1..23: mol_type = other RNA
tctgcgatcacgtgctcagtctg

SEQ ID NO: 924 - RNA, 23 nt, synthetic construct
  misc_feature 1..23: note = Synthetic
  source 1..23: mol_type = other RNA
tctgcgatcacgtgctcagtctg

SEQ ID NO: 925 - RNA, 23 nt, synthetic construct
  misc_feature 1..23: note = Synthetic
  source 1..23: mol_type = other RNA
tctgcgatcacgtgctcagtctg

SEQ ID NO: 926 - RNA, 23 nt, synthetic construct
  misc_feature 1..23: note = Synthetic
  source 1..23: mol_type = other RNA
tctgcgatcacgtgctcagtctg

SEQ ID NO: 927 - RNA, 23 nt, synthetic construct
  misc_feature 1..23: note = Synthetic
  source 1..23: mol_type = other RNA
tctgcgatcacgtgctcagtctg

SEQ ID NO: 928 - RNA, 23 nt, synthetic construct
  misc_feature 1..23: note = Synthetic
  source 1..23: mol_type = other RNA
tctgcgatcacgtgctcagtctg

SEQ ID NO: 929 - RNA, 23 nt, synthetic construct
  misc_feature 1..23: note = Synthetic
  source 1..23: mol_type = other RNA
tctgcgatcacgtgctcagtctg

SEQ ID NO: 930 - RNA, 23 nt, synthetic construct
  misc_feature 1..23: note = Synthetic
  source 1..23: mol_type = other RNA
tctgcgatcacgtgctcagtctg

SEQ ID NO: 931 - RNA, 23 nt, synthetic construct
  misc_feature 1..23: note = Synthetic
  source 1..23: mol_type = other RNA
tctgcgatcacgtgctcagtctg

SEQ ID NO: 932 - RNA, 23 nt, synthetic construct
  misc_feature 1..23: note = Synthetic
  source 1..23: mol_type = other RNA
tctgcgatcacgtgctcagtctg

SEQ ID NO: 933 - RNA, 23 nt, synthetic construct
  misc_feature 1..23: note = Synthetic
  source 1..23: mol_type = other RNA
tctgcgatcacgtgctcagtctg

SEQ ID NO: 934 - RNA, 23 nt, synthetic construct
  misc_feature 1..23: note = Synthetic
  source 1..23: mol_type = other RNA
tctgcgatcacgtgctcagtctg

SEQ ID NO: 935 - RNA, 23 nt, synthetic construct
  misc_feature 1..23: note = Synthetic
  source 1..23: mol_type = other RNA
tctgcgatcacgtgctcagtctg

SEQ ID NO: 936 - RNA, 23 nt, synthetic construct
  misc_feature 1..23: note = Synthetic
  source 1..23: mol_type = other RNA
tctgcgatcacgtgctcagtctg

SEQ ID NO: 937 - RNA, 23 nt, synthetic construct
  misc_feature 1..23: note = Synthetic
  source 1..23: mol_type = other RNA
tctgcgatcacgtgctcagtctg

SEQ ID NO: 938 - RNA, 23 nt, synthetic construct
  misc_feature 1..23: note = Synthetic
  source 1..23: mol_type = other RNA
tctgcgatcacgtgctcagtctg

SEQ ID NO: 939 - RNA, 23 nt, synthetic construct
  misc_feature 1..23: note = Synthetic
  source 1..23: mol_type = other RNA
tctgcgatcacgtgctcagtctg

SEQ ID NO: 940 - RNA, 23 nt, synthetic construct
  misc_feature 1..23: note = Synthetic
  source 1..23: mol_type = other RNA
tctgcgatcacgtgctcagtctg

SEQ ID NO: 941 - RNA, 23 nt, synthetic construct
  misc_feature 1..23: note = Synthetic
  source 1..23: mol_type = other RNA
tctgcgatcacgtgctcagtctg

SEQ ID NO: 942 - RNA, 13 nt, synthetic construct
  modified_base 1: mod_base = OTHER; note = thymine
  modified_base 8: mod_base = OTHER; note = thymine
  misc_feature 1..13: note = Synthetic
  source 1..13: mol_type = other RNA
tctggcctgcagt

SEQ ID NO: 943 - RNA, 13 nt, synthetic construct
  modified_base 1: mod_base = OTHER; note = thymine
  modified_base 8: mod_base = OTHER; note = thymine
  misc_feature 1..13: note = Synthetic
  source 1..13: mol_type = other RNA
tctggcctgcagt

SEQ ID NO: 944 - RNA, 13 nt, synthetic construct
  modified_base 1: mod_base = OTHER; note = thymine
  misc_feature 1..13: note = Synthetic
  source 1..13: mol_type = other RNA
tctggcctgcagt

SEQ ID NO: 945 - RNA, 13 nt, synthetic construct
  modified_base 1: mod_base = OTHER; note = thymine
  misc_feature 1..13: note = Synthetic
  source 1..13: mol_type = other RNA
tctggcctgcagt

SEQ ID NO: 946 - RNA, 13 nt, synthetic construct
  modified_base 1: mod_base = OTHER; note = thymine
  modified_base 8: mod_base = OTHER; note = thymine
  misc_feature 1..13: note = Synthetic
  source 1..13: mol_type = other RNA
tctggcctgcagt

SEQ ID NO: 947 - RNA, 13 nt, synthetic construct
  modified_base 1: mod_base = OTHER; note = thymine
  misc_feature 1..13: note = Synthetic
  source 1..13: mol_type = other RNA
tctggcctgcagt

SEQ ID NO: 948 - RNA, 13 nt, synthetic construct
  modified_base 1: mod_base = OTHER; note = thymine
  misc_feature 1..13: note = Synthetic
  source 1..13: mol_type = other RNA
tctggcctgcagt

SEQ ID NO: 949 - RNA, 13 nt, synthetic construct
  modified_base 1: mod_base = OTHER; note = thymine
  misc_feature 1..13: note = Synthetic
  source 1..13: mol_type = other RNA
tctggcctgcagt

SEQ ID NO: 950 - RNA, 13 nt, synthetic construct
  modified_base 1: mod_base = OTHER; note = thymine
  modified_base 8: mod_base = OTHER; note = thymine
  misc_feature 1..13: note = Synthetic
  source 1..13: mol_type = other RNA
tctggcctgcagt

SEQ ID NO: 951 - RNA, 13 nt, synthetic construct
  modified_base 1: mod_base = OTHER; note = thymine
  misc_feature 1..13: note = Synthetic
  source 1..13: mol_type = other RNA
tctggcctgcagt

SEQ ID NO: 952 - RNA, 13 nt, synthetic construct
  modified_base 1: mod_base = OTHER; note = thymine
  misc_feature 1..13: note = Synthetic
  source 1..13: mol_type = other RNA
tctggcctgcagt

SEQ ID NO: 953 - RNA, 13 nt, synthetic construct
  modified_base 1: mod_base = OTHER; note = thymine
  modified_base 3: mod_base = OTHER; note = thymine
  modified_base 8: mod_base = OTHER; note = thymine
  misc_feature 1..13: note = Synthetic
  source 1..13: mol_type = other RNA
tctggcctgcagt

SEQ ID NO: 954 - RNA, 13 nt, synthetic construct
  modified_base 1: mod_base = OTHER; note = thymine
  modified_base 3: mod_base = OTHER; note = thymine
  modified_base 8: mod_base = OTHER; note = thymine
  misc_feature 1..13: note = Synthetic
  source 1..13: mol_type = other RNA
tctggcctgcagt

SEQ ID NO: 955 - RNA, 13 nt, synthetic construct
  modified_base 1: mod_base = OTHER; note = thymine
  modified_base 3: mod_base = OTHER; note = thymine
  misc_feature 1..13: note = Synthetic
  source 1..13: mol_type = other RNA
tctggcctgcagt

SEQ ID NO: 956 - RNA, 13 nt, synthetic construct
  modified_base 1: mod_base = OTHER; note = thymine
  modified_base 3: mod_base = OTHER; note = thymine
  misc_feature 1..13: note = Synthetic
  source 1..13: mol_type = other RNA
tctggcctgcagt

SEQ ID NO: 957 - RNA, 13 nt, synthetic construct
  modified_base 1: mod_base = OTHER; note = thymine
  modified_base 3: mod_base = OTHER; note = thymine
  modified_base 8: mod_base = OTHER; note = thymine
  misc_feature 1..13: note = Synthetic
  source 1..13: mol_type = other RNA
tctggcctgcagt

SEQ ID NO: 958 - RNA, 13 nt, synthetic construct
  modified_base 1: mod_base = OTHER; note = thymine
  modified_base 3: mod_base = OTHER; note = thymine
  misc_feature 1..13: note = Synthetic
  source 1..13: mol_type = other RNA
tctggcctgcagt

SEQ ID NO: 959 - RNA, 13 nt, synthetic construct
  modified_base 1: mod_base = OTHER; note = thymine
  modified_base 3: mod_base = OTHER; note = thymine
  misc_feature 1..13: note = Synthetic
  source 1..13: mol_type = other RNA
tctggcctgcagt

SEQ ID NO: 960 - RNA, 13 nt, synthetic construct
  modified_base 1: mod_base = OTHER; note = thymine
  modified_base 3: mod_base = OTHER; note = thymine
  misc_feature 1..13: note = Synthetic
  source 1..13: mol_type = other RNA
tctggcctgcagt

SEQ ID NO: 961 - RNA, 13 nt, synthetic construct
  modified_base 1: mod_base = OTHER; note = thymine
  modified_base 3: mod_base = OTHER; note = thymine
  modified_base 8: mod_base = OTHER; note = thymine
  misc_feature 1..13: note = Synthetic
  source 1..13: mol_type = other RNA
tctggcctgcagt

SEQ ID NO: 962 - RNA, 13 nt, synthetic construct
  modified_base 1: mod_base = OTHER; note = thymine
  modified_base 3: mod_base = OTHER; note = thymine
  misc_feature 1..13: note = Synthetic
  source 1..13: mol_type = other RNA
tctggcctgcagt

SEQ ID NO: 963 - RNA, 13 nt, synthetic construct
  modified_base 1: mod_base = OTHER; note = thymine
  modified_base 3: mod_base = OTHER; note = thymine
  misc_feature 1..13: note = Synthetic
  source 1..13: mol_type = other RNA
tctggcctgcagt

SEQ ID NO: 964 - DNA, 13 bp, synthetic construct
  misc_feature 1..13: note = Synthetic
  source 1..13: mol_type = other DNA
tctggcctgcagt

SEQ ID NO: 965 - RNA, 13 nt, synthetic construct
  modified_base 1: mod_base = OTHER; note = thymine
  modified_base 3: mod_base = OTHER; note = thymine
  modified_base 8: mod_base = OTHER; note = thymine
  misc_feature 1..13: note = Synthetic
  source 1..13: mol_type = other RNA
tctggcctgcagt

SEQ ID NO: 966 - RNA, 20 nt, synthetic construct
  misc_feature 1..20: note = Synthetic
  source 1..20: mol_type = other RNA
gatgtctgcaggccagatga

SEQ ID NO: 967 - RNA, 20 nt, synthetic construct
  misc_feature 1..20: note = Synthetic
  source 1..20: mol_type = other RNA
gatgtctgcaggccagatga

SEQ ID NO: 968 - RNA, 20 nt, synthetic construct
  modified_base 18: mod_base = OTHER; note = thymine
  misc_feature 1..20: note = Synthetic
  source 1..20: mol_type = other RNA
gatgtctgcaggccagatga

SEQ ID NO: 969 - RNA, 20 nt, synthetic construct
  modified_base 5: mod_base = OTHER; note = thymine
  modified_base 18: mod_base = OTHER; note = thymine
  misc_feature 1..20: note = Synthetic
  source 1..20: mol_type = other RNA
gatgtctgcaggccagatga

SEQ ID NO: 970 - RNA, 20 nt, synthetic construct
  modified_base 18: mod_base = OTHER; note = thymine
  misc_feature 1..20: note = Synthetic
  source 1..20: mol_type = other RNA
gatgtctgcaggccagatga

SEQ ID NO: 971 - DNA, 4101 bp, synthetic construct
  misc_feature 1..4101: note = Synthetic
  source 1..4101: mol_type = other DNA
gacaagaagtactccatcggcctggacatcggcaccaactccgtgggctgggccgtgatcaccgacgagtacaaggtgccctccaagaagttcaaggtgctgggcaacaccgaccggcactccatcaagaagaacctgatcggcgccctgctgttcgactccggcgagaccgccgaggccacccggctgaagcggaccgcccggcggcggtacacccggcggaagaaccggatctgctacctgcaggagatcttctccaacgagatggccaaggtggacgactccttcttccaccggctggaggagtccttcctggtggaggaggacaagaagcacgagcggcaccccatcttcggcaacatcgtggacgaggtggcctaccacgagaagtaccccaccatctaccacctgcggaagaagctggtggactccaccgacaaggccgacctgcggctgatctacctggccctggcccacatgatcaagttccggggccacttcctgatcgagggcgacctgaaccccgacaactccgacgtggacaagctgttcatccagctggtgcagacctacaaccagctgttcgaggagaaccccatcaacgcctccggcgtggacgccaaggccatcctgtccgcccggctgtccaagtcccggcggctggagaacctgatcgcccagctgcccggcgagaagaagaacggcctgttcggcaacctgatcgccctgtccctgggcctgacccccaacttcaagtccaacttcgacctggccgaggacgccaagctgcagctgtccaaggacacctacgacgacgacctggacaacctgctggcccagatcggcgaccagtacgccgacctgttcctggccgccaagaacctgtccgacgccatcctgctgtccgacatcctgcgggtgaacaccgagatcaccaaggcccccctgtccgcctccatgatcaagcggtacgacgagcaccaccaggacctgaccctgctgaaggccctggtgcggcagcagctgcccgagaagtacaaggagatcttcttcgaccagtccaagaacggctacgccggctacatcgacggcggcgcctcccaggaggagttctacaagttcatcaagcccatcctggagaagatggacggcaccgaggagctgctggtgaagctgaaccgggaggacctgctgcggaagcagcggaccttcgacaacggctccatcccccaccagatccacctgggcgagctgcacgccatcctgcggcggcaggaggacttctaccccttcctgaaggacaaccgggagaagatcgagaagatcctgaccttccggatcccctactacgtgggccccctggcccggggcaactcccggttcgcctggatgacccggaagtccgaggagaccatcaccccctggaacttcgaggaggtggtggacaagggcgcctccgcccagtccttcatcgagcggatgaccaacttcgacaagaacctgcccaacgagaaggtgctgcccaagcactccctgctgtacgagtacttcaccgtgtacaacgagctgaccaaggtgaagtacgtgaccgagggcatgcggaagcccgccttcctgtccggcgagcagaagaaggccatcgtggacctgctgttcaagaccaaccggaaggtgaccgtgaagcagctgaaggaggactacttcaagaagatcgagtgcttcgactccgtggagatctccggcgtggaggaccggttcaacgcctccctgggcacctaccacgacctgctgaagatcatcaaggacaaggacttcctggacaacgaggagaacgaggacatcctggaggacatcgtgctgaccctgaccctgttcgaggaccgggagatgatcgaggagcggctgaagacctacgcccacctgttcgacgacaaggtgatgaagcagctgaagcggcggcggtacaccggctggggccggctgtcccggaagctgatcaacggcatccgggacaagcagtccggcaagaccatcctggacttcctgaagtccgacggcttcgccaaccggaacttcatgcagctgatccacgacgactccctgaccttcaaggaggacatccagaaggcccaggtgtccggccagggcgactccctgcacgagcacatcgccaacctggccggctcccccgccatcaagaagggcatcctgcagaccgtgaaggtggtggacgagctggtgaaggtgatgggccggcacaagcccgagaacatcgtgatcgagatggcccgggagaaccagaccacccagaagggccagaagaactcccgggagcggatgaagcggatcgaggagggcatcaaggagctgggctcccagatcctgaaggagcaccccgtggagaacacccagctgcagaacgagaagctgtacctgtactacctgcagaacggccgggacatgtacgtggaccaggagctggacatcaaccggctgtccgactacgacgtggacgccatcgtgccccagtccttcctgaaggacgactccatcgacaacaaggtgctgacccggtccgacaaggcccggggcaagtccgacaacgtgccctccgaggaggtggtgaagaagatgaagaactactggcggcagctgctgaacgccaagctgatcacccagcggaagttcgacaacctgaccaaggccgagcggggcggcctgtccgagctggacaaggccggcttcatcaagcggcagctggtggagacccggcagatcaccaagcacgtggcccagatcctggactcccggatgaacaccaagtacgacgagaacgacaagctgatccgggaggtgaaggtgatcaccctgaagtccaagctggtgtccgacttccggaaggacttccagttctacaaggtgcgggagatcaacaactaccaccacgcccacgacgcctacctgaacgccgtggtgggcaccgccctgatcaagaagtaccccaagctggagtccgagttcgtgtacggcgactacaaggtgtacgacgtgcggaagatgatcgccaagtccgagcaggagatcggcaaggccaccgccaagtacttcttctactccaacatcatgaacttcttcaagaccgagatcaccctggccaacggcgagatccggaagcggcccctgatcgagaccaacggcgagaccggcgagatcgtgtgggacaagggccgggacttcgccaccgtgcggaaggtgctgtccatgccccaggtgaacatcgtgaagaagaccgaggtgcagaccggcggcttctccaaggagtccatcctgcccaagcggaactccgacaagctgatcgcccggaagaaggactgggaccccaagaagtacggcggcttcgactcccccaccgtggcctactccgtgctggtggtggccaaggtggagaagggcaagtccaagaagctgaagtccgtgaaggagctgctgggcatcaccatcatggagcggtcctccttcgagaagaaccccatcgacttcctggaggccaagggctacaaggaggtgaagaaggacctgatcatcaagctgcccaagtactccctgttcgagctggagaacggccggaagcggatgctggcctccgccggcgagctgcagaagggcaacgagctggccctgccctccaagtacgtgaacttcctgtacctggcctcccactacgagaagctgaagggctcccccgaggacaacgagcagaagcagctgttcgtggagcagcacaagcactacctggacgagatcatcgagcagatctccgagttctccaagcgggtgatcctggccgacgccaacctggacaaggtgctgtccgcctacaacaagcaccgggacaagcccatccgggagcaggccgagaacatcatccacctgttcaccctgaccaacctgggcgcccccgccgccttcaagtacttcgacaccaccatcgaccggaagcggtacacctccaccaaggaggtgctggacgccaccctgatccaccagtccatcaccggcctgtacgagacccggatcgacctgtcccagctgggcggcgac

SEQ ID NO: 972 - protein, 1367 aa, synthetic construct
  REGION 1..1367: note = Synthetic
DKKYSIGLDIGTNSVGWAVITDEYKVPSKKFKVLGNTDRHSIKKNLIGALLFDSGETAEATRLKRTARRRYTRRKNRICYLQEIFSNEMAKVDDSFFHRLEESFLVEEDKKHERHPIFGNIVDEVAYHEKYPTIYHLRKKLVDSTDKADLRLIYLALAHMIKFRGHFLIEGDLNPDNSDVDKLFIQLVQTYNQLFEENPINASGVDAKAILSARLSKSRRLENLIAQLPGEKKNGLFGNLIALSLGLTPNFKSNFDLAEDAKLQLSKDTYDDDLDNLLAQIGDQYADLFLAAKNLSDAILLSDILRVNTEITKAPLSASMIKRYDEHHQDLTLLKALVRQQLPEKYKEIFFDQSKNGYAGYIDGGASQEEFYKFIKPILEKMDGTEELLVKLNREDLLRKQRTFDNGSIPHQIHLGELHAILRRQEDFYPFLKDNREKIEKILTFRIPYYVGPLARGNSRFAWMTRKSEETITPWNFEEVVDKGASAQSFIERMTNFDKNLPNEKVLPKHSLLYEYFTVYNELTKVKYVTEGMRKPAFLSGEQKKAIVDLLFKTNRKVTVKQLKEDYFKKIECFDSVEISGVEDRFNASLGTYHDLLKIIKDKDFLDNEENEDILEDIVLTLTLFEDREMIEERLKTYAHLFDDKVMKQLKRRRYTGWGRLSRKLINGIRDKQSGKTILDFLKSDGFANRNFMQLIHDDSLTFKEDIQKAQVSGQGDSLHEHIANLAGSPAIKKGILQTVKVVDELVKVMGRHKPENIVIEMARENQTTQKGQKNSRERMKRIEEGIKELGSQILKEHPVENTQLQNEKLYLYYLQNGRDMYVDQELDINRLSDYDVDAIVPQSFLKDDSIDNKVLTRSDKARGKSDNVPSEEVVKKMKNYWRQLLNAKLITQRKFDNLTKAERGGLSELDKAGFIKRQLVETRQITKHVAQILDSRMNTKYDENDKLIREVKVITLKSKLVSDFRKDFQFYKVREINNYHHAHDAYLNAVVGTALIKKYPKLESEFVYGDYKVYDVRKMIAKSEQEIGKATAKYFFYSNIMNFFKTEITLANGEIRKRPLIETNGETGEIVWDKGRDFATVRKVLSMPQVNIVKKTEVQTGGFSKESILPKRNSDKLIARKKDWDPKKYGGFDSPTVAYSVLVVAKVEKGKSKKLKSVKELLGITIMERSSFEKNPIDFLEAKGYKEVKKDLIIKLPKYSLFELENGRKRMLASAGELQKGNELALPSKYVNFLYLASHYEKLKGSPEDNEQKQLFVEQHKHYLDEIIEQISEFSKRVILADANLDKVLSAYNKHRDKPIREQAENIIHLFTLTNLGAPAAFKYFDTTIDRKRYTSTKEVLDATLIHQSITGLYETRIDLSQLGGD

SEQ ID NO: 973 - DNA, 4101 bp, synthetic construct
  misc_feature 1..4101: note = Synthetic
  source 1..4101: mol_type = other DNA
gacaagaagtactccatcggcctggacatcggcaccaactccgtgggctgggccgtgatcaccgacgagtacaaggtgccctccaagaagttcaaggtgctgggcaacaccgaccggcactccatcaagaagaacctgatcggcgccctgctgttcgactccggcgagaccgccgaggccacccggctgaagcggaccgcccggcggcggtacacccggcggaagaaccggatctgctacctgcaggagatcttctccaacgagatggccaaggtggacgactccttcttccaccggctggaggagtccttcctggtggaggaggacaagaagcacgagcggcaccccatcttcggcaacatcgtggacgaggtggcctaccacgagaagtaccccaccatctaccacctgcggaagaagctggtggactccaccgacaaggccgacctgcggctgatctacctggccctggcccacatgatcaagttccggggccacttcctgatcgagggcgacctgaaccccgacaactccgacgtggacaagctgttcatccagctggtgcagacctacaaccagctgttcgaggagaaccccatcaacgcctccggcgtggacgccaaggccatcctgtccgcccggctgtccaagtcccggcggctggagaacctgatcgcccagctgcccggcgagaagaagaacggcctgttcggcaacctgatcgccctgtccctgggcctgacccccaacttcaagtccaacttcgacctggccgaggacgccaagctgcagctgtccaaggacacctacgacgacgacctggacaacctgctggcccagatcggcgaccagtacgccgacctgttcctggccgccaagaacctgtccgacgccatcctgctgtccgacatcctgcgggtgaacaccgagatcaccaaggcccccctgtccgcctccatgatcaagcggtacgacgagcaccaccaggacctgaccctgctgaaggccctggtgcggcagcagctgcccgagaagtacaaggagatcttcttcgaccagtccaagaacggctacgccggctacatcgacggcggcgcctcccaggaggagttctacaagttcatcaagcccatcctggagaagatggacggcaccgaggagctgctggtgaagctgaaccgggaggacctgctgcggaagcagcggaccttcgacaacggctccatcccccaccagatccacctgggcgagctgcacgccatcctgcggcggcaggaggacttctaccccttcctgaaggacaaccgggagaagatcgagaagatcctgaccttccggatcccctactacgtgggccccctggcccggggcaactcccggttcgcctggatgacccggaagtccgaggagaccatcaccccctggaacttcgaggaggtggtggacaagggcgcctccgcccagtccttcatcgagcggatgaccaacttcgacaagaacctgcccaacgagaaggtgctgcccaagcactccctgctgtacgagtacttcaccgtgtacaacgagctgaccaaggtgaagtacgtgaccgagggcatgcggaagcccgccttcctgtccggcgagcagaagaaggccatcgtggacctgctgttcaagaccaaccggaaggtgaccgtgaagcagctgaaggaggactacttcaagaagatcgagtgcttcgactccgtggagatctccggcgtggaggaccggttcaacgcctccctgggcacctaccacgacctgctgaagatcatcaaggacaaggacttcctggacaacgaggagaacgaggacatcctggaggacatcgtgctgaccctgaccctgttcgaggaccgggagatgatcgaggagcggctgaagacctacgcccacctgttcgacgacaaggtgatgaagcagctgaagcggcggcggtacaccggctggggccggctgtcccggaagctgatcaacggcatccgggacaagcagtccggcaagaccatcctggacttcctgaagtccgacggcttcgccaaccggaacttcatgcagctgatccacgacgactccctgaccttcaaggaggacatccagaaggcccaggtgtccggccagggcgactccctgcacgagcacatcgccaacctggccggctcccccgccatcaagaagggcatcctgcagaccgtgaaggtggtggacgagctggtgaaggtgatgggccggcacaagcccgagaacatcgtgatcgagatggcccgggagaaccagaccacccagaagggccagaagaactcccgggagcggatgaagcggatcgaggagggcatcaaggagctgggctcccagatcctgaaggagcaccccgtggagaacacccagctgcagaacgagaagctgtacctgtactacctgcagaacggccgggacatgtacgtggaccaggagctggacatcaaccggctgtccgactacgacgtggacgccatcgtgccccagtccttcctgaaggacgactccatcgacgccaaggtgctgacccggtccgacaagaaccggggcaagtccgacaacgtgccctccgaggaggtggtgaagaagatgaagaactactggcggcagctgctgaacgccaagctgatcacccagcggaagttcgacaacctgaccaaggccgagcggggcggcctgtccgagctggacaaggccggcttcatcaagcggcagctggtggagacccggcagatcaccaagcacgtggcccagatcctggactcccggatgaacaccaagtacgacgagaacgacaagctgatccgggaggtgaaggtgatcaccctgaagtccaagctggtgtccgacttccggaaggacttccagttctacaaggtgcgggagatcaacaactaccaccacgcccacgacgcctacctgaacgccgtggtgggcaccgccctgatcaagaagtaccccaagctggagtccgagttcgtgtacggcgactacaaggtgtacgacgtgcggaagatgatcgccaagtccgagcaggagatcggcaaggccaccgccaagtacttcttctactccaacatcatgaacttcttcaagaccgagatcaccctggccaacggcgagatccggaagcggcccctgatcgagaccaacggcgagaccggcgagatcgtgtgggacaagggccgggacttcgccaccgtgcggaaggtgctgtccatgccccaggtgaacatcgtgaagaagaccgaggtgcagaccggcggcttctccaaggagtccatcctgcccaagcggaactccgacaagctgatcgcccggaagaaggactgggaccccaagaagtacggcggcttcgactcccccaccgtggcctactccgtgctggtggtggccaaggtggagaagggcaagtccaagaagctgaagtccgtgaaggagctgctgggcatcaccatcatggagcggtcctccttcgagaagaaccccatcgacttcctggaggccaagggctacaaggaggtgaagaaggacctgatcatcaagctgcccaagtactccctgttcgagctggagaacggccggaagcggatgctggcctccgccggcgagctgcagaagggcaacgagctggccctgccctccaagtacgtgaacttcctgtacctggcctcccactacgagaagctgaagggctcccccgaggacaacgagcagaagcagctgttcgtggagcagcacaagcactacctggacgagatcatcgagcagatctccgagttctccaagcgggtgatcctggccgacgccaacctggacaaggtgctgtccgcctacaacaagcaccgggacaagcccatccgggagcaggccgagaacatcatccacctgttcaccctgaccaacctgggcgcccccgccgccttcaagtacttcgacaccaccatcgaccggaagcggtacacctccaccaaggaggtgctggacgccaccctgatccaccagtccatcaccggcctgtacgagacccggatcgacctgtcccagctgggcggcgac

SEQ ID NO: 974 - protein, 1367 aa, synthetic construct
  REGION 1..1367: note = Synthetic
DKKYSIGLDIGTNSVGWAVITDEYKVPSKKFKVLGNTDRHSIKKNLIGALLFDSGETAEATRLKRTARRRYTRRKNRICYLQEIFSNEMAKVDDSFFHRLEESFLVEEDKKHERHPIFGNIVDEVAYHEKYPTIYHLRKKLVDSTDKADLRLIYLALAHMIKFRGHFLIEGDLNPDNSDVDKLFIQLVQTYNQLFEENPINASGVDAKAILSARLSKSRRLENLIAQLPGEKKNGLFGNLIALSLGLTPNFKSNFDLAEDAKLQLSKDTYDDDLDNLLAQIGDQYADLFLAAKNLSDAILLSDILRVNTEITKAPLSASMIKRYDEHHQDLTLLKALVRQQLPEKYKEIFFDQSKNGYAGYIDGGASQEEFYKFIKPILEKMDGTEELLVKLNREDLLRKQRTFDNGSIPHQIHLGELHAILRRQEDFYPFLKDNREKIEKILTFRIPYYVGPLARGNSRFAWMTRKSEETITPWNFEEVVDKGASAQSFIERMTNFDKNLPNEKVLPKHSLLYEYFTVYNELTKVKYVTEGMRKPAFLSGEQKKAIVDLLFKTNRKVTVKQLKEDYFKKIECFDSVEISGVEDRFNASLGTYHDLLKIIKDKDFLDNEENEDILEDIVLTLTLFEDREMIEERLKTYAHLFDDKVMKQLKRRRYTGWGRLSRKLINGIRDKQSGKTILDFLKSDGFANRNFMQLIHDDSLTFKEDIQKAQVSGQGDSLHEHIANLAGSPAIKKGILQTVKVVDELVKVMGRHKPENIVIEMARENQTTQKGQKNSRERMKRIEEGIKELGSQILKEHPVENTQLQNEKLYLYYLQNGRDMYVDQELDINRLSDYDVDAIVPQSFLKDDSIDAKVLTRSDKNRGKSDNVPSEEVVKKMKNYWRQLLNAKLITQRKFDNLTKAERGGLSELDKAGFIKRQLVETRQITKHVAQILDSRMNTKYDENDKLIREVKVITLKSKLVSDFRKDFQFYKVREINNYHHAHDAYLNAVVGTALIKKYPKLESEFVYGDYKVYDVRKMIAKSEQEIGKATAKYFFYSNIMNFFKTEITLANGEIRKRPLIETNGETGEIVWDKGRDFATVRKVLSMPQVNIVKKTEVQTGGFSKESILPKRNSDKLIARKKDWDPKKYGGFDSPTVAYSVLVVAKVEKGKSKKLKSVKELLGITIMERSSFEKNPIDFLEAKGYKEVKKDLIIKLPKYSLFELENGRKRMLASAGELQKGNELALPSKYVNFLYLASHYEKLKGSPEDNEQKQLFVEQHKHYLDEIIEQISEFSKRVILADANLDKVLSAYNKHRDKPIREQAENIIHLFTLTNLGAPAAFKYFDTTIDRKRYTSTKEVLDATLIHQSITGLYETRIDLSQLGGD

SEQ ID NO: 975 - DNA, 4101 bp, synthetic construct
  misc_feature 1..4101: note = Synthetic
  source 1..4101: mol_type = other DNA
gacaagaagtactccatcggcctggacatcggcaccaactccgtgggctgggccgtgatcaccgacgagtacaaggtgccctccaagaagttcaaggtgctgggcaacaccgaccggcactccatcaagaagaacctgatcggcgccctgctgttcgactccggcgagaccgccgaggccacccggctgaagcggaccgcccggcggcggtacacccggcggaagaaccggatctgctacctgcaggagatcttctccaacgagatggccaaggtggacgactccttcttccaccggctggaggagtccttcctggtggaggaggacaagaagcacgagcggcaccccatcttcggcaacatcgtggacgaggtggcctaccacgagaagtaccccaccatctaccacctgcggaagaagctggtggactccaccgacaaggccgacctgcggctgatctacctggccctggcccacatgatcaagttccggggccacttcctgatcgagggcgacctgaaccccgacaactccgacgtggacaagctgttcatccagctggtgcagacctacaaccagctgttcgaggagaaccccatcaacgcctccggcgtggacgccaaggccatcctgtccgcccggctgtccaagtcccggcggctggagaacctgatcgcccagctgcccggcgagaagaagaacggcctgttcggcaacctgatcgccctgtccctgggcctgacccccaacttcaagtccaacttcgacctggccgaggacgccaagctgcagctgtccaaggacacctacgacgacgacctggacaacctgctggcccagatcggcgaccagtacgccgacctgttcctggccgccaagaacctgtccgacgccatcctgctgtccgacatcctgcgggtgaacaccgagatcaccaaggcccccctgtccgcctccatgatcaagcggtacgacgagcaccaccaggacctgaccctgctgaaggccctggtgcggcagcagctgcccgagaagtacaaggagatcttcttcgaccagtccaagaacggctacgccggctacatcgacggcggcgcctcccaggaggagttctacaagttcatcaagcccatcctggagaagatggacggcaccgaggagctgctggtgaagctgaaccgggaggacctgctgcggaagcagcggaccttcgacaacggctccatcccccaccagatccacctgggcgagctgcacgccatcctgcggcggcaggaggacttctaccccttcctgaaggacaaccgggagaagatcgagaagatcctgaccttccggatcccctactacgtgggccccctggcccggggcaactcccggttcgcctggatgacccggaagtccgaggagaccatcaccccctggaacttcgaggaggtggtggacaagggcgcctccgcccagtccttcatcgagcggatgaccaacttcgacaagaacctgcccaacgagaaggtgctgcccaagcactccctgctgtacgagtacttcaccgtgtacaacgagctgaccaaggtgaagtacgtgaccgagggcatgcggaagcccgccttcctgtccggcgagcagaagaaggccatcgtggacctgctgttcaagaccaaccggaaggtgaccgtgaagcagctgaaggaggactacttcaagaagatcgagtgcttcgactccgtggagatctccggcgtggaggaccggttcaacgcctccctgggcacctaccacgacctgctgaagatcatcaaggacaaggacttcctggacaacgaggagaacgaggacatcctggaggacatcgtgctgaccctgaccctgttcgaggaccgggagatgatcgaggagcggctgaagacctacgcccacctgttcgacgacaaggtgatgaagcagctgaagcggcggcggtacaccggctggggccggctgtcccggaagctgatcaacggcatccgggacaagcagtccggcaagaccatcctggacttcctgaagtccgacggcttcgccaaccggaacttcatgcagctgatccacgacgactccctgaccttcaaggaggacatccagaaggcccaggtgtccggccagggcgactccctgcacgagcacatcgccaacctggccggctcccccgccatcaagaagggcatcctgcagaccgtgaaggtggtggacgagctggtgaaggtgatgggccggcacaagcccgagaacatcgtgatcgagatggcccgggagaaccagaccacccagaagggccagaagaactcccgggagcggatgaagcggatcgaggagggcatcaaggagctgggctcccagatcctgaaggagcaccccgtggagaacacccagctgcagaacgagaagctgtacctgtactacctgcagaacggccgggacatgtacgtggaccaggagctggacatcaaccggctgtccgactacgacgtggcccacatcgtgccccagtccttcctgaaggacgactccatcgacgccaaggtgctgacccggtccgacaagaaccggggcaagtccgacaacgtgccctccgaggaggtggtgaagaagatgaagaactactggcggcagctgctgaacgccaagctgatcacccagcggaagttcgacaacctgaccaaggccgagcggggcggcctgtccgagctggacaaggccggcttcatcaagcggcagctggtggagacccggcagatcaccaagcacgtggcccagatcctggactcccggatgaacaccaagtacgacgagaacgacaagctgatccgggaggtgaaggtgatcaccctgaagtccaagctggtgtccgacttccggaaggacttccagttctacaaggtgcgggagatcaacaactaccaccacgcccacgacgcctacctgaacgccgtggtgggcaccgccctgatcaagaagtaccccaagctggagtccgagttcgtgtacggcgactacaaggtgtacgacgtgcggaagatgatcgccaagtccgagcaggagatcggcaaggccaccgccaagtacttcttctactccaacatcatgaacttcttcaagaccgagatcaccctggccaacggcgagatccggaagcggcccctgatcgagaccaacggcgagaccggcgagatcgtgtgggacaagggccgggacttcgccaccgtgcggaaggtgctgtccatgccccaggtgaacatcgtgaagaagaccgaggtgcagaccggcggcttctccaaggagtccatcctgcccaagcggaactccgacaagctgatcgcccggaagaaggactgggaccccaagaagtacggcggcttcgactcccccaccgtggcctactccgtgctggtggtggccaaggtggagaagggcaagtccaagaagctgaagtccgtgaaggagctgctgggcatcaccatcatggagcggtcctccttcgagaagaaccccatcgacttcctggaggccaagggctacaaggaggtgaagaaggacctgatcatcaagctgcccaagtactccctgttcgagctggagaacggccggaagcggatgctggcctccgccggcgagctgcagaagggcaacgagctggccctgccctccaagtacgtgaacttcctgtacctggcctcccactacgagaagctgaagggctcccccgaggacaacgagcagaagcagctgttcgtggagcagcacaagcactacctggacgagatcatcgagcagatctccgagttctccaagcgggtgatcctggccgacgccaacctggacaaggtgctgtccgcctacaacaagcaccgggacaagcccatccgggagcaggccgagaacatcatccacctgttcaccctgaccaacctgggcgcccccgccgccttcaagtacttcgacaccaccatcgaccggaagcggtacacctccaccaaggaggtgctggacgccaccctgatccaccagtccatcaccggcctgtacgagacccggatcgacctgtcccagctgggcggcgac

SEQ ID NO: 976 - protein, 1367 aa, synthetic construct
  REGION 1..1367: note = Synthetic
DKKYSIGLDIGTNSVGWAVITDEYKVPSKKFKVLGNTDRHSIKKNLIGALLFDSGETAEATRLKRTARRRYTRRKNRICYLQEIFSNEMAKVDDSFFHRLEESFLVEEDKKHERHPIFGNIVDEVAYHEKYPTIYHLRKKLVDSTDKADLRLIYLALAHMIKFRGHFLIEGDLNPDNSDVDKLFIQLVQTYNQLFEENPINASGVDAKAILSARLSKSRRLENLIAQLPGEKKNGLFGNLIALSLGLTPNFKSNFDLAEDAKLQLSKDTYDDDLDNLLAQIGDQYADLFLAAKNLSDAILLSDILRVNTEITKAPLSASMIKRYDEHHQDLTLLKALVRQQLPEKYKEIFFDQSKNGYAGYIDGGASQEEFYKFIKPILEKMDGTEELLVKLNREDLLRKQRTFDNGSIPHQIHLGELHAILRRQEDFYPFLKDNREKIEKILTFRIPYYVGPLARGNSRFAWMTRKSEETITPWNFEEVVDKGASAQSFIERMTNFDKNLPNEKVLPKHSLLYEYFTVYNELTKVKYVTEGMRKPAFLSGEQKKAIVDLLFKTNRKVTVKQLKEDYFKKIECFDSVEISGVEDRFNASLGTYHDLLKIIKDKDFLDNEENEDILEDIVLTLTLFEDREMIEERLKTYAHLFDDKVMKQLKRRRYTGWGRLSRKLINGIRDKQSGKTILDFLKSDGFANRNFMQLIHDDSLTFKEDIQKAQVSGQGDSLHEHIANLAGSPAIKKGILQTVKVVDELVKVMGRHKPENIVIEMARENQTTQKGQKNSRERMKRIEEGIKELGSQILKEHPVENTQLQNEKLYLYYLQNGRDMYVDQELDINRLSDYDVAHIVPQSFLKDDSIDAKVLTRSDKNRGKSDNVPSEEVVKKMKNYWRQLLNAKLITQRKFDNLTKAERGGLSELDKAGFIKRQLVETRQITKHVAQILDSRMNTKYDENDKLIREVKVITLKSKLVSDFRKDFQFYKVREINNYHHAHDAYLNAVVGTALIKKYPKLESEFVYGDYKVYDVRKMIAKSEQEIGKATAKYFFYSNIMNFFKTEITLANGEIRKRPLIETNGETGEIVWDKGRDFATVRKVLSMPQVNIVKKTEVQTGGFSKESILPKRNSDKLIARKKDWDPKKYGGFDSPTVAYSVLVVAKVEKGKSKKLKSVKELLGITIMERSSFEKNPIDFLEAKGYKEVKKDLIIKLPKYSLFELENGRKRMLASAGELQKGNELALPSKYVNFLYLASHYEKLKGSPEDNEQKQLFVEQHKHYLDEIIEQISEFSKRVILADANLDKVLSAYNKHRDKPIREQAENIIHLFTLTNLGAPAAFKYFDTTIDRKRYTSTKEVLDATLIHQSITGLYETRIDLSQLGGD

SEQ ID NO: 977 - DNA, 2136 bp, synthetic construct
  misc_feature 1..2136: note = Synthetic
  source 1..2136: mol_type = other DNA
gacaagaagtactccatcggcctggacatcggcaccaactccgtgggctgggccgtgatcaccgacgagtacaaggtgccctccaagaagttcaaggtgctgggcaacaccgaccggcactccatcaagaagaacctgatcggcgccctgctgttcgactccggcgagaccgccgaggccacccggctgaagcggaccgcccggcggcggtacacccggcggaagaaccggatctgctacctgcaggagatcttctccaacgagatggccaaggtggacgactccttcttccaccggctggaggagtccttcctggtggaggaggacaagaagcacgagcggcaccccatcttcggcaacatcgtggacgaggtggcctaccacgagaagtaccccaccatctaccacctgcggaagaagctggtggactccaccgacaaggccgacctgcggctgatctacctggccctggcccacatgatcaagttccggggccacttcctgatcgagggcgacctgaaccccgacaactccgacgtggacaagctgttcatccagctggtgcagacctacaaccagctgttcgaggagaaccccatcaacgcctccggcgtggacgccaaggccatcctgtccgcccggctgtccaagtcccggcggctggagaacctgatcgcccagctgcccggcgagaagaagaacggcctgttcggcaacctgatcgccctgtccctgggcctgacccccaacttcaagtccaacttcgacctggccgaggacgccaagctgcagctgtccaaggacacctacgacgacgacctggacaacctgctggcccagatcggcgaccagtacgccgacctgttcctggccgccaagaacctgtccgacgccatcctgctgtccgacatcctgcgggtgaacaccgagatcaccaaggcccccctgtccgcctccatgatcaagcggtacgacgagcaccaccaggacctgaccctgctgaaggccctggtgcggcagcagctgcccgagaagtacaaggagatcttcttcgaccagtccaagaacggctacgccggctacatcgacggcggcgcctcccaggaggagttctacaagttcatcaagcccatcctggagaagatggacggcaccgaggagctgctggtgaagctgaaccgggaggacctgctgcggaagcagcggaccttcgacaacggctccatcccccaccagatccacctgggcgagctgcacgccatcctgcggcggcaggaggacttctaccccttcctgaaggacaaccgggagaagatcgagaagatcctgaccttccggatcccctactacgtgggccccctggcccggggcaactcccggttcgcctggatgacccggaagtccgaggagaccatcaccccctggaacttcgaggaggtggtggacaagggcgcctccgcccagtccttcatcgagcggatgaccaacttcgacaagaacctgcccaacgagaaggtgctgcccaagcactccctgctgtacgagtacttcaccgtgtacaacgagctgaccaaggtgaagtacgtgaccgagggcatgcggaagcccgccttcctgtccggcgagcagaagaaggccatcgtggacctgctgttcaagaccaaccggaaggtgaccgtgaagcagctgaaggaggactacttcaagaagatcgagtgcttcgactccgtggagatctccggcgtggaggaccggttcaacgcctccctgggcacctaccacgacctgctgaagatcatcaaggacaaggacttcctggacaacgaggagaacgaggacatcctggaggacatcgtgctgaccctgaccctgttcgaggaccgggagatgatcgaggagcggctgaagacctacgcccacctgttcgacgacaaggtgatgaagcagctgaagcggcggcggtacaccggctggggccggctgtcccggaagctgatcaacggcatccgggacaagcagtccggcaagaccatcctggacttcctgaagtccgacggcttcgccaaccggaacttcatgcagctgatccacgacgactccctgaccttcaaggaggacatccagaaggcccaggtg

SEQ ID NO: 978 - protein, 712 aa, synthetic construct
  REGION 1..712: note = Synthetic
DKKYSIGLDIGTNSVGWAVITDEYKVPSKKFKVLGNTDRHSIKKNLIGALLFDSGETAEATRLKRTARRRYTRRKNRICYLQEIFSNEMAKVDDSFFHRLEESFLVEEDKKHERHPIFGNIVDEVAYHEKYPTIYHLRKKLVDSTDKADLRLIYLALAHMIKFRGHFLIEGDLNPDNSDVDKLFIQLVQTYNQLFEENPINASGVDAKAILSARLSKSRRLENLIAQLPGEKKNGLFGNLIALSLGLTPNFKSNFDLAEDAKLQLSKDTYDDDLDNLLAQIGDQYADLFLAAKNLSDAILLSDILRVNTEITKAPLSASMIKRYDEHHQDLTLLKALVRQQLPEKYKEIFFDQSKNGYAGYIDGGASQEEFYKFIKPILEKMDGTEELLVKLNREDLLRKQRTFDNGSIPHQIHLGELHAILRRQEDFYPFLKDNREKIEKILTFRIPYYVGPLARGNSRFAWMTRKSEETITPWNFEEVVDKGASAQSFIERMTNFDKNLPNEKVLPKHSLLYEYFTVYNELTKVKYVTEGMRKPAFLSGEQKKAIVDLLFKTNRKVTVKQLKEDYFKKIECFDSVEISGVEDRFNASLGTYHDLLKIIKDKDFLDNEENEDILEDIVLTLTLFEDREMIEERLKTYAHLFDDKVMKQLKRRRYTGWGRLSRKLINGIRDKQSGKTILDFLKSDGFANRNFMQLIHDDSLTFKEDIQKAQV

SEQ ID NO: 979 - DNA, 1965 bp, synthetic construct
  misc_feature 1..1965: note = Synthetic
  source 1..1965: mol_type = other DNA
tccggccagggcgactccctgcacgagcacatcgccaacctggccggctcccccgccatcaagaagggcatcctgcagaccgtgaaggtggtggacgagctggtgaaggtgatgggccggcacaagcccgagaacatcgtgatcgagatggcccgggagaaccagaccacccagaagggccagaagaactcccgggagcggatgaagcggatcgaggagggcatcaaggagctgggctcccagatcctgaaggagcaccccgtggagaacacccagctgcagaacgagaagctgtacctgtactacctgcagaacggccgggacatgtacgtggaccaggagctggacatcaaccggctgtccgactacgacgtggacgccatcgtgccccagtccttcctgaaggacgactccatcgacaacaaggtgctgacccggtccgacaagaaccggggcaagtccgacaacgtgccctccgaggaggtggtgaagaagatgaagaactactggcggcagctgctgaacgccaagctgatcacccagcggaagttcgacaacctgaccaaggccgagcggggcggcctgtccgagctggacaaggccggcttcatcaagcggcagctggtggagacccggcagatcaccaagcacgtggcccagatcctggactcccggatgaacaccaagtacgacgagaacgacaagctgatccgggaggtgaaggtgatcaccctgaagtccaagctggtgtccgacttccggaaggacttccagttctacaaggtgcgggagatcaacaactaccaccacgcccacgacgcctacctgaacgccgtggtgggcaccgccctgatcaagaagtaccccaagctggagtccgagttcgtgtacggcgactacaaggtgtacgacgtgcggaagatgatcgccaagtccgagcaggagatcggcaaggccaccgccaagtacttcttctactccaacatcatgaacttcttcaagaccgagatcaccctggccaacggcgagatccggaagcggcccctgatcgagaccaacggcgagaccggcgagatcgtgtgggacaagggccgggacttcgccaccgtgcggaaggtgctgtccatgccccaggtgaacatcgtgaagaagaccgaggtgcagaccggcggcttctccaaggagtccatcctgcccaagcggaactccgacaagctgatcgcccggaagaaggactgggaccccaagaagtacggcggcttcgactcccccaccgtggcctactccgtgctggtggtggccaaggtggagaagggcaagtccaagaagctgaagtccgtgaaggagctgctgggcatcaccatcatggagcggtcctccttcgagaagaaccccatcgacttcctggaggccaagggctacaaggaggtgaagaaggacctgatcatcaagctgcccaagtactccctgttcgagctggagaacggccggaagcggatgctggcctccgccggcgagctgcagaagggcaacgagctggccctgccctccaagtacgtgaacttcctgtacctggcctcccactacgagaagctgaagggctcccccgaggacaacgagcagaagcagctgttcgtggagcagcacaagcactacctggacgagatcatcgagcagatctccgagttctccaagcgggtgatcctggccgacgccaacctggacaaggtgctgtccgcctacaacaagcaccgggacaagcccatccgggagcaggccgagaacatcatccacctgttcaccctgaccaacctgggcgcccccgccgccttcaagtacttcgacaccaccatcgaccggaagcggtacacctccaccaaggaggtgctggacgccaccctgatccaccagtccatcaccggcctgtacgagacccggatcgacctgtcccagctgggcggcgac

SEQ ID NO: 980 - protein, 655 aa, synthetic construct
  REGION 1..655: note = Synthetic
SGQGDSLHEHIANLAGSPAIKKGILQTVKVVDELVKVMGRHKPENIVIEMARENQTTQKGQKNSRERMKRIEEGIKELGSQILKEHPVENTQLQNEKLYLYYLQNGRDMYVDQELDINRLSDYDVDAIVPQSFLKDDSIDNKVLTRSDKNRGKSDNVPSEEVVKKMKNYWRQLLNAKLITQRKFDNLTKAERGGLSELDKAGFIKRQLVETRQITKHVAQILDSRMNTKYDENDKLIREVKVITLKSKLVSDFRKDFQFYKVREINNYHHAHDAYLNAVVGTALIKKYPKLESEFVYGDYKVYDVRKMIAKSEQEIGKATAKYFFYSNIMNFFKTEITLANGEIRKRPLIETNGETGEIVWDKGRDFATVRKVLSMPQVNIVKKTEVQTGGFSKESILPKRNSDKLIARKKDWDPKKYGGFDSPTVAYSVLVVAKVEKGKSKKLKSVKELLGITIMERSSFEKNPIDFLEAKGYKEVKKDLIIKLPKYSLFELENGRKRMLASAGELQKGNELALPSKYVNFLYLASHYEKLKGSPEDNEQKQLFVEQHKHYLDEIIEQISEFSKRVILADANLDKVLSAYNKHRDKPIREQAENIIHLFTLTNLGAPAAFKYFDTTIDRKRYTSTKEVLDATLIHQSITGLYETRIDLSQLGGD

SEQ ID NO: 981 - DNA, 4101 bp, synthetic construct
  misc_feature 1..4101: note = Synthetic
  source 1..4101: mol_type = other DNA
gacaagaagtactccatcggcctggacatcggcaccaactccgtgggctgggccgtgatcaccgacgagtacaaggtgccctccaagaagttcaaggtgctgggcaacaccgaccggcactccatcaagaagaacctgatcggcgccctgctgttcgactccggcgagaccgccgaggccacccggctgaagcggaccgcccggcggcggtacacccggcggaagaaccggatctgctacctgcaggagatcttctccaacgagatggccaaggtggacgactccttcttccaccggctggaggagtccttcctggtggaggaggacaagaagcacgagcggcaccccatcttcggcaacatcgtggacgaggtggcctaccacgagaagtaccccaccatctaccacctgcggaagaagctggtggactccaccgacaaggccgacctgcggctgatctacctggccctggcccacatgatcaagttccggggccacttcctgatcgagggcgacctgaaccccgacaactccgacgtggacaagctgttcatccagctggtgcagacctacaaccagctgttcgaggagaaccccatcaacgcctccggcgtggacgccaaggccatcctgtccgcccggctgtccaagtcccggcggctggagaacctgatcgcccagctgcccggcgagaagaagaacggcctgttcggcaacctgatcgccctgtccctgggcctgacccccaacttcaagtccaacttcgacctggccgaggacgccaagctgcagctgtccaaggacacctacgacgacgacctggacaacctgctggcccagatcggcgaccagtacgccgacctgttcctggccgccaagaacctgtccgacgccatcctgctgtccgacatcctgcgggtgaacaccgagatcaccaaggcccccctgtccgcctccatgatcaagcggtacgacgagcaccaccaggacctgaccctgctgaaggccctggtgcggcagcagctgcccgagaagtacaaggagatcttcttcgaccagtccaagaacggctacgccggctacatcgacggcggcgcctcccaggaggagttctacaagttcatcaagcccatcctggagaagatggacggcaccgaggagctgctggtgaagctgaaccgggaggacctgctgcggaagcagcggaccttcgacaacggctccatcccccaccagatccacctgggcgagctgcacgccatcctgcggcggcaggaggacttctaccccttcctgaaggacaaccgggagaagatcgagaagatcctgaccttccggatcccctactacgtgggccccctggcccggggcaactcccggttcgcctggatgacccggaagtccgaggagaccatcaccccctggaacttcgaggaggtggtggacaagggcgcctccgcccagtccttcatcgagcggatgaccaacttcgacaagaacctgcccaacgagaaggtgctgcccaagcactccctgctgtacgagtacttcaccgtgtacaacgagctgaccaaggtgaagtacgtgaccgagggcatgcggaagcccgccttcctgtccggcgagcagaagaaggccatcgtggacctgctgttcaagaccaaccggaaggtgaccgtgaagcagctgaaggaggactacttcaagaagatcgagtgcttcgactccgtggagatctccggcgtggaggaccggttcaacgcctccctgggcacctaccacgacctgctgaagatcatcaaggacaaggacttcctggacaacgaggagaacgaggacatcctggaggacatcgtgctgaccctgaccctgttcgaggaccgggagatgatcgaggagcggctgaagacctacgcccacctgttcgacgacaaggtgatgaagcagctgaagcggcggcggtacaccggctggggccggctgtcccggaagctgatcaacggcatccgggacaagcagtccggcaagaccatcctggacttcctgaagtccgacggcttcgccaaccggaacttcatgcagctgatccacgacgactccctgaccttcaaggaggacatccagaaggcccaggtgtccggccagggcgactccctgcacgagcacatcgccaacctggccggctcccccgccatcaagaagggcatcctgcagaccgtgaaggtggtggacgagctggtgaaggtgatgggccggcacaagcccgagaacatcgtgatcgagatggcccgggagaaccagaccacccagaagggccagaagaactcccgggagcggatgaagcggatcgaggagggcatcaaggagctgggctcccagatcctgaaggagcaccccgtggagaacacccagctgcagaacgagaagctgtacctgtactacctgcagaacggccgggacatgtacgtggaccaggagctggacatcaaccggctgtccgactacgacgtggacgccatcgtgccccagtccttcctgaaggacgactccatcgacaacaaggtgctgacccggtccgacaagaaccggggcaagtccgacaacgtgccctccgaggaggtggtgaagaagatgaagaactactggcggcagctgctgaacgccaagctgatcacccagcggaagttcgacaacctgaccaaggccgagcggggcggcctgtccgagctggacaaggccggcttcatcaagcggcagctggtggagacccggcagatcaccaagcacgtggcccagatcctggactcccggatgaacaccaagtacgacgagaacgacaagctgatccgggaggtgaaggtgatcaccctgaagtccaagctggtgtccgacttccggaaggacttccagttctacaaggtgcgggagatcaacaactaccaccacgcccacgacgcctacctgaacgccgtggtgggcaccgccctgatcaagaagtaccccaagctggagtccgagttcgtgtacggcgactacaaggtgtacgacgtgcggaagatgatcgccaagtccgagcaggagatcggcaaggccaccgccaagtacttcttctactccaacatcatgaacttcttcaagaccgagatcaccctggccaacggcgagatccggaagcggcccctgatcgagaccaacggcgagaccggcgagatcgtgtgggacaagggccgggacttcgccaccgtgcggaaggtgctgtccatgccccaggtgaacatcgtgaagaagaccgaggtgcagaccggcggcttctccaaggagtccatcctgcccaagcggaactccgacaagctgatcgcccggaagaaggactgggaccccaagaagtacggcggcttcgactcccccaccgtggcctactccgtgctggtggtggccaaggtggagaagggcaagtccaagaagctgaagtccgtgaaggagctgctgggcatcaccatcatggagcggtcctccttcgagaagaaccccatcgacttcctggaggccaagggctacaaggaggtgaagaaggacctgatcatcaagctgcccaagtactccctgttcgagctggagaacggccggaagcggatgctggcctccgccggcgagctgcagaagggcaacgagctggccctgccctccaagtacgtgaacttcctgtacctggcctcccactacgagaagctgaagggctcccccgaggacaacgagcagaagcagctgttcgtggagcagcacaagcactacctggacgagatcatcgagcagatctccgagttctccaagcgggtgatcctggccgacgccaacctggacaaggtgctgtccgcctacaacaagcaccgggacaagcccatccgggagcaggccgagaacatcatccacctgttcaccctgaccaacctgggcgcccccgccgccttcaagtacttcgacaccaccatcgaccggaagcggtacacctccaccaaggaggtgctggacgccaccctgatccaccagtccatcaccggcctgtacgagacccggatcgacctgtcccagctgggcggcgac

SEQ ID NO: 982 - protein, 1367 aa, synthetic construct
  REGION 1..1367: note = Synthetic
DKKYSIGLDIGTNSVGWAVITDEYKVPSKKFKVLGNTDRHSIKKNLIGALLFDSGETAEATRLKRTARRRYTRRKNRICYLQEIFSNEMAKVDDSFFHRLEESFLVEEDKKHERHPIFGNIVDEVAYHEKYPTIYHLRKKLVDSTDKADLRLIYLALAHMIKFRGHFLIEGDLNPDNSDVDKLFIQLVQTYNQLFEENPINASGVDAKAILSARLSKSRRLENLIAQLPGEKKNGLFGNLIALSLGLTPNFKSNFDLAEDAKLQLSKDTYDDDLDNLLAQIGDQYADLFLAAKNLSDAILLSDILRVNTEITKAPLSASMIKRYDEHHQDLTLLKALVRQQLPEKYKEIFFDQSKNGYAGYIDGGASQEEFYKFIKPILEKMDGTEELLVKLNREDLLRKQRTFDNGSIPHQIHLGELHAILRRQEDFYPFLKDNREKIEKILTFRIPYYVGPLARGNSRFAWMTRKSEETITPWNFEEVVDKGASAQSFIERMTNFDKNLPNEKVLPKHSLLYEYFTVYNELTKVKYVTEGMRKPAFLSGEQKKAIVDLLFKTNRKVTVKQLKEDYFKKIECFDSVEISGVEDRFNASLGTYHDLLKIIKDKDFLDNEENEDILEDIVLTLTLFEDREMIEERLKTYAHLFDDKVMKQLKRRRYTGWGRLSRKLINGIRDKQSGKTILDFLKSDGFANRNFMQLIHDDSLTFKEDIQKAQVSGQGDSLHEHIANLAGSPAIKKGILQTVKVVDELVKVMGRHKPENIVIEMARENQTTQKGQKNSRERMKRIEEGIKELGSQILKEHPVENTQLQNEKLYLYYLQNGRDMYVDQELDINRLSDYDVDAIVPQSFLKDDSIDNKVLTRSDKNRGKSDNVPSEEVVKKMKNYWRQLLNAKLITQRKFDNLTKAERGGLSELDKAGFIKRQLVETRQITKHVAQILDSRMNTKYDENDKLIREVKVITLKSKLVSDFRKDFQFYKVREINNYHHAHDAYLNAVVGTALIKKYPKLESEFVYGDYKVYDVRKMIAKSEQEIGKATAKYFFYSNIMNFFKTEITLANGEIRKRPLIETNGETGEIVWDKGRDFATVRKVLSMPQVNIVKKTEVQTGGFSKESILPKRNSDKLIARKKDWDPKKYGGFDSPTVAYSVLVVAKVEKGKSKKLKSVKELLGITIMERSSFEKNPIDFLEAKGYKEVKKDLIIKLPKYSLFELENGRKRMLASAGELQKGNELALPSKYVNFLYLASHYEKLKGSPEDNEQKQLFVEQHKHYLDEIIEQISEFSKRVILADANLDKVLSAYNKHRDKPIREQAENIIHLFTLTNLGAPAAFKYFDTTIDRKRYTSTKEVLDATLIHQSITGLYETRIDLSQLGGD

SEQ ID NO: 983 - DNA, 4101 bp, synthetic construct
  misc_feature 1..4101: note = Synthetic
  source 1..4101: mol_type = other DNA
gacaagaagtactccatcggcctggacatcggcaccaactccgtgggctgggccgtgatcaccgacgagtacaaggtgccctccaagaagttcaaggtgctgggcaacaccgaccggcactccatcaagaagaacctgatcggcgccctgctgttcgactccggcgagaccgccgaggccacccggctgaagcggaccgcccggcggcggtacacccggcggaagaaccggatctgctacctgcaggagatcttctccaacgagatggccaaggtggacgactccttcttccaccggctggaggagtccttcctggtggaggaggacaagaagcacgagcggcaccccatcttcggcaacatcgtggacgaggtggcctaccacgagaagtaccccaccatctaccacctgcggaagaagctggtggactccaccgacaaggccgacctgcggctgatctacctggccctggcccacatgatcaagttccggggccacttcctgatcgagggcgacctgaaccccgacaactccgacgtggacaagctgttcatccagctggtgcagacctacaaccagctgttcgaggagaaccccatcaacgcctccggcgtggacgccaaggccatcctgtccgcccggctgtccaagtcccggcggctggagaacctgatcgcccagctgcccggcgagaagaagaacggcctgttcggcaacctgatcgccctgtccctgggcctgacccccaacttcaagtccaacttcgacctggccgaggacgccaagctgcagctgtccaaggacacctacgacgacgacctggacaacctgctggcccagatcggcgaccagtacgccgacctgttcctggccgccaagaacctgtccgacgccatcctgctgtccgacatcctgcgggtgaacaccgagatcaccaaggcccccctgtccgcctccatgatcaagcggtacgacgagcaccaccaggacctgaccctgctgaaggccctggtgcggcagcagctgcccgagaagtacaaggagatcttcttcgaccagtccaagaacggctacgccggctacatcgacggcggcgcctcccaggaggagttctacaagttcatcaagcccatcctggagaagatggacggcaccgaggagctgctggtgaagctgaaccgggaggacctgctgcggaagcagcggaccttcgacaacggctccatcccccaccagatccacctgggcgagctgcacgccatcctgcggcggcaggaggacttctaccccttcctgaaggacaaccgggagaagatcgagaagatcctgaccttccggatcccctactacgtgggccccctggcccggggcaactcccggttcgcctggatgacccggaagtccgaggagaccatcaccccctggaacttcgaggaggtggtggacaagggcgcctccgcccagtccttcatcgagcggatgaccaacttcgacaagaacctgcccaacgagaaggtgctgcccaagcactccctgctgtacgagtacttcaccgtgtacaacgagctgaccaaggtgaagtacgtgaccgagggcatgcggaagcccgccttcctgtccggcgagcagaagaaggccatcgtggacctgctgttcaagaccaaccggaaggtgaccgtgaagcagctgaaggaggactacttcaagaagatcgagtgcttcgactccgtggagatctccggcgtggaggaccggttcaacgcctccctgggcacctaccacgacctgctgaagatcatcaaggacaaggacttcctggacaacgaggagaacgaggacatcctggaggacatcgtgctgaccctgaccctgttcgaggaccgggagatgatcgaggagcggctgaagacctacgcccacctgttcgacgacaaggtgatgaagcagctgaagcggcggcggtacaccggctggggccggctgtcccggaagctgatcaacggcatccgggacaagcagtccggcaagaccatcctggacttcctgaagtccgacggcttcgccaaccggaacttcatgcagctgatccacgacgactccctgaccttcaaggaggacatccagaaggcccaggtgtccggccagggcgactccctgcacgagcacatcgccaacctggccggctcccccgccatcaagaagggcatcctgcagaccgtgaaggtggtggacgagctggtgaaggtgatgggccggcacaagcccgagaacatcgtgatcgagatggcccgggagaaccagaccacccagaagggccagaagaactcccgggagcggatgaagcggatcgaggagggcatcaaggagctgggctcccagatcctgaaggagcaccccgtggagaacacccagctgcagaacgagaagctgtacctgtactacctgcagaacggccgggacatgtacgtggaccaggagctggacatcaaccggctgtccgactacgacgtggactccatcgtgccccagtccttcctgaaggacgactccatcgacaacaaggtgctgacccggtccgacaagaaccggggcaagtccgacaacgtgccctccgaggaggtggtgaagaagatgaagaactactggcggcagctgctgaacgccaagctgatcacccagcggaagttcgacaacctgaccaaggccgagcggggcggcctgtccgagctggacaaggccggcttcatcaagcggcagctggtggagacccggcagatcaccaagcacgtggcccagatcctggactcccggatgaacaccaagtacgacgagaacgacaagctgatccgggaggtgaaggtgatcaccctgaagtccaagctggtgtccgacttccggaaggacttccagttctacaaggtgcgggagatcaacaactaccaccacgcccacgacgcctacctgaacgccgtggtgggcaccgccctgatcaagaagtaccccaagctggagtccgagttcgtgtacggcgactacaaggtgtacgacgtgcggaagatgatcgccaagtccgagcaggagatcggcaaggccaccgccaagtacttcttctactccaacatcatgaacttcttcaagaccgagatcaccctggccaacggcgagatccggaagcggcccctgatcgagaccaacggcgagaccggcgagatcgtgtgggacaagggccgggacttcgccaccgtgcggaaggtgctgtccatgccccaggtgaacatcgtgaagaagaccgaggtgcagaccggcggcttctccaaggagtccatcctgcccaagcggaactccgacaagctgatcgcccggaagaaggactgggaccccaagaagtacggcggcttcgactcccccaccgtggcctactccgtgctggtggtggccaaggtggagaagggcaagtccaagaagctgaagtccgtgaaggagctgctgggcatcaccatcatggagcggtcctccttcgagaagaaccccatcgacttcctggaggccaagggctacaaggaggtgaagaaggacctgatcatcaagctgcccaagtactccctgttcgagctggagaacggccggaagcggatgctggcctccgccggcgagctgcagaagggcaacgagctggccctgccctccaagtacgtgaacttcctgtacctggcctcccactacgagaagctgaagggctcccccgaggacaacgagcagaagcagctgttcgtggagcagcacaagcactacctggacgagatcatcgagcagatctccgagttctccaagcgggtgatcctggccgacgccaacctggacaaggtgctgtccgcctacaacaagcaccgggacaagcccatccgggagcaggccgagaacatcatccacctgttcaccctgaccaacctgggcgcccccgccgccttcaagtacttcgacaccaccatcgaccggaagcggtacacctccaccaaggaggtgctggacgccaccctgatccaccagtccatcaccggcctgtacgagacccggatcgacctgtcccagctgggcggcgac

SEQ ID NO: 984 - protein, 1367 aa, synthetic construct
  REGION 1..1367: note = Synthetic
DKKYSIGLDIGTNSVGWAVITDEYKVPSKKFKVLGNTDRHSIKKNLIGALLFDSGETAEATRLKRTARRRYTRRKNRICYLQEIFSNEMAKVDDSFFHRLEESFLVEEDKKHERHPIFGNIVDEVAYHEKYPTIYHLRKKLVDSTDKADLRLIYLALAHMIKFRGHFLIEGDLNPDNSDVDKLFIQLVQTYNQLFEENPINASGVDAKAILSARLSKSRRLENLIAQLPGEKKNGLFGNLIALSLGLTPNFKSNFDLAEDAKLQLSKDTYDDDLDNLLAQIGDQYADLFLAAKNLSDAILLSDILRVNTEITKAPLSASMIKRYDEHHQDLTLLKALVRQQLPEKYKEIFFDQSKNGYAGYIDGGASQEEFYKFIKPILEKMDGTEELLVKLNREDLLRKQRTFDNGSIPHQIHLGELHAILRRQEDFYPFLKDNREKIEKILTFRIPYYVGPLARGNSRFAWMTRKSEETITPWNFEEVVDKGASAQSFIERMTNFDKNLPNEKVLPKHSLLYEYFTVYNELTKVKYVTEGMRKPAFLSGEQKKAIVDLLFKTNRKVTVKQLKEDYFKKIECFDSVEISGVEDRFNASLGTYHDLLKIIKDKDFLDNEENEDILEDIVLTLTLFEDREMIEERLKTYAHLFDDKVMKQLKRRRYTGWGRLSRKLINGIRDKQSGKTILDFLKSDGFANRNFMQLIHDDSLTFKEDIQKAQVSGQGDSLHEHIANLAGSPAIKKGILQTVKVVDELVKVMGRHKPENIVIEMARENQTTQKGQKNSRERMKRIEEGIKELGSQILKEHPVENTQLQNEKLYLYYLQNGRDMYVDQELDINRLSDYDVDSIVPQSFLKDDSIDNKVLTRSDKNRGKSDNVPSEEVVKKMKNYWRQLLNAKLITQRKFDNLTKAERGGLSELDKAGFIKRQLVETRQITKHVAQILDSRMNTKYDENDKLIREVKVITLKSKLVSDFRKDFQFYKVREINNYHHAHDAYLNAVVGTALIKKYPKLESEFVYGDYKVYDVRKMIAKSEQEIGKATAKYFFYSNIMNFFKTEITLANGEIRKRPLIETNGETGEIVWDKGRDFATVRKVLSMPQVNIVKKTEVQTGGFSKESILPKRNSDKLIARKKDWDPKKYGGFDSPTVAYSVLVVAKVEKGKSKKLKSVKELLGITIMERSSFEKNPIDFLEAKGYKEVKKDLIIKLPKYSLFELENGRKRMLASAGELQKGNELALPSKYVNFLYLASHYEKLKGSPEDNEQKQLFVEQHKHYLDEIIEQISEFSKRVILADANLDKVLSAYNKHRDKPIREQAENIIHLFTLTNLGAPAAFKYFDTTIDRKRYTSTKEVLDATLIHQSITGLYETRIDLSQLGGD

SEQ ID NO: 985 - DNA, 4101 bp, synthetic construct
  misc_feature 1..4101: note = Synthetic
  source 1..4101: mol_type = other DNA
gacaagaagtactccatcggcctggacatcggcaccaactccgtgggctgggccgtgatcaccgacgagtacaaggtgccctccaagaagttcaaggtgctgggcaacaccgaccggcactccatcaagaagaacctgatcggcgccctgctgttcgactccggcgagaccgccgaggccacccggctgaagcggaccgcccggcggcggtacacccggcggaagaaccggatctgctacctgcaggagatcttctccaacgagatggccaaggtggacgactccttcttccaccggctggaggagtccttcctggtggaggaggacaagaagcacgagcggcaccccatcttcggcaacatcgtggacgaggtggcctaccacgagaagtaccccaccatctaccacctgcggaagaagctggtggactccaccgacaaggccgacctgcggctgatctacctggccctggcccacatgatcaagttccggggccacttcctgatcgagggcgacctgaaccccgacaactccgacgtggacaagctgttcatccagctggtgcagacctacaaccagctgttcgaggagaaccccatcaacgcctccggcgtggacgccaaggccatcctgtccgcccggctgtccaagtcccggcggctggagaacctgatcgcccagctgcccggcgagaagaagaacggcctgttcggcaacctgatcgccctgtccctgggcctgacccccaacttcaagtccaacttcgacctggccgaggacgccaagctgcagctgtccaaggacacctacgacgacgacctggacaacctgctggcccagatcggcgaccagtacgccgacctgttcctggccgccaagaacctgtccgacgccatcctgctgtccgacatcctgcgggtgaacaccgagatcaccaaggcccccctgtccgcctccatgatcaagcggtacgacgagcaccaccaggacctgaccctgctgaaggccctggtgcggcagcagctgcccgagaagtacaaggagatcttcttcgaccagtccaagaacggctacgccggctacatcgacggcggcgcctcccaggaggagttctacaagttcatcaagcccatcctggagaagatggacggcaccgaggagctgctggtgaagctgaaccgggaggacctgctgcggaagcagcggaccttcgacaacggctccatcccccaccagatccacctgggcgagctgcacgccatcctgcggcggcaggaggacttctaccccttcctgaaggacaaccgggagaagatcgagaagatcctgaccttccggatcccctactacgtgggccccctggcccggggcaactcccggttcgcctggatgacccggaagtccgaggagaccatcaccccctggaacttcgaggaggtggtggacaagggcgcctccgcccagtccttcatcgagcggatgaccaacttcgacaagaacctgcccaacgagaaggtgctgcccaagcactccctgctgtacgagtacttcaccgtgtacaacgagctgaccaaggtgaagtacgtgaccgagggcatgcggaagcccgccttcctgtccggcgagcagaagaaggccatcgtggacctgctgttcaagaccaaccggaaggtgaccgtgaagcagctgaaggaggactacttcaagaagatcgagtgcttcgactccgtggagatctccggcgtggaggaccggttcaacgcctccctgggcacctaccacgacctgctgaagatcatcaaggacaaggacttcctggacaacgaggagaacgaggacatcctggaggacatcgtgctgaccctgaccctgttcgaggaccgggagatgatcgaggagcggctgaagacctacgcccacctgttcgacgacaaggtgatgaagcagctgaagcggcggcggtacaccggctggggccggctgtcccggaagctgatcaacggcatccgggacaagcagtccggcaagaccatcctggacttcctgaagtccgacggcttcgccaaccggaacttcatgcagctgatccacgacgactccctgaccttcaaggaggacatccagaaggcccaggtgtccggccagggcgactccctgcacgagcacatcgccaacctggccggctcccccgccatcaagaagggcatcctgcagaccgtgaaggtggtggacgagctggtgaaggtgatgggccggcacaagcccgagaacatcgtgatcgagatggcccgggagaaccagaccacccagaagggccagaagaactcccgggagcggatgaagcggatcgaggagggcatcaaggagctgggctcccagatcctgaaggagcaccccgtggagaacacccagctgcagaacgagaagctgtacctgtactacctgcagaacggccgggacatgtacgtggaccaggagctggacatcaaccggctgtccgactacgacgtggacgacatcgtgccccagtccttcctgaaggacgactccatcgacaacaaggtgctgacccggtccgacaagaaccggggcaagtccgacaacgtgccctccgaggaggtggtgaagaagatgaagaactactggcggcagctgctgaacgccaagctgatcacccagcggaagttcgacaacctgaccaaggccgagcggggcggcctgtccgagctggacaaggccggcttcatcaagcggcagctggtggagacccggcagatcaccaagcacgtggcccagatcctggactcccggatgaacaccaagtacgacgagaacgacaagctgatccgggaggtgaaggtgatcaccctgaagtccaagctggtgtccgacttccggaaggacttccagttctacaaggtgcgggagatcaacaactaccaccacgcccacgacgcctacctgaacgccgtggtgggcaccgccctgatcaagaagtaccccaagctggagtccgagttcgtgtacggcgactacaaggtgtacgacgtgcggaagatgatcgccaagtccgagcaggagatcggcaaggccaccgccaagtacttcttctactccaacatcatgaacttcttcaagaccgagatcaccctggccaacggcgagatccggaagcggcccctgatcgagaccaacggcgagaccggcgagatcgtgtgggacaagggccgggacttcgccaccgtgcggaaggtgctgtccatgccccaggtgaacatcgtgaagaagaccgaggtgcagaccggcggcttctccaaggagtccatcctgcccaagcggaactccgacaagctgatcgcccggaagaaggactgggaccccaagaagtacggcggcttcgactcccccaccgtggcctactccgtgctggtggtggccaaggtggagaagggcaagtccaagaagctgaagtccgtgaaggagctgctgggcatcaccatcatggagcggtcctccttcgagaagaaccccatcgacttcctggaggccaagggctacaaggaggtgaagaaggacctgatcatcaagctgcccaagtactccctgttcgagctggagaacggccggaagcggatgctggcctccgccggcgagctgcagaagggcaacgagctggccctgccctccaagtacgtgaacttcctgtacctggcctcccactacgagaagctgaagggctcccccgaggacaacgagcagaagcagctgttcgtggagcagcacaagcactacctggacgagatcatcgagcagatctccgagttctccaagcgggtgatcctggccgacgccaacctggacaaggtgctgtccgcctacaacaagcaccgggacaagcccatccgggagcaggccgagaacatcatccacctgttcaccctgaccaacctgggcgcccccgccgccttcaagtacttcgacaccaccatcgaccggaagcggtacacctccaccaaggaggtgctggacgccaccctgatccaccagtccatcaccggcctgtacgagacccggatcgacctgtcccagctgggcggcgac

SEQ ID NO: 986 - protein, 1367 aa, synthetic construct
  REGION 1..1367: note = Synthetic
DKKYSIGLDIGTNSVGWAVITDEYKVPSKKFKVLGNTDRHSIKKNLIGALLFDSGETAEATRLKRTARRRYTRRKNRICYLQEIFSNEMAKVDDSFFHRLEESFLVEEDKKHERHPIFGNIVDEVAYHEKYPTIYHLRKKLVDSTDKADLRLIYLALAHMIKFRGHFLIEGDLNPDNSDVDKLFIQLVQTYNQLFEENPINASGVDAKAILSARLSKSRRLENLIAQLPGEKKNGLFGNLIALSLGLTPNFKSNFDLAEDAKLQLSKDTYDDDLDNLLAQIGDQYADLFLAAKNLSDAILLSDILRVNTEITKAPLSASMIKRYDEHHQDLTLLKALVRQQLPEKYKEIFFDQSKNGYAGYIDGGASQEEFYKFIKPILEKMDGTEELLVKLNREDLLRKQRTFDNGSIPHQIHLGELHAILRRQEDFYPFLKDNREKIEKILTFRIPYYVGPLARGNSRFAWMTRKSEETITPWNFEEVVDKGASAQSFIERMTNFDKNLPNEKVLPKHSLLYEYFTVYNELTKVKYVTEGMRKPAFLSGEQKKAIVDLLFKTNRKVTVKQLKEDYFKKIECFDSVEISGVEDRFNASLGTYHDLLKIIKDKDFLDNEENEDILEDIVLTLTLFEDREMIEERLKTYAHLFDDKVMKQLKRRRYTGWGRLSRKLINGIRDKQSGKTILDFLKSDGFANRNFMQLIHDDSLTFKEDIQKAQVSGQGDSLHEHIANLAGSPAIKKGILQTVKVVDELVKVMGRHKPENIVIEMARENQTTQKGQKNSRERMKRIEEGIKELGSQILKEHPVENTQLQNEKLYLYYLQNGRDMYVDQELDINRLSDYDVDDIVPQSFLKDDSIDNKVLTRSDKNRGKSDNVPSEEVVKKMKNYWRQLLNAKLITQRKFDNLTKAERGGLSELDKAGFIKRQLVETRQITKHVAQILDSRMNTKYDENDKLIREVKVITLKSKLVSDFRKDFQFYKVREINNYHHAHDAYLNAVVGTALIKKYPKLESEFVYGDYKVYDVRKMIAKSEQEIGKATAKYFFYSNIMNFFKTEITLANGEIRKRPLIETNGETGEIVWDKGRDFATVRKVLSMPQVNIVKKTEVQTGGFSKESILPKRNSDKLIARKKDWDPKKYGGFDSPTVAYSVLVVAKVEKGKSKKLKSVKELLGITIMERSSFEKNPIDFLEAKGYKEVKKDLIIKLPKYSLFELENGRKRMLASAGELQKGNELALPSKYVNFLYLASHYEKLKGSPEDNEQKQLFVEQHKHYLDEIIEQISEFSKRVILADANLDKVLSAYNKHRDKPIREQAENIIHLFTLTNLGAPAAFKYFDTTIDRKRYTSTKEVLDATLIHQSITGLYETRIDLSQLGGD

SEQ ID NO: 987 - DNA, 4101 bp, synthetic construct
  misc_feature 1..4101: note = Synthetic
  source 1..4101: mol_type = other DNA
gacaagaagtactccatcggcctggacatcggcaccaactccgtgggctgggccgtgatcaccgacgagtacaaggtgccctccaagaagttcaaggtgctgggcaacaccgaccggcactccatcaagaagaacctgatcggcgccctgctgttcgactccggcgagaccgccgaggccacccggctgaagcggaccgcccggcggcggtacacccggcggaagaaccggatctgctacctgcaggagatcttctccaacgagatggccaaggtggacgactccttcttccaccggctggaggagtccttcctggtggaggaggacaagaagcacgagcggcaccccatcttcggcaacatcgtggacgaggtggcctaccacgagaagtaccccaccatctaccacctgcggaagaagctggtggactccaccgacaaggccgacctgcggctgatctacctggccctggcccacatgatcaagttccggggccacttcctgatcgagggcgacctgaaccccgacaactccgacgtggacaagctgttcatccagctggtgcagacctacaaccagctgttcgaggagaaccccatcaacgcctccggcgtggacgccaaggccatcctgtccgcccggctgtccaagtcccggcggctggagaacctgatcgcccagctgcccggcgagaagaagaacggcctgttcggcaacctgatcgccctgtccctgggcctgacccccaacttcaagtccaacttcgacctggccgaggacgccaagctgcagctgtccaaggacacctacgacgacgacctggacaacctgctggcccagatcggcgaccagtacgccgacctgttcctggccgccaagaacctgtccgacgccatcctgctgtccgacatcctgcgggtgaacaccgagatcaccaaggcccccctgtccgcctccatgatcaagcggtacgacgagcaccaccaggacctgaccctgctgaaggccctggtgcggcagcagctgcccgagaagtacaaggagatcttcttcgaccagtccaagaacggctacgccggctacatcgacggcggcgcctcccaggaggagttctacaagttcatcaagcccatcctggagaagatggacggcaccgaggagctgctggtgaagctgaaccgggaggacctgctgcggaagcagcggaccttcgacaacggctccatcccccaccagatccacctgggcgagctgcacgccatcctgcggcggcaggaggacttctaccccttcctgaaggacaaccgggagaagatcgagaagatcctgaccttccggatcccctactacgtgggccccctggcccggggcaactcccggttcgcctggatgacccggaagtccgaggagaccatcaccccctggaacttcgaggaggtggtggacaagggcgcctccgcccagtccttcatcgagcggatgaccaacttcgacaagaacctgcccaacgagaaggtgctgcccaagcactccctgctgtacgagtacttcaccgtgtacaacgagctgaccaaggtgaagtacgtgaccgagggcatgcggaagcccgccttcctgtccggcgagcagaagaaggccatcgtggacctgctgttcaagaccaaccggaaggtgaccgtgaagcagctgaaggaggactacttcaagaagatcgagtgcttcgactccgtggagatctccggcgtggaggaccggttcaacgcctccctgggcacctaccacgacctgctgaagatcatcaaggacaaggacttcctggacaacgaggagaacgaggacatcctggaggacatcgtgctgaccctgaccctgttcgaggaccgggagatgatcgaggagcggctgaagacctacgcccacctgttcgacgacaaggtgatgaagcagctgaagcggcggcggtacaccggctggggccggctgtcccggaagctgatcaacggcatccgggacaagcagtccggcaagaccatcctggacttcctgaagtccgacggcttcgccaaccggaacttcatgcagctgatccacgacgactccctgaccttcaaggaggacatccagaaggcccaggtgtccggccagggcgactccctgcacgagcacatcgccaacctggccggctcccccgccatcaagaagggcatcctgcagaccgtgaaggtggtggacgagctggtgaaggtgatgggccggcacaagcccgagaacatcgtgatcgagatggcccgggagaaccagaccacccagaagggccagaagaactcccgggagcggatgaagcggatcgaggagggcatcaaggagctgggctcccagatcctgaaggagcaccccgtggagaacacccagctgcagaacgagaagctgtacctgtactacctgcagaacggccgggacatgtacgtggaccaggagctggacatcaaccggctgtccgactacgacgtggacttcatcgtgccccagtccttcctgaaggacgactccatcgacaacaaggtgctgacccggtccgacaagaaccggggcaagtccgacaacgtgccctccgaggaggtggtgaagaagatgaagaactactggcggcagctgctgaacgccaagctgatcacccagcggaagttcgacaacctgaccaaggccgagcggggcggcctgtccgagctggacaaggccggcttcatcaagcggcagctggtggagacccggcagatcaccaagcacgtggcccagatcctggactcccggatgaacaccaagtacgacgagaacgacaagctgatccgggaggtgaaggtgatcaccctgaagtccaagctggtgtccgacttccggaaggacttccagttctacaaggtgcgggagatcaacaactaccaccacgcccacgacgcctacctgaacgccgtggtgggcaccgccctgatcaagaagtaccccaagctggagtccgagttcgtgtacggcgactacaaggtgtacgacgtgcggaagatgatcgccaagtccgagcaggagatcggcaaggccaccgccaagtacttcttctactccaacatcatgaacttcttcaagaccgagatcaccctggccaacggcgagatccggaagcggcccctgatcgagaccaacggcgagaccggcgagatcgtgtgggacaagggccgggacttcgccaccgtgcggaaggtgctgtccatgccccaggtgaacatcgtgaagaagaccgaggtgcagaccggcggcttctccaaggagtccatcctgcccaagcggaactccgacaagctgatcgcccggaagaaggactgggaccccaagaagtacggcggcttcgactcccccaccgtggcctactccgtgctggtggtggccaaggtggagaagggcaagtccaagaagctgaagtccgtgaaggagctgctgggcatcaccatcatggagcggtcctccttcgagaagaaccccatcgacttcctggaggccaagggctacaaggaggtgaagaaggacctgatcatcaagctgcccaagtactccctgttcgagctggagaacggccggaagcggatgctggcctccgccggcgagctgcagaagggcaacgagctggccctgccctccaagtacgtgaacttcctgtacctggcctcccactacgagaagctgaagggctcccccgaggacaacgagcagaagcagctgttcgtggagcagcacaagcactacctggacgagatcatcgagcagatctccgagttctccaagcgggtgatcctggccgacgccaacctggacaaggtgctgtccgcctacaacaagcaccgggacaagcccatccgggagcaggccgagaacatcatccacctgttcaccctgaccaacctgggcgcccccgccgccttcaagtacttcgacaccaccatcgaccggaagcggtacacctccaccaaggaggtgctggacgccaccctgatccaccagtccatcaccggcctgtacgagacccggatcgacctgtcccagctgggcggcgac

SEQ ID NO: 988 - protein, 1367 aa, synthetic construct
  REGION 1..1367: note = Synthetic
DKKYSIGLDIGTNSVGWAVITDEYKVPSKKFKVLGNTDRHSIKKNLIGALLFDSGETAEATRLKRTARRRYTRRKNRICYLQEIFSNEMAKVDDSFFHRLEESFLVEEDKKHERHPIFGNIVDEVAYHEKYPTIYHLRKKLVDSTDKADLRLIYLALAHMIKFRGHFLIEGDLNPDNSDVDKLFIQLVQTYNQLFEENPINASGVDAKAILSARLSKSRRLENLIAQLPGEKKNGLFGNLIALSLGLTPNFKSNFDLAEDAKLQLSKDTYDDDLDNLLAQIGDQYADLFLAAKNLSDAILLSDILRVNTEITKAPLSASMIKRYDEHHQDLTLLKALVRQQLPEKYKEIFFDQSKNGYAGYIDGGASQEEFYKFIKPILEKMDGTEELLVKLNREDLLRKQRTFDNGSIPHQIHLGELHAILRRQEDFYPFLKDNREKIEKILTFRIPYYVGPLARGNSRFAWMTRKSEETITPWNFEEVVDKGASAQSFIERMTNFDKNLPNEKVLPKHSLLYEYFTVYNELTKVKYVTEGMRKPAFLSGEQKKAIVDLLFKTNRKVTVKQLKEDYFKKIECFDSVEISGVEDRFNASLGTYHDLLKIIKDKDFLDNEENEDILEDIVLTLTLFEDREMIEERLKTYAHLFDDKVMKQLKRRRYTGWGRLSRKLINGIRDKQSGKTILDFLKSDGFANRNFMQLIHDDSLTFKEDIQKAQVSGQGDSLHEHIANLAGSPAIKKGILQTVKVVDELVKVMGRHKPENIVIEMARENQTTQKGQKNSRERMKRIEEGIKELGSQILKEHPVENTQLQNEKLYLYYLQNGRDMYVDQELDINRLSDYDVDFIVPQSFLKDDSIDNKVLTRSDKNRGKSDNVPSEEVVKKMKNYWRQLLNAKLITQRKFDNLTKAERGGLSELDKAGFIKRQLVETRQITKHVAQILDSRMNTKYDENDKLIREVKVITLKSKLVSDFRKDFQFYKVREINNYHHAHDAYLNAVVGTALIKKYPKLESEFVYGDYKVYDVRKMIAKSEQEIGKATAKYFFYSNIMNFFKTEITLANGEIRKRPLIETNGETGEIVWDKGRDFATVRKVLSMPQVNIVKKTEVQTGGFSKESILPKRNSDKLIARKKDWDPKKYGGFDSPTVAYSVLVVAKVEKGKSKKLKSVKELLGITIMERSSFEKNPIDFLEAKGYKEVKKDLIIKLPKYSLFELENGRKRMLASAGELQKGNELALPSKYVNFLYLASHYEKLKGSPEDNEQKQLFVEQHKHYLDEIIEQISEFSKRVILADANLDKVLSAYNKHRDKPIREQAENIIHLFTLTNLGAPAAFKYFDTTIDRKRYTSTKEVLDATLIHQSITGLYETRIDLSQLGGD

SEQ ID NO: 989 - DNA, 4101 bp, synthetic construct
  misc_feature 1..4101: note = Synthetic
  source 1..4101: mol_type = other DNA
gacaagaagtactccatcggcctggacatcggcaccaactccgtgggctgggccgtgatcaccgacgagtacaaggtgccctccaagaagttcaaggtgctgggcaacaccgaccggcactccatcaagaagaacctgatcggcgccctgctgttcgactccggcgagaccgccgaggccacccggctgaagcggaccgcccggcggcggtacacccggcggaagaaccggatctgctacctgcaggagatcttctccaacgagatggccaaggtggacgactccttcttccaccggctggaggagtccttcctggtggaggaggacaagaagcacgagcggcaccccatcttcggcaacatcgtggacgaggtggcctaccacgagaagtaccccaccatctaccacctgcggaagaagctggtggactccaccgacaaggccgacctgcggctgatctacctggccctggcccacatgatcaagttccggggccacttcctgatcgagggcgacctgaaccccgacaactccgacgtggacaagctgttcatccagctggtgcagacctacaaccagctgttcgaggagaaccccatcaacgcctccggcgtggacgccaaggccatcctgtccgcccggctgtccaagtcccggcggctggagaacctgatcgcccagctgcccggcgagaagaagaacggcctgttcggcaacctgatcgccctgtccctgggcctgacccccaacttcaagtccaacttcgacctggccgaggacgccaagctgcagctgtccaaggacacctacgacgacgacctggacaacctgctggcccagatcggcgaccagtacgccgacctgttcctggccgccaagaacctgtccgacgccatcctgctgtccgacatcctgcgggtgaacaccgagatcaccaaggcccccctgtccgcctccatgatcaagcggtacgacgagcaccaccaggacctgaccctgctgaaggccctggtgcggcagcagctgcccgagaagtacaaggagatcttcttcgaccagtccaagaacggctacgccggctacatcgacggcggcgcctcccaggaggagttctacaagttcatcaagcccatcctggagaagatggacggcaccgaggagctgctggtgaagctgaaccgggaggacctgctgcggaagcagcggaccttcgacaacggctccatcccccaccagatccacctgggcgagctgcacgccatcctgcggcggcaggaggacttctaccccttcctgaaggacaaccgggagaagatcgagaagatcctgaccttccggatcccctactacgtgggccccctggcccggggcaactcccggttcgcctggatgacccggaagtccgaggagaccatcaccccctggaacttcgaggaggtggtggacaagggcgcctccgcccagtccttcatcgagcggatgaccaacttcgacaagaacctgcccaacgagaaggtgctgcccaagcactccctgctgtacgagtacttcaccgtgtacaacgagctgaccaaggtgaagtacgtgaccgagggcatgcggaagcccgccttcctgtccggcgagcagaagaaggccatcgtggacctgctgttcaagaccaaccggaaggtgaccgtgaagcagctgaaggaggactacttcaagaagatcgagtgcttcgactccgtggagatctccggcgtggaggaccggttcaacgcctccctgggcacctaccacgacctgctgaagatcatcaaggacaaggacttcctggacaacgaggagaacgaggacatcctggaggacatcgtgctgaccctgaccctgttcgaggaccgggagatgatcgaggagcggctgaagacctacgcccacctgttcgacgacaaggtgatgaagcagctgaagcggcggcggtacaccggctggggccggctgtcccggaagctgatcaacggcatccgggacaagcagtccggcaagaccatcctggacttcctgaagtccgacggcttcgccaaccggaacttcatgcagctgatccacgacgactccctgaccttcaaggaggacatccagaaggcccaggtgtccggccagggcgactccctgcacgagcacatcgccaacctggccggctcccccgccatcaagaagggcatcctgcagaccgtgaaggtggtggacgagctggtgaaggtgatgggccggcacaagcccgagaacatcgtgatcgagatggcccgggagaaccagaccacccagaagggccagaagaactcccgggagcggatgaagcggatcgaggagggcatcaaggagctgggctcccagatcctgaaggagcaccccgtggagaacacccagctgcagaacgagaagctgtacctgtactacctgcagaacggccgggacatgtacgtggaccaggagctggacatcaaccggctgtccgactacgacgtggacaagatcgtgccccagtccttcctgaaggacgactccatcgacaacaaggtgctgacccggtccgacaagaaccggggcaagtccgacaacgtgccctccgaggaggtggtgaagaagatgaagaactactggcggcagctgctgaacgccaagctgatcacccagcggaagttcgacaacctgaccaaggccgagcggggcggcctgtccgagctggacaaggccggcttcatcaagcggcagctggtggagacccggcagatcaccaagcacgtggcccagatcctggactcccggatgaacaccaagtacgacgagaacgacaagctgatccgggaggtgaaggtgatcaccctgaagtccaagctggtgtccgacttccggaaggacttccagttctacaaggtgcgggagatcaacaactaccaccacgcccacgacgcctacctgaacgccgtggtgggcaccgccctgatcaagaagtaccccaagctggagtccgagttcgtgtacggcgactacaaggtgtacgacgtgcggaagatgatcgccaagtccgagcaggagatcggcaaggccaccgccaagtacttcttctactccaacatcatgaacttcttcaagaccgagatcaccctggccaacggcgagatccggaagcggcccctgatcgagaccaacggcgagaccggcgagatcgtgtgggacaagggccgggacttcgccaccgtgcggaaggtgctgtccatgccccaggtgaacatcgtgaagaagaccgaggtgcagaccggcggcttctccaaggagtccatcctgcccaagcggaactccgacaagctgatcgcccggaagaaggactgggaccccaagaagtacggcggcttcgactcccccaccgtggcctactccgtgctggtggtggccaaggtggagaagggcaagtccaagaagctgaagtccgtgaaggagctgctgggcatcaccatcatggagcggtcctccttcgagaagaaccccatcgacttcctggaggccaagggctacaaggaggtgaagaaggacctgatcatcaagctgcccaagtactccctgttcgagctggagaacggccggaagcggatgctggcctccgccggcgagctgcagaagggcaacgagctggccctgccctccaagtacgtgaacttcctgtacctggcctcccactacgagaagctgaagggctcccccgaggacaacgagcagaagcagctgttcgtggagcagcacaagcactacctggacgagatcatcgagcagatctccgagttctccaagcgggtgatcctggccgacgccaacctggacaaggtgctgtccgcctacaacaagcaccgggacaagcccatccgggagcaggccgagaacatcatccacctgttcaccctgaccaacctgggcgcccccgccgccttcaagtacttcgacaccaccatcgaccggaagcggtacacctccaccaaggaggtgctggacgccaccctgatccaccagtccatcaccggcctgtacgagacccggatcgacctgtcccagctgggcggcgac

SEQ ID NO: 990 - protein, 1367 aa, synthetic construct
  REGION 1..1367: note = Synthetic
DKKYSIGLDIGTNSVGWAVITDEYKVPSKKFKVLGNTDRHSIKKNLIGALLFDSGETAEATRLKRTARRRYTRRKNRICYLQEIFSNEMAKVDDSFFHRLEESFLVEEDKKHERHPIFGNIVDEVAYHEKYPTIYHLRKKLVDSTDKADLRLIYLALAHMIKFRGHFLIEGDLNPDNSDVDKLFIQLVQTYNQLFEENPINASGVDAKAILSARLSKSRRLENLIAQLPGEKKNGLFGNLIALSLGLTPNFKSNFDLAEDAKLQLSKDTYDDDLDNLLAQIGDQYADLFLAAKNLSDAILLSDILRVNTEITKAPLSASMIKRYDEHHQDLTLLKALVRQQLPEKYKEIFFDQSKNGYAGYIDGGASQEEFYKFIKPILEKMDGTEELLVKLNREDLLRKQRTFDNGSIPHQIHLGELHAILRRQEDFYPFLKDNREKIEKILTFRIPYYVGPLARGNSRFAWMTRKSEETITPWNFEEVVDKGASAQSFIERMTNFDKNLPNEKVLPKHSLLYEYFTVYNELTKVKYVTEGMRKPAFLSGEQKKAIVDLLFKTNRKVTVKQLKEDYFKKIECFDSVEISGVEDRFNASLGTYHDLLKIIKDKDFLDNEENEDILEDIVLTLTLFEDREMIEERLKTYAHLFDDKVMKQLKRRRYTGWGRLSRKLINGIRDKQSGKTILDFLKSDGFANRNFMQLIHDDSLTFKEDIQKAQVSGQGDSLHEHIANLAGSPAIKKGILQTVKVVDELVKVMGRHKPENIVIEMARENQTTQKGQKNSRERMKRIEEGIKELGSQILKEHPVENTQLQNEKLYLYYLQNGRDMYVDQELDINRLSDYDVDKIVPQSFLKDDSIDNKVLTRSDKNRGKSDNVPSEEVVKKMKNYWRQLLNAKLITQRKFDNLTKAERGGLSELDKAGFIKRQLVETRQITKHVAQILDSRMNTKYDENDKLIREVKVITLKSKLVSDFRKDFQFYKVREINNYHHAHDAYLNAVVGTALIKKYPKLESEFVYGDYKVYDVRKMIAKSEQEIGKATAKYFFYSNIMNFFKTEITLANGEIRKRPLIETNGETGEIVWDKGRDFATVRKVLSMPQVNIVKKTEVQTGGFSKESILPKRNSDKLIARKKDWDPKKYGGFDSPTVAYSVLVVAKVEKGKSKKLKSVKELLGITIMERSSFEKNPIDFLEAKGYKEVKKDLIIKLPKYSLFELENGRKRMLASAGELQKGNELALPSKYVNFLYLASHYEKLKGSPEDNEQKQLFVEQHKHYLDEIIEQISEFSKRVILADANLDKVLSAYNKHRDKPIREQAENIIHLFTLTNLGAPAAFKYFDTTIDRKRYTSTKEVLDATLIHQSITGLYETRIDLSQLGGD

SEQ ID NO: 991 - DNA, 4101 bp, synthetic construct
  misc_feature 1..4101: note = Synthetic
  source 1..4101: mol_type = other DNA
gacaagaagtactccatcggcctggacatcggcaccaactccgtgggctgggccgtgatcaccgacgagtacaaggtgccctccaagaagttcaaggtgctgggcaacaccgaccggcactccatcaagaagaacctgatcggcgccctgctgttcgactccggcgagaccgccgaggccacccggctgaagcggaccgcccggcggcggtacacccggcggaagaaccggatctgctacctgcaggagatcttctccaacgagatggccaaggtggacgactccttcttccaccggctggaggagtccttcctggtggaggaggacaagaagcacgagcggcaccccatcttcggcaacatcgtggacgaggtggcctaccacgagaagtaccccaccatctaccacctgcggaagaagctggtggactccaccgacaaggccgacctgcggctgatctacctggccctggcccacatgatcaagttccggggccacttcctgatcgagggcgacctgaaccccgacaactccgacgtggacaagctgttcatccagctggtgcagacctacaaccagctgttcgaggagaaccccatcaacgcctccggcgtggacgccaaggccatcctgtccgcccggctgtccaagtcccggcggctggagaacctgatcgcccagctgcccggcgagaagaagaacggcctgttcggcaacctgatcgccctgtccctgggcctgacccccaacttcaagtccaacttcgacctggccgaggacgccaagctgcagctgtccaaggacacctacgacgacgacctggacaacctgctggcccagatcggcgaccagtacgccgacctgttcctggccgccaagaacctgtccgacgccatcctgctgtccgacatcctgcgggtgaacaccgagatcaccaaggcccccctgtccgcctccatgatcaagcggtacgacgagcaccaccaggacctgaccctgctgaaggccctggtgcggcagcagctgcccgagaagtacaaggagatcttcttcgaccagtccaagaacggctacgccggctacatcgacggcggcgcctcccaggaggagttctacaagttcatcaagcccatcctggagaagatggacggcaccgaggagctgctggtgaagctgaaccgggaggacctgctgcggaagcagcggaccttcgacaacggctccatcccccaccagatccacctgggcgagctgcacgccatcctgcggcggcaggaggacttctaccccttcctgaaggacaaccgggagaagatcgagaagatcctgaccttccggatcccctactacgtgggccccctggcccggggcaactcccggttcgcctggatgacccggaagtccgaggagaccatcaccccctggaacttcgaggaggtggtggacaagggcgcctccgcccagtccttcatcgagcggatgaccaacttcgacaagaacctgcccaacgagaaggtgctgcccaagcactccctgctgtacgagtacttcaccgtgtacaacgagctgaccaaggtgaagtacgtgaccgagggcatgcggaagcccgccttcctgtccggcgagcagaagaaggccatcgtggacctgctgttcaagaccaaccggaaggtgaccgtgaagcagctgaaggaggactacttcaagaagatcgagtgcttcgactccgtggagatctccggcgtggaggaccggttcaacgcctccctgggcacctaccacgacctgctgaagatcatcaaggacaaggacttcctggacaacgaggagaacgaggacatcctggaggacatcgtgctgaccctgaccctgttcgaggaccgggagatgatcgaggagcggctgaagacctacgcccacctgttcgacgacaaggtgatgaagcagctgaagcggcggcggtacaccggctggggccggctgtcccggaagctgatcaacggcatccgggacaagcagtccggcaagaccatcctggacttcctgaagtccgacggcttcgccaaccggaacttcatgcagctgatccacgacgactccctgaccttcaaggaggacatccagaaggcccaggtgtccggccagggcgactccctgcacgagcacatcgccaacctggccggctcccccgccatcaagaagggcatcctgcagaccgtgaaggtggtggacgagctggtgaaggtgatgggccggcacaagcccgagaacatcgtgatcgagatggcccgggagaaccagaccacccagaagggccagaagaactcccgggagcggatgaagcggatcgaggagggcatcaaggagctgggctcccagatcctgaaggagcaccccgtggagaacacccagctgcagaacgagaagctgtacctgtactacctgcagaacggccgggacatgtacgtggaccaggagctggacatcaaccggctgtccgactacgacgtggacaacatcgtgccccagtccttcctgaaggacgactccatcgacaacaaggtgctgacccggtccgacaagaaccggggcaagtccgacaacgtgccctccgaggaggtggtgaagaagatgaagaactactggcggcagctgctgaacgccaagctgatcacccagcggaagttcgacaacctgaccaaggccgagcggggcggcctgtccgagctggacaaggccggcttcatcaagcggcagctggtggagacccggcagatcaccaagcacgtggcccagatcctggactcccggatgaacaccaagtacgacgagaacgacaagctgatccgggaggtgaaggtgatcaccctgaagtccaagctggtgtccgacttccggaaggacttccagttctacaaggtgcgggagatcaacaactaccaccacgcccacgacgcctacctgaacgccgtggtgggcaccgccctgatcaagaagtaccccaagctggagtccgagttcgtgtacggcgactacaaggtgtacgacgtgcggaagatgatcgccaagtccgagcaggagatcggcaaggccaccgccaagtacttcttctactccaacatcatgaacttcttcaagaccgagatcaccctggccaacggcgagatccggaagcggcccctgatcgagaccaacggcgagaccggcgagatcgtgtgggacaagggccgggacttcgccaccgtgcggaaggtgctgtccatgccccaggtgaacatcgtgaagaagaccgaggtgcagaccggcggcttctccaaggagtccatcctgcccaagcggaactccgacaagctgatcgcccggaagaaggactgggaccccaagaagtacggcggcttcgactcccccaccgtggcctactccgtgctggtggtggccaaggtggagaagggcaagtccaagaagctgaagtccgtgaaggagctgctgggcatcaccatcatggagcggtcctccttcgagaagaaccccatcgacttcctggaggccaagggctacaaggaggtgaagaaggacctgatcatcaagctgcccaagtactccctgttcgagctggagaacggccggaagcggatgctggcctccgccggcgagctgcagaagggcaacgagctggccctgccctccaagtacgtgaacttcctgtacctggcctcccactacgagaagctgaagggctcccccgaggacaacgagcagaagcagctgttcgtggagcagcacaagcactacctggacgagatcatcgagcagatctccgagttctccaagcgggtgatcctggccgacgccaacctggacaaggtgctgtccgcctacaacaagcaccgggacaagcccatccgggagcaggccgagaacatcatccacctgttcaccctgaccaacctgggcgcccccgccgccttcaagtacttcgacaccaccatcgaccggaagcggtacacctccaccaaggaggtgctggacgccaccctgatccaccagtccatcaccggcctgtacgagacccggatcgacctgtcccagctgggcggcgac

SEQ ID NO: 992 - protein, 1367 aa, synthetic construct
  REGION 1..1367: note = Synthetic
DKKYSIGLDIGTNSVGWAVITDEYKVPSKKFKVLGNTDRHSIKKNLIGALLFDSGETAEATRLKRTARRRYTRRKNRICYLQEIFSNEMAKVDDSFFHRLEESFLVEEDKKHERHPIFGNIVDEVAYHEKYPTIYHLRKKLVDSTDKADLRLIYLALAHMIKFRGHFLIEGDLNPDNSDVDKLFIQLVQTYNQLFEENPINASGVDAKAILSARLSKSRRLENLIAQLPGEKKNGLFGNLIALSLGLTPNFKSNFDLAEDAKLQLSKDTYDDDLDNLLAQIGDQYADLFLAAKNLSDAILLSDILRVNTEITKAPLSASMIKRYDEHHQDLTLLKALVRQQLPEKYKEIFFDQSKNGYAGYIDGGASQEEFYKFIKPILEKMDGTEELLVKLNREDLLRKQRTFDNGSIPHQIHLGELHAILRRQEDFYPFLKDNREKIEKILTFRIPYYVGPLARGNSRFAWMTRKSEETITPWNFEEVVDKGASAQSFIERMTNFDKNLPNEKVLPKHSLLYEYFTVYNELTKVKYVTEGMRKPAFLSGEQKKAIVDLLFKTNRKVTVKQLKEDYFKKIECFDSVEISGVEDRFNASLGTYHDLLKIIKDKDFLDNEENEDILEDIVLTLTLFEDREMIEERLKTYAHLFDDKVMKQLKRRRYTGWGRLSRKLINGIRDKQSGKTILDFLKSDGFANRNFMQLIHDDSLTFKEDIQKAQVSGQGDSLHEHIANLAGSPAIKKGILQTVKVVDELVKVMGRHKPENIVIEMARENQTTQKGQKNSRERMKRIEEGIKELGSQILKEHPVENTQLQNEKLYLYYLQNGRDMYVDQELDINRLSDYDVDNIVPQSFLKDDSIDNKVLTRSDKNRGKSDNVPSEEVVKKMKNYWRQLLNAKLITQRKFDNLTKAERGGLSELDKAGFIKRQLVETRQITKHVAQILDSRMNTKYDENDKLIREVKVITLKSKLVSDFRKDFQFYKVREINNYHHAHDAYLNAVVGTALIKKYPKLESEFVYGDYKVYDVRKMIAKSEQEIGKATAKYFFYSNIMNFFKTEITLANGEIRKRPLIETNGETGEIVWDKGRDFATVRKVLSMPQVNIVKKTEVQTGGFSKESILPKRNSDKLIARKKDWDPKKYGGFDSPTVAYSVLVVAKVEKGKSKKLKSVKELLGITIMERSSFEKNPIDFLEAKGYKEVKKDLIIKLPKYSLFELENGRKRMLASAGELQKGNELALPSKYVNFLYLASHYEKLKGSPEDNEQKQLFVEQHKHYLDEIIEQISEFSKRVILADANLDKVLSAYNKHRDKPIREQAENIIHLFTLTNLGAPAAFKYFDTTIDRKRYTSTKEVLDATLIHQSITGLYETRIDLSQLGGD

SEQ ID NO: 993 - DNA, 4101 bp, synthetic construct
  misc_feature 1..4101: note = Synthetic
  source 1..4101: mol_type = other DNA
gacaagaagtactccatcggcctggacatcggcaccaactccgtgggctgggccgtgatcaccgacgagtacaaggtgccctccaagaagttcaaggtgctgggcaacaccgaccggcactccatcaagaagaacctgatcggcgccctgctgttcgactccggcgagaccgccgaggccacccggctgaagcggaccgcccggcggcggtacacccggcggaagaaccggatctgctacctgcaggagatcttctccaacgagatggccaaggtggacgactccttcttccaccggctggaggagtccttcctggtggaggaggacaagaagcacgagcggcaccccatcttcggcaacatcgtggacgaggtggcctaccacgagaagtaccccaccatctaccacctgcggaagaagctggtggactccaccgacaaggccgacctgcggctgatctacctggccctggcccacatgatcaagttccggggccacttcctgatcgagggcgacctgaaccccgacaactccgacgtggacaagctgttcatccagctggtgcagacctacaaccagctgttcgaggagaaccccatcaacgcctccggcgtggacgccaaggccatcctgtccgcccggctgtccaagtcccggcggctggagaacctgatcgcccagctgcccggcgagaagaagaacggcctgttcggcaacctgatcgccctgtccctgggcctgacccccaacttcaagtccaacttcgacctggccgaggacgccaagctgcagctgtccaaggacacctacgacgacgacctggacaacctgctggcccagatcggcgaccagtacgccgacctgttcctggccgccaagaacctgtccgacgccatcctgctgtccgacatcctgcgggtgaacaccgagatcaccaaggcccccctgtccgcctccatgatcaagcggtacgacgagcaccaccaggacctgaccctgctgaaggccctggtgcggcagcagctgcccgagaagtacaaggagatcttcttcgaccagtccaagaacggctacgccggctacatcgacggcggcgcctcccaggaggagttctacaagttcatcaagcccatcctggagaagatggacggcaccgaggagctgctggtgaagctgaaccgggaggacctgctgcggaagcagcggaccttcgacaacggctccatcccccaccagatccacctgggcgagctgcacgccatcctgcggcggcaggaggacttctaccccttcctgaaggacaaccgggagaagatcgagaagatcctgaccttccggatcccctactacgtgggccccctggcccggggcaactcccggttcgcctggatgacccggaagtccgaggagaccatcaccccctggaacttcgaggaggtggtggacaagggcgcctccgcccagtccttcatcgagcggatgaccaacttcgacaagaacctgcccaacgagaaggtgctgcccaagcactccctgctgtacgagtacttcaccgtgtacaacgagctgaccaaggtgaagtacgtgaccgagggcatgcggaagcccgccttcctgtccggcgagcagaagaaggccatcgtggacctgctgttcaagaccaaccggaaggtgaccgtgaagcagctgaaggaggactacttcaagaagatcgagtgcttcgactccgtggagatctccggcgtggaggaccggttcaacgcctccctgggcacctaccacgacctgctgaagatcatcaaggacaaggacttcctggacaacgaggagaacgaggacatcctggaggacatcgtgctgaccctgaccctgttcgaggaccgggagatgatcgaggagcggctgaagacctacgcccacctgttcgacgacaaggtgatgaagcagctgaagcggcggcggtacaccggctggggccggctgtcccggaagctgatcaacggcatccgggacaagcagtccggcaagaccatcctggacttcctgaagtccgacggcttcgccaaccggaacttcatgcagctgatccacgacgactccctgaccttcaaggaggacatccagaaggcccaggtgtccggccagggcgactccctgcacgagcacatcgccaacctggccggctcccccgccatcaagaagggcatcctgcagaccgtgaaggtggtggacgagctggtgaaggtgatgggccggcacaagcccgagaacatcgtgatcgagatggcccgggagaaccagaccacccagaagggccagaagaactcccgggagcggatgaagcggatcgaggagggcatcaaggagctgggctcccagatcctgaaggagcaccccgtggagaacacccagctgcagaacgagaagctgtacctgtactacctgcagaacggccgggacatgtacgtggaccaggagctggacatcaaccggctgtccgactacgacgtggaccaaatcgtgccccagtccttcctgaaggacgactccatcgacaacaaggtgctgacccggtccgacaagaaccggggcaagtccgacaacgtgccctccgaggaggtggtgaagaagatgaagaactactggcggcagctgctgaacgccaagctgatcacccagcggaagttcgacaacctgaccaaggccgagcggggcggcctgtccgagctggacaaggccggcttcatcaagcggcagctggtggagacccggcagatcaccaagcacgtggcccagatcctggactcccggatgaacaccaagtacgacgagaacgacaagctgatccgggaggtgaaggtgatcaccctgaagtccaagctggtgtccgacttccggaaggacttccagttctacaaggtgcgggagatcaacaactaccaccacgcccacgacgcctacctgaacgccgtggtgggcaccgccctgatcaagaagtaccccaagctggagtccgagttcgtgtacggcgactacaaggtgtacgacgtgcggaagatgatcgccaagtccgagcaggagatcggcaaggccaccgccaagtacttcttctactccaacatcatgaacttcttcaagaccgagatcaccctggccaacggcgagatccggaagcggcccctgatcgagaccaacggcgagaccggcgagatcgtgtgggacaagggccgggacttcgccaccgtgcggaaggtgctgtccatgccccaggtgaacatcgtgaagaagaccgaggtgcagaccggcggcttctccaaggagtccatcctgcccaagcggaactccgacaagctgatcgcccggaagaaggactgggaccccaagaagtacggcggcttcgactcccccaccgtggcctactccgtgctggtggtggccaaggtggagaagggcaagtccaagaagctgaagtccgtgaaggagctgctgggcatcaccatcatggagcggtcctccttcgagaagaaccccatcgacttcctggaggccaagggctacaaggaggtgaagaaggacctgatcatcaagctgcccaagtactccctgttcgagctggagaacggccggaagcggatgctggcctccgccggcgagctgcagaagggcaacgagctggccctgccctccaagtacgtgaacttcctgtacctggcctcccactacgagaagctgaagggctcccccgaggacaacgagcagaagcagctgttcgtggagcagcacaagcactacctggacgagatcatcgagcagatctccgagttctccaagcgggtgatcctggccgacgccaacctggacaaggtgctgtccgcctacaacaagcaccgggacaagcccatccgggagcaggccgagaacatcatccacctgttcaccctgaccaacctgggcgcccccgccgccttcaagtacttcgacaccaccatcgaccggaagcggtacacctccaccaaggaggtgctggacgccaccctgatccaccagtccatcaccggcctgtacgagacccggatcgacctgtcccagctgggcggcgac

SEQ ID NO: 994 - protein, 1367 aa, synthetic construct
  REGION 1..1367: note = Synthetic
DKKYSIGLDIGTNSVGWAVITDEYKVPSKKFKVLGNTDRHSIKKNLIGALLFDSGETAEATRLKRTARRRYTRRKNRICYLQEIFSNEMAKVDDSFFHRLEESFLVEEDKKHERHPIFGNIVDEVAYHEKYPTIYHLRKKLVDSTDKADLRLIYLALAHMIKFRGHFLIEGDLNPDNSDVDKLFIQLVQTYNQLFEENPINASGVDAKAILSARLSKSRRLENLIAQLPGEKKNGLFGNLIALSLGLTPNFKSNFDLAEDAKLQLSKDTYDDDLDNLLAQIGDQYADLFLAAKNLSDAILLSDILRVNTEITKAPLSASMIKRYDEHHQDLTLLKALVRQQLPEKYKEIFFDQSKNGYAGYIDGGASQEEFYKFIKPILEKMDGTEELLVKLNREDLLRKQRTFDNGSIPHQIHLGELHAILRRQEDFYPFLKDNREKIEKILTFRIPYYVGPLARGNSRFAWMTRKSEETITPWNFEEVVDKGASAQSFIERMTNFDKNLPNEKVLPKHSLLYEYFTVYNELTKVKYVTEGMRKPAFLSGEQKKAIVDLLFKTNRKVTVKQLKEDYFKKIECFDSVEISGVEDRFNASLGTYHDLLKIIKDKDFLDNEENEDILEDIVLTLTLFEDREMIEERLKTYAHLFDDKVMKQLKRRRYTGWGRLSRKLINGIRDKQSGKTILDFLKSDGFANRNFMQLIHDDSLTFKEDIQKAQVSGQGDSLHEHIANLAGSPAIKKGILQTVKVVDELVKVMGRHKPENIVIEMARENQTTQKGQKNSRERMKRIEEGIKELGSQILKEHPVENTQLQNEKLYLYYLQNGRDMYVDQELDINRLSDYDVDQIVPQSFLKDDSIDNKVLTRSDKNRGKSDNVPSEEVVKKMKNYWRQLLNAKLITQRKFDNLTKAERGGLSELDKAGFIKRQLVETRQITKHVAQILDSRMNTKYDENDKLIREVKVITLKSKLVSDFRKDFQFYKVREINNYHHAHDAYLNAVVGTALIKKYPKLESEFVYGDYKVYDVRKMIAKSEQEIGKATAKYFFYSNIMNFFKTEITLANGEIRKRPLIETNGETGEIVWDKGRDFATVRKVLSMPQVNIVKKTEVQTGGFSKESILPKRNSDKLIARKKDWDPKKYGGFDSPTVAYSVLVVAKVEKGKSKKLKSVKELLGITIMERSSFEKNPIDFLEAKGYKEVKKDLIIKLPKYSLFELENGRKRMLASAGELQKGNELALPSKYVNFLYLASHYEKLKGSPEDNEQKQLFVEQHKHYLDEIIEQISEFSKRVILADANLDKVLSAYNKHRDKPIREQAENIIHLFTLTNLGAPAAFKYFDTTIDRKRYTSTKEVLDATLIHQSITGLYETRIDLSQLGGD

SEQ ID NO: 995 - DNA, 4101 bp, synthetic construct
  misc_feature 1..4101: note = Synthetic
  source 1..4101: mol_type = other DNA
gacaagaagtactccatcggcctggacatcggcaccaactccgtgggctgggccgtgatcaccgacgagtacaaggtgccctccaagaagttcaaggtgctgggcaacaccgaccggcactccatcaagaagaacctgatcggcgccctgctgttcgactccggcgagaccgccgaggccacccggctgaagcggaccgcccggcggcggtacacccggcggaagaaccggatctgctacctgcaggagatcttctccaacgagatggccaaggtggacgactccttcttccaccggctggaggagtccttcctggtggaggaggacaagaagcacgagcggcaccccatcttcggcaacatcgtggacgaggtggcctaccacgagaagtaccccaccatctaccacctgcggaagaagctggtggactccaccgacaaggccgacctgcggctgatctacctggccctggcccacatgatcaagttccggggccacttcctgatcgagggcgacctgaaccccgacaactccgacgtggacaagctgttcatccagctggtgcagacctacaaccagctgttcgaggagaaccccatcaacgcctccggcgtggacgccaaggccatcctgtccgcccggctgtccaagtcccggcggctggagaacctgatcgcccagctgcccggcgagaagaagaacggcctgttcggcaacctgatcgccctgtccctgggcctgacccccaacttcaagtccaacttcgacctggccgaggacgccaagctgcagctgtccaaggacacctacgacgacgacctggacaacctgctggcccagatcggcgaccagtacgccgacctgttcctggccgccaagaacctgtccgacgccatcctgctgtccgacatcctgcgggtgaacaccgagatcaccaaggcccccctgtccgcctccatgatcaagcggtacgacgagcaccaccaggacctgaccctgctgaaggccctggtgcggcagcagctgcccgagaagtacaaggagatcttcttcgaccagtccaagaacggctacgccggctacatcgacggcggcgcctcccaggaggagttctacaagttcatcaagcccatcctggagaagatggacggcaccgaggagctgctggtgaagctgaaccgggaggacctgctgcggaagcagcggaccttcgacaacggctccatcccccaccagatccacctgggcgagctgcacgccatcctgcggcggcaggaggacttctaccccttcctgaaggacaaccgggagaagatcgagaagatcctgaccttccggatcccctactacgtgggccccctggcccggggcaactcccggttcgcctggatgacccggaagtccgaggagaccatcaccccctggaacttcgaggaggtggtggacaagggcgcctccgcccagtccttcatcgagcggatgaccaacttcgacaagaacctgcccaacgagaaggtgctgcccaagcactccctgctgtacgagtacttcaccgtgtacaacgagctgaccaaggtgaagtacgtgaccgagggcatgcggaagcccgccttcctgtccggcgagcagaagaaggccatcgtggacctgctgttcaagaccaaccggaaggtgaccgtgaagcagctgaaggaggactacttcaagaagatcgagtgcttcgactccgtggagatctccggcgtggaggaccggttcaacgcctccctgggcacctaccacgacctgctgaagatcatcaaggacaaggacttcctggacaacgaggagaacgaggacatcctggaggacatcgtgctgaccctgaccctgttcgaggaccgggagatgatcgaggagcggctgaagacctacgcccacctgttcgacgacaaggtgatgaagcagctgaagcggcggcggtacaccggctggggccggctgtcccggaagctgatcaacggcatccgggacaagcagtccggcaagaccatcctggacttcctgaagtccgacggcttcgccaaccggaacttcatgcagctgatccacgacgactccctgaccttcaaggaggacatccagaaggcccaggtgtccggccagggcgactccctgcacgagcacatcgccaacctggccggctcccccgccatcaagaagggcatcctgcagaccgtgaaggtggtggacgagctggtgaaggtgatgggccggcacaagcccgagaacatcgtgatcgagatggcccgggagaaccagaccacccagaagggccagaagaactcccgggagcggatgaagcggatcgaggagggcatcaaggagctgggctcccagatcctgaaggagcaccccgtggagaacacccagctgcagaacgagaagctgtacctgtactacctgcagaacggccgggacatgtacgtggaccaggagctggacatcaaccggctgtccgactacgacgtggaccgcatcgtgccccagtccttcctgaaggacgactccatcgacaacaaggtgctgacccggtccgacaagaaccggggcaagtccgacaacgtgccctccgaggaggtggtgaagaagatgaagaactactggcggcagctgctgaacgccaagctgatcacccagcggaagttcgacaacctgaccaaggccgagcggggcggcctgtccgagctggacaaggccggcttcatcaagcggcagctggtggagacccggcagatcaccaagcacgtggcccagatcctggactcccggatgaacaccaagtacgacgagaacgacaagctgatccgggaggtgaaggtgatcaccctgaagtccaagctggtgtccgacttccggaaggacttccagttctacaaggtgcgggagatcaacaactaccaccacgcccacgacgcctacctgaacgccgtggtgggcaccgccctgatcaagaagtaccccaagctggagtccgagttcgtgtacggcgactacaaggtgtacgacgtgcggaagatgatcgccaagtccgagcaggagatcggcaaggccaccgccaagtacttcttctactccaacatcatgaacttcttcaagaccgagatcaccctggccaacggcgagatccggaagcggcccctgatcgagaccaacggcgagaccggcgagatcgtgtgggacaagggccgggacttcgccaccgtgcggaaggtgctgtccatgccccaggtgaacatcgtgaagaagaccgaggtgcagaccggcggcttctccaaggagtccatcctgcccaagcggaactccgacaagctgatcgcccggaagaaggactgggaccccaagaagtacggcggcttcgactcccccaccgtggcctactccgtgctggtggtggccaaggtggagaagggcaagtccaagaagctgaagtccgtgaaggagctgctgggcatcaccatcatggagcggtcctccttcgagaagaaccccatcgacttcctggaggccaagggctacaaggaggtgaagaaggacctgatcatcaagctgcccaagtactccctgttcgagctggagaacggccggaagcggatgctggcctccgccggcgagctgcagaagggcaacgagctggccctgccctccaagtacgtgaacttcctgtacctggcctcccactacgagaagctgaagggctcccccgaggacaacgagcagaagcagctgttcgtggagcagcacaagcactacctggacgagatcatcgagcagatctccgagttctccaagcgggtgatcctggccgacgccaacctggacaaggtgctgtccgcctacaacaagcaccgggacaagcccatccgggagcaggccgagaacatcatccacctgttcaccctgaccaacctgggcgcccccgccgccttcaagtacttcgacaccaccatcgaccggaagcggtacacctccaccaaggaggtgctggacgccaccctgatccaccagtccatcaccggcctgtacgagacccggatcgacctgtcccagctgggcggcgac

SEQ ID NO: 996 - protein, 1367 aa, synthetic construct
  REGION 1..1367: note = Synthetic
DKKYSIGLDIGTNSVGWAVITDEYKVPSKKFKVLGNTDRHSIKKNLIGALLFDSGETAEATRLKRTARRRYTRRKNRICYLQEIFSNEMAKVDDSFFHRLEESFLVEEDKKHERHPIFGNIVDEVAYHEKYPTIYHLRKKLVDSTDKADLRLIYLALAHMIKFRGHFLIEGDLNPDNSDVDKLFIQLVQTYNQLFEENPINASGVDAKAILSARLSKSRRLENLIAQLPGEKKNGLFGNLIALSLGLTPNFKSNFDLAEDAKLQLSKDTYDDDLDNLLAQIGDQYADLFLAAKNLSDAILLSDILRVNTEITKAPLSASMIKRYDEHHQDLTLLKALVRQQLPEKYKEIFFDQSKNGYAGYIDGGASQEEFYKFIKPILEKMDGTEELLVKLNREDLLRKQRTFDNGSIPHQIHLGELHAILRRQEDFYPFLKDNREKIEKILTFRIPYYVGPLARGNSRFAWMTRKSEETITPWNFEEVVDKGASAQSFIERMTNFDKNLPNEKVLPKHSLLYEYFTVYNELTKVKYVTEGMRKPAFLSGEQKKAIVDLLFKTNRKVTVKQLKEDYFKKIECFDSVEISGVEDRFNASLGTYHDLLKIIKDKDFLDNEENEDILEDIVLTLTLFEDREMIEERLKTYAHLFDDKVMKQLKRRRYTGWGRLSRKLINGIRDKQSGKTILDFLKSDGFANRNFMQLIHDDSLTFKEDIQKAQVSGQGDSLHEHIANLAGSPAIKKGILQTVKVVDELVKVMGRHKPENIVIEMARENQTTQKGQKNSRERMKRIEEGIKELGSQILKEHPVENTQLQNEKLYLYYLQNGRDMYVDQELDINRLSDYDVDRIVPQSFLKDDSIDNKVLTRSDKNRGKSDNVPSEEVVKKMKNYWRQLLNAKLITQRKFDNLTKAERGGLSELDKAGFIKRQLVETRQITKHVAQILDSRMNTKYDENDKLIREVKVITLKSKLVSDFRKDFQFYKVREINNYHHAHDAYLNAVVGTALIKKYPKLESEFVYGDYKVYDVRKMIAKSEQEIGKATAKYFFYSNIMNFFKTEITLANGEIRKRPLIETNGETGEIVWDKGRDFATVRKVLSMPQVNIVKKTEVQTGGFSKESILPKRNSDKLIARKKDWDPKKYGGFDSPTVAYSVLVVAKVEKGKSKKLKSVKELLGITIMERSSFEKNPIDFLEAKGYKEVKKDLIIKLPKYSLFELENGRKRMLASAGELQKGNELALPSKYVNFLYLASHYEKLKGSPEDNEQKQLFVEQHKHYLDEIIEQISEFSKRVILADANLDKVLSAYNKHRDKPIREQAENIIHLFTLTNLGAPAAFKYFDTTIDRKRYTSTKEVLDATLIHQSITGLYETRIDLSQLGGD

SEQ ID NO: 997 - DNA, 4101 bp, synthetic construct
  misc_feature 1..4101: note = Synthetic
  source 1..4101: mol_type = other DNA
gacaagaagtactccatcggcctggacatcggcaccaactccgtgggctgggccgtgatcaccgacgagtacaaggtgccctccaagaagttcaaggtgctgggcaacaccgaccggcactccatcaagaagaacctgatcggcgccctgctgttcgactccggcgagaccgccgaggccacccggctgaagcggaccgcccggcggcggtacacccggcggaagaaccggatctgctacctgcaggagatcttctccaacgagatggccaaggtggacgactccttcttccaccggctggaggagtccttcctggtggaggaggacaagaagcacgagcggcaccccatcttcggcaacatcgtggacgaggtggcctaccacgagaagtaccccaccatctaccacctgcggaagaagctggtggactccaccgacaaggccgacctgcggctgatctacctggccctggcccacatgatcaagttccggggccacttcctgatcgagggcgacctgaaccccgacaactccgacgtggacaagctgttcatccagctggtgcagacctacaaccagctgttcgaggagaaccccatcaacgcctccggcgtggacgccaaggccatcctgtccgcccggctgtccaagtcccggcggctggagaacctgatcgcccagctgcccggcgagaagaagaacggcctgttcggcaacctgatcgccctgtccctgggcctgacccccaacttcaagtccaacttcgacctggccgaggacgccaagctgcagctgtccaaggacacctacgacgacgacctggacaacctgctggcccagatcggcgaccagtacgccgacctgttcctggccgccaagaacctgtccgacgccatcctgctgtccgacatcctgcgggtgaacaccgagatcaccaaggcccccctgtccgcctccatgatcaagcggtacgacgagcaccaccaggacctgaccctgctgaaggccctggtgcggcagcagctgcccgagaagtacaaggagatcttcttcgaccagtccaagaacggctacgccggctacatcgacggcggcgcctcccaggaggagttctacaagttcatcaagcccatcctggagaagatggacggcaccgaggagctgctggtgaagctgaaccgggaggacctgctgcggaagcagcggaccttcgacaacggctccatcccccaccagatccacctgggcgagctgcacgccatcctgcggcggcaggaggacttctaccccttcctgaaggacaaccgggagaagatcgagaagatcctgaccttccggatcccctactacgtgggccccctggcccggggcaactcccggttcgcctggatgacccggaagtccgaggagaccatcaccccctggaacttcgaggaggtggtggacaagggcgcctccgcccagtccttcatcgagcggatgaccaacttcgacaagaacctgcccaacgagaaggtgctgcccaagcactccctgctgtacgagtacttcaccgtgtacaacgagctgaccaaggtgaagtacgtgaccgagggcatgcggaagcccgccttcctgtccggcgagcagaagaaggccatcgtggacctgctgttcaagaccaaccggaaggtgaccgtgaagcagctgaaggaggactacttcaagaagatcgagtgcttcgactccgtggagatctccggcgtggaggaccggttcaacgcctccctgggcacctaccacgacctgctgaagatcatcaaggacaaggacttcctggacaacgaggagaacgaggacatcctggaggacatcgtgctgaccctgaccctgttcgaggaccgggagatgatcgaggagcggctgaagacctacgcccacctgttcgacgacaaggtgatgaagcagctgaagcggcggcggtacaccggctggggccggctgtcccggaagctgatcaacggcatccgggacaagcagtccggcaagaccatcctggacttcctgaagtccgacggcttcgccaaccggaacttcatgcagctgatccacgacgactccctgaccttcaaggaggacatccagaaggcccaggtgtccggccagggcgactccctgcacgagcacatcgccaacctggccggctcccccgccatcaagaagggcatcctgcagaccgtgaaggtggtggacgagctggtgaaggtgatgggccggcacaagcccgagaacatcgtgatcgagatggcccgggagaaccagaccacccagaagggccagaagaactcccgggagcggatgaagcggatcgaggagggcatcaaggagctgggctcccagatcctgaaggagcaccccgtggagaacacccagctgcagaacgagaagctgtacctgtactacctgcagaacggccgggacatgtacgtggaccaggagctggacatcaaccggctgtccgactacgacgtggacaccatcgtgccccagtccttcctgaaggacgactccatcgacaacaaggtgctgacccggtccgacaagaaccggggcaagtccgacaacgtgccctccgaggaggtggtgaagaagatgaagaactactggcggcagctgctgaacgccaagctgatcacccagcggaagttcgacaacctgaccaaggccgagcggggcggcctgtccgagctggacaaggccggcttcatcaagcggcagctggtggagacccggcagatcaccaagcacgtggcccagatcctggactcccggatgaacaccaagtacgacgagaacgacaagctgatccgggaggtgaaggtgatcaccctgaagtccaagctggtgtccgacttccggaaggacttccagttctacaaggtgcgggagatcaacaactaccaccacgcccacgacgcctacctgaacgccgtggtgggcaccgccctgatcaagaagtaccccaagctggagtccgagttcgtgtacggcgactacaaggtgtacgacgtgcggaagatgatcgccaagtccgagcaggagatcggcaaggccaccgccaagtacttcttctactccaacatcatgaacttcttcaagaccgagatcaccctggccaacggcgagatccggaagcggcccctgatcgagaccaacggcgagaccggcgagatcgtgtgggacaagggccgggacttcgccaccgtgcggaaggtgctgtccatgccccaggtgaacatcgtgaagaagaccgaggtgcagaccggcggcttctccaaggagtccatcctgcccaagcggaactccgacaagctgatcgcccggaagaaggactgggaccccaagaagtacggcggcttcgactcccccaccgtggcctactccgtgctggtggtggccaaggtggagaagggcaagtccaagaagctgaagtccgtgaaggagctgctgggcatcaccatcatggagcggtcctccttcgagaagaaccccatcgacttcctggaggccaagggctacaaggaggtgaagaaggacctgatcatcaagctgcccaagtactccctgttcgagctggagaacggccggaagcggatgctggcctccgccggcgagctgcagaagggcaacgagctggccctgccctccaagtacgtgaacttcctgtacctggcctcccactacgagaagctgaagggctcccccgaggacaacgagcagaagcagctgttcgtggagcagcacaagcactacctggacgagatcatcgagcagatctccgagttctccaagcgggtgatcctggccgacgccaacctggacaaggtgctgtccgcctacaacaagcaccgggacaagcccatccgggagcaggccgagaacatcatccacctgttcaccctgaccaacctgggcgcccccgccgccttcaagtacttcgacaccaccatcgaccggaagcggtacacctccaccaaggaggtgctggacgccaccctgatccaccagtccatcaccggcctgtacgagacccggatcgacctgtcccagctgggcggcgac

SEQ ID NO: 998 - protein, 1367 aa, synthetic construct
  REGION 1..1367: note = Synthetic
DKKYSIGLDIGTNSVGWAVITDEYKVPSKKFKVLGNTDRHSIKKNLIGALLFDSGETAEATRLKRTARRRYTRRKNRICYLQEIFSNEMAKVDDSFFHRLEESFLVEEDKKHERHPIFGNIVDEVAYHEKYPTIYHLRKKLVDSTDKADLRLIYLALAHMIKFRGHFLIEGDLNPDNSDVDKLFIQLVQTYNQLFEENPINASGVDAKAILSARLSKSRRLENLIAQLPGEKKNGLFGNLIALSLGLTPNFKSNFDLAEDAKLQLSKDTYDDDLDNLLAQIGDQYADLFLAAKNLSDAILLSDILRVNTEITKAPLSASMIKRYDEHHQDLTLLKALVRQQLPEKYKEIFFDQSKNGYAGYIDGGASQEEFYKFIKPILEKMDGTEELLVKLNREDLLRKQRTFDNGSIPHQIHLGELHAILRRQEDFYPFLKDNREKIEKILTFRIPYYVGPLARGNSRFAWMTRKSEETITPWNFEEVVDKGASAQSFIERMTNFDKNLPNEKVLPKHSLLYEYFTVYNELTKVKYVTEGMRKPAFLSGEQKKAIVDLLFKTNRKVTVKQLKEDYFKKIECFDSVEISGVEDRFNASLGTYHDLLKIIKDKDFLDNEENEDILEDIVLTLTLFEDREMIEERLKTYAHLFDDKVMKQLKRRRYTGWGRLSRKLINGIRDKQSGKTILDFLKSDGFANRNFMQLIHDDSLTFKEDIQKAQVSGQGDSLHEHIANLAGSPAIKKGILQTVKVVDELVKVMGRHKPENIVIEMARENQTTQKGQKNSRERMKRIEEGIKELGSQILKEHPVENTQLQNEKLYLYYLQNGRDMYVDQELDINRLSDYDVDTIVPQSFLKDDSIDNKVLTRSDKNRGKSDNVPSEEVVKKMKNYWRQLLNAKLITQRKFDNLTKAERGGLSELDKAGFIKRQLVETRQITKHVAQILDSRMNTKYDENDKLIREVKVITLKSKLVSDFRKDFQFYKVREINNYHHAHDAYLNAVVGTALIKKYPKLESEFVYGDYKVYDVRKMIAKSEQEIGKATAKYFFYSNIMNFFKTEITLANGEIRKRPLIETNGETGEIVWDKGRDFATVRKVLSMPQVNIVKKTEVQTGGFSKESILPKRNSDKLIARKKDWDPKKYGGFDSPTVAYSVLVVAKVEKGKSKKLKSVKELLGITIMERSSFEKNPIDFLEAKGYKEVKKDLIIKLPKYSLFELENGRKRMLASAGELQKGNELALPSKYVNFLYLASHYEKLKGSPEDNEQKQLFVEQHKHYLDEIIEQISEFSKRVILADANLDKVLSAYNKHRDKPIREQAENIIHLFTLTNLGAPAAFKYFDTTIDRKRYTSTKEVLDATLIHQSITGLYETRIDLSQLGGD

SEQ ID NO: 999 - DNA, 4101 bp, synthetic construct
  misc_feature 1..4101: note = Synthetic
  source 1..4101: mol_type = other DNA
gacaagaagtactccatcggcctggacatcggcaccaactccgtgggctgggccgtgatcaccgacgagtacaaggtgccctccaagaagttcaaggtgctgggcaacaccgaccggcactccatcaagaagaacctgatcggcgccctgctgttcgactccggcgagaccgccgaggccacccggctgaagcggaccgcccggcggcggtacacccggcggaagaaccggatctgctacctgcaggagatcttctccaacgagatggccaaggtggacgactccttcttccaccggctggaggagtccttcctggtggaggaggacaagaagcacgagcggcaccccatcttcggcaacatcgtggacgaggtggcctaccacgagaagtaccccaccatctaccacctgcggaagaagctggtggactccaccgacaaggccgacctgcggctgatctacctggccctggcccacatgatcaagttccggggccacttcctgatcgagggcgacctgaaccccgacaactccgacgtggacaagctgttcatccagctggtgcagacctacaaccagctgttcgaggagaaccccatcaacgcctccggcgtggacgccaaggccatcctgtccgcccggctgtccaagtcccggcggctggagaacctgatcgcccagctgcccggcgagaagaagaacggcctgttcggcaacctgatcgccctgtccctgggcctgacccccaacttcaagtccaacttcgacctggccgaggacgccaagctgcagctgtccaaggacacctacgacgacgacctggacaacctgctggcccagatcggcgaccagtacgccgacctgttcctggccgccaagaacctgtccgacgccatcctgctgtccgacatcctgcgggtgaacaccgagatcaccaaggcccccctgtccgcctccatgatcaagcggtacgacgagcaccaccaggacctgaccctgctgaaggccctggtgcggcagcagctgcccgagaagtacaaggagatcttcttcgaccagtccaagaacggctacgccggctacatcgacggcggcgcctcccaggaggagttctacaagttcatcaagcccatcctggagaagatggacggcaccgaggagctgctggtgaagctgaaccgggaggacctgctgcggaagcagcggaccttcgacaacggctccatcccccaccagatccacctgggcgagctgcacgccatcctgcggcggcaggaggacttctaccccttcctgaaggacaaccgggagaagatcgagaagatcctgaccttccggatcccctactacgtgggccccctggcccggggcaactcccggttcgcctggatgacccggaagtccgaggagaccatcaccccctggaacttcgaggaggtggtggacaagggcgcctccgcccagtccttcatcgagcggatgaccaacttcgacaagaacctgcccaacgagaaggtgctgcccaagcactccctgctgtacgagtacttcaccgtgtacaacgagctgaccaaggtgaagtacgtgaccgagggcatgcggaagcccgccttcctgtccggcgagcagaagaaggccatcgtggacctgctgttcaagaccaaccggaaggtgaccgtgaagcagctgaaggaggactacttcaagaagatcgagtgcttcgactccgtggagatctccggcgtggaggaccggttcaacgcctccctgggcacctaccacgacctgctgaagatcatcaaggacaaggacttcctggacaacgaggagaacgaggacatcctggaggacatcgtgctgaccctgaccctgttcgaggaccgggagatgatcgaggagcggctgaagacctacgcccacctgttcgacgacaaggtgatgaagcagctgaagcggcggcggtacaccggctggggccggctgtcccggaagctgatcaacggcatccgggacaagcagtccggcaagaccatcctggacttcctgaagtccgacggcttcgccaaccggaacttcatgcagctgatccacgacgactccctgaccttcaaggaggacatccagaaggcccaggtgtccggccagggcgactccctgcacgagcacatcgccaacctggccggctcccccgccatcaagaagggcatcctgcagaccgtgaaggtggtggacgagctggtgaaggtgatgggccggcacaagcccgagaacatcgtgatcgagatggcccgggagaaccagaccacccagaagggccagaagaactcccgggagcggatgaagcggatcgaggagggcatcaaggagctgggctcccagatcctgaaggagcaccccgtggagaacacccagctgcagaacgagaagctgtacctgtactacctgcagaacggccgggacatgtacgtggaccaggagctggacatcaaccggctgtccgactacgacgtggactacatcgtgccccagtccttcctgaaggacgactccatcgacaacaaggtgctgacccggtccgacaagaaccggggcaagtccgacaacgtgccctccgaggaggtggtgaagaagatgaagaactactggcggcagctgctgaacgccaagctgatcacccagcggaagttcgacaacctgaccaaggccgagcggggcggcctgtccgagctggacaaggccggcttcatcaagcggcagctggtggagacccggcagatcaccaagcacgtggcccagatcctggactcccggatgaacaccaagtacgacgagaacgacaagctgatccgggaggtgaaggtgatcaccctgaagtccaagctggtgtccgacttccggaaggacttccagttctacaaggtgcgggagatcaacaactaccaccacgcccacgacgcctacctgaacgccgtggtgggcaccgccctgatcaagaagtaccccaagctggagtccgagttcgtgtacggcgactacaaggtgtacgacgtgcggaagatgatcgccaagtccgagcaggagatcggcaaggccaccgccaagtacttcttctactccaacatcatgaacttcttcaagaccgagatcaccctggccaacggcgagatccggaagcggcccctgatcgagaccaacggcgagaccggcgagatcgtgtgggacaagggccgggacttcgccaccgtgcggaaggtgctgtccatgccccaggtgaacatcgtgaagaagaccgaggtgcagaccggcggcttctccaaggagtccatcctgcccaagcggaactccgacaagctgatcgcccggaagaaggactgggaccccaagaagtacggcggcttcgactcccccaccgtggcctactccgtgctggtggtggccaaggtggagaagggcaagtccaagaagctgaagtccgtgaaggagctgctgggcatcaccatcatggagcggtcctccttcgagaagaaccccatcgacttcctggaggccaagggctacaaggaggtgaagaaggacctgatcatcaagctgcccaagtactccctgttcgagctggagaacggccggaagcggatgctggcctccgccggcgagctgcagaagggcaacgagctggccctgccctccaagtacgtgaacttcctgtacctggcctcccactacgagaagctgaagggctcccccgaggacaacgagcagaagcagctgttcgtggagcagcacaagcactacctggacgagatcatcgagcagatctccgagttctccaagcgggtgatcctggccgacgccaacctggacaaggtgctgtccgcctacaacaagcaccgggacaagcccatccgggagcaggccgagaacatcatccacctgttcaccctgaccaacctgggcgcccccgccgccttcaagtacttcgacaccaccatcgaccggaagcggtacacctccaccaaggaggtgctggacgccaccctgatccaccagtccatcaccggcctgtacgagacccggatcgacctgtcccagctgggcggcgac

SEQ ID NO: 1000 - protein, 1367 aa, synthetic construct
  REGION 1..1367: note = Synthetic
DKKYSIGLDIGTNSVGWAVITDEYKVPSKKFKVLGNTDRHSIKKNLIGALLFDSGETAEATRLKRTARRRYTRRKNRICYLQEIFSNEMAKVDDSFFHRLEESFLVEEDKKHERHPIFGNIVDEVAYHEKYPTIYHLRKKLVDSTDKADLRLIYLALAHMIKFRGHFLIEGDLNPDNSDVDKLFIQLVQTYNQLFEENPINASGVDAKAILSARLSKSRRLENLIAQLPGEKKNGLFGNLIALSLGLTPNFKSNFDLAEDAKLQLSKDTYDDDLDNLLAQIGDQYADLFLAAKNLSDAILLSDILRVNTEITKAPLSASMIKRYDEHHQDLTLLKALVRQQLPEKYKEIFFDQSKNGYAGYIDGGASQEEFYKFIKPILEKMDGTEELLVKLNREDLLRKQRTFDNGSIPHQIHLGELHAILRRQEDFYPFLKDNREKIEKILTFRIPYYVGPLARGNSRFAWMTRKSEETITPWNFEEVVDKGASAQSFIERMTNFDKNLPNEKVLPKHSLLYEYFTVYNELTKVKYVTEGMRKPAFLSGEQKKAIVDLLFKTNRKVTVKQLKEDYFKKIECFDSVEISGVEDRFNASLGTYHDLLKIIKDKDFLDNEENEDILEDIVLTLTLFEDREMIEERLKTYAHLFDDKVMKQLKRRRYTGWGRLSRKLINGIRDKQSGKTILDFLKSDGFANRNFMQLIHDDSLTFKEDIQKAQVSGQGDSLHEHIANLAGSPAIKKGILQTVKVVDELVKVMGRHKPENIVIEMARENQTTQKGQKNSRERMKRIEEGIKELGSQILKEHPVENTQLQNEKLYLYYLQNGRDMYVDQELDINRLSDYDVDYIVPQSFLKDDSIDNKVLTRSDKNRGKSDNVPSEEVVKKMKNYWRQLLNAKLITQRKFDNLTKAERGGLSELDKAGFIKRQLVETRQITKHVAQILDSRMNTKYDENDKLIREVKVITLKSKLVSDFRKDFQFYKVREINNYHHAHDAYLNAVVGTALIKKYPKLESEFVYGDYKVYDVRKMIAKSEQEIGKATAKYFFYSNIMNFFKTEITLANGEIRKRPLIETNGETGEIVWDKGRDFATVRKVLSMPQVNIVKKTEVQTGGFSKESILPKRNSDKLIARKKDWDPKKYGGFDSPTVAYSVLVVAKVEKGKSKKLKSVKELLGITIMERSSFEKNPIDFLEAKGYKEVKKDLIIKLPKYSLFELENGRKRMLASAGELQKGNELALPSKYVNFLYLASHYEKLKGSPEDNEQKQLFVEQHKHYLDEIIEQISEFSKRVILADANLDKVLSAYNKHRDKPIREQAENIIHLFTLTNLGAPAAFKYFDTTIDRKRYTSTKEVLDATLIHQSITGLYETRIDLSQLGGD

SEQ ID NO: 1001 - RNA, 4480 nt, synthetic construct
  misc_feature 1..4480: note = Synthetic
  source 1..4480: mol_type = other RNA
gggaagctcagaataaacgctcaactttggccggatctgccaccatggacaagaagtactccatcggcctggacatcggcaccaactccgtgggctgggccgtgatcaccgacgagtacaaggtgccctccaagaagttcaaggtgctgggcaacaccgaccggcactccatcaagaagaacctgatcggcgccctgctgttcgactccggcgagaccgccgaggccacccggctgaagcggaccgcccggcggcggtacacccggcggaagaaccggatctgctacctgcaggagatcttctccaacgagatggccaaggtggacgactccttcttccaccggctggaggagtccttcctggtggaggaggacaagaagcacgagcggcaccccatcttcggcaacatcgtggacgaggtggcctaccacgagaagtaccccaccatctaccacctgcggaagaagctggtggactccaccgacaaggccgacctgcggctgatctacctggccctggcccacatgatcaagttccggggccacttcctgatcgagggcgacctgaaccccgacaactccgacgtggacaagctgttcatccagctggtgcagacctacaaccagctgttcgaggagaaccccatcaacgcctccggcgtggacgccaaggccatcctgtccgcccggctgtccaagtcccggcggctggagaacctgatcgcccagctgcccggcgagaagaagaacggcctgttcggcaacctgatcgccctgtccctgggcctgacccccaacttcaagtccaacttcgacctggccgaggacgccaagctgcagctgtccaaggacacctacgacgacgacctggacaacctgctggcccagatcggcgaccagtacgccgacctgttcctggccgccaagaacctgtccgacgccatcctgctgtccgacatcctgcgggtgaacaccgagatcaccaaggcccccctgtccgcctccatgatcaagcggtacgacgagcaccaccaggacctgaccctgctgaaggccctggtgcggcagcagctgcccgagaagtacaaggagatcttcttcgaccagtccaagaacggctacgccggctacatcgacggcggcgcctcccaggaggagttctacaagttcatcaagcccatcctggagaagatggacggcaccgaggagctgctggtgaagctgaaccgggaggacctgctgcggaagcagcggaccttcgacaacggctccatcccccaccagatccacctgggcgagctgcacgccatcctgcggcggcaggaggacttctaccccttcctgaaggacaaccgggagaagatcgagaagatcctgaccttccggatcccctactacgtgggccccctggcccggggcaactcccggttcgcctggatgacccggaagtccgaggagaccatcaccccctggaacttcgaggaggtggtggacaagggcgcctccgcccagtccttcatcgagcggatgaccaacttcgacaagaacctgcccaacgagaaggtgctgcccaagcactccctgctgtacgagtacttcaccgtgtacaacgagctgaccaaggtgaagtacgtgaccgagggcatgcggaagcccgccttcctgtccggcgagcagaagaaggccatcgtggacctgctgttcaagaccaaccggaaggtgaccgtgaagcagctgaaggaggactacttcaagaagatcgagtgcttcgactccgtggagatctccggcgtggaggaccggttcaacgcctccctgggcacctaccacgacctgctgaagatcatcaaggacaaggacttcctggacaacgaggagaacgaggacatcctggaggacatcgtgctgaccctgaccctgttcgaggaccgggagatgatcgaggagcggctgaagacctacgcccacctgttcgacgacaaggtgatgaagcagctgaagcggcggcggtacaccggctggggccggctgtcccggaagctgatcaacggcatccgggacaagcagtccggcaagaccatcctggacttcctgaagtccgacggcttcgccaaccggaacttcatgcagctgatccacgacgactccctgaccttcaaggaggacatccagaaggcccaggtgtccggccagggcgactccctgcacgagcacatcgccaacctggccggctcccccgccatcaagaagggcatcctgcagaccgtgaaggtggtggacgagctggtgaaggtgatgggccggcacaagcccgagaacatcgtgatcgagatggcccgggagaaccagaccacccagaagggccagaagaactcccgggagcggatgaagcggatcgaggagggcatcaaggagctgggctcccagatcctgaaggagcaccccgtggagaacacccagctgcagaacgagaagctgtacctgtactacctgcagaacggccgggacatgtacgtggaccaggagctggacatcaaccggctgtccgactacgacgtggaccacatcgtgccccagtccttcctgaaggacgactccatcgacaacaaggtgctgacccggtccgacaagaaccggggcaagtccgacaacgtgccctccgaggaggtggtgaagaagatgaagaactactggcggcagctgctgaacgccaagctgatcacccagcggaagttcgacaacctgaccaaggccgagcggggcggcctgtccgagctggacaaggccggcttcatcaagcggcagctggtggagacccggcagatcaccaagcacgtggcccagatcctggactcccggatgaacaccaagtacgacgagaacgacaagctgatccgggaggtgaaggtgatcaccctgaagtccaagctggtgtccgacttccggaaggacttccagttctacaaggtgcgggagatcaacaactaccaccacgcccacgacgcctacctgaacgccgtggtgggcaccgccctgatcaagaagtaccccaagctggagtccgagttcgtgtacggcgactacaaggtgtacgacgtgcggaagatgatcgccaagtccgagcaggagatcggcaaggccaccgccaagtacttcttctactccaacatcatgaacttcttcaagaccgagatcaccctggccaacggcgagatccggaagcggcccctgatcgagaccaacggcgagaccggcgagatcgtgtgggacaagggccgggacttcgccaccgtgcggaaggtgctgtccatgccccaggtgaacatcgtgaagaagaccgaggtgcagaccggcggcttctccaaggagtccatcctgcccaagcggaactccgacaagctgatcgcccggaagaaggactgggaccccaagaagtacggcggcttcgactcccccaccgtggcctactccgtgctggtggtggccaaggtggagaagggcaagtccaagaagctgaagtccgtgaaggagctgctgggcatcaccatcatggagcggtcctccttcgagaagaaccccatcgacttcctggaggccaagggctacaaggaggtgaagaaggacctgatcatcaagctgcccaagtactccctgttcgagctggagaacggccggaagcggatgctggcctccgccggcgagctgcagaagggcaacgagctggccctgccctccaagtacgtgaacttcctgtacctggcctcccactacgagaagctgaagggctcccccgaggacaacgagcagaagcagctgttcgtggagcagcacaagcactacctggacgagatcatcgagcagatctccgagttctccaagcgggtgatcctggccgacgccaacctggacaaggtgctgtccgcctacaacaagcaccgggacaagcccatccgggagcaggccgagaacatcatccacctgttcaccctgaccaacctgggcgcccccgccgccttcaagtacttcgacaccaccatcgaccggaagcggtacacctccaccaaggaggtgctggacgccaccctgatccaccagtccatcaccggcctgtacgagacccggatcgacctgtcccagctgggcggcgacggcggcggctcccccaagaagaagcggaaggtgtccgagtccgccacccccgagtccgtgtccggctggcggctgttcaagaagatctcctgactagcaccagcctcaagaacacccgaatggagtctctaagctacataataccaacttacactttacaaaatgttgtcccccaaaatgtagccattcgtatctgctcctaataaaaagaaagtttcttcacattctctcgagaaaaaaaaaaaaaaaaaaaaaaaaaaaaaaaaaaaaaaaaaaaaaaaaaaaaaaaaaaaaaaaaaaaaaaaaaaaaaaaaaaaaaaaaaaaaatctag

SEQ ID NO: 1002 - RNA, 4197 nt, synthetic construct
  misc_feature 1..4197: note = Synthetic
  source 1..4197: mol_type = other RNA
atggacaagaagtactccatcggcctggacatcggcaccaactccgtgggctgggccgtgatcaccgacgagtacaaggtgccctccaagaagttcaaggtgctgggcaacaccgaccggcactccatcaagaagaacctgatcggcgccctgctgttcgactccggcgagaccgccgaggccacccggctgaagcggaccgcccggcggcggtacacccggcggaagaaccggatctgctacctgcaggagatcttctccaacgagatggccaaggtggacgactccttcttccaccggctggaggagtccttcctggtggaggaggacaagaagcacgagcggcaccccatcttcggcaacatcgtggacgaggtggcctaccacgagaagtaccccaccatctaccacctgcggaagaagctggtggactccaccgacaaggccgacctgcggctgatctacctggccctggcccacatgatcaagttccggggccacttcctgatcgagggcgacctgaaccccgacaactccgacgtggacaagctgttcatccagctggtgcagacctacaaccagctgttcgaggagaaccccatcaacgcctccggcgtggacgccaaggccatcctgtccgcccggctgtccaagtcccggcggctggagaacctgatcgcccagctgcccggcgagaagaagaacggcctgttcggcaacctgatcgccctgtccctgggcctgacccccaacttcaagtccaacttcgacctggccgaggacgccaagctgcagctgtccaaggacacctacgacgacgacctggacaacctgctggcccagatcggcgaccagtacgccgacctgttcctggccgccaagaacctgtccgacgccatcctgctgtccgacatcctgcgggtgaacaccgagatcaccaaggcccccctgtccgcctccatgatcaagcggtacgacgagcaccaccaggacctgaccctgctgaaggccctggtgcggcagcagctgcccgagaagtacaaggagatcttcttcgaccagtccaagaacggctacgccggctacatcgacggcggcgcctcccaggaggagttctacaagttcatcaagcccatcctggagaagatggacggcaccgaggagctgctggtgaagctgaaccgggaggacctgctgcggaagcagcggaccttcgacaacggctccatcccccaccagatccacctgggcgagctgcacgccatcctgcggcggcaggaggacttctaccccttcctgaaggacaaccgggagaagatcgagaagatcctgaccttccggatcccctactacgtgggccccctggcccggggcaactcccggttcgcctggatgacccggaagtccgaggagaccatcaccccctggaacttcgaggaggtggtggacaagggcgcctccgcccagtccttcatcgagcggatgaccaacttcgacaagaacctgcccaacgagaaggtgctgcccaagcactccctgctgtacgagtacttcaccgtgtacaacgagctgaccaaggtgaagtacgtgaccgagggcatgcggaagcccgccttcctgtccggcgagcagaagaaggccatcgtggacctgctgttcaagaccaaccggaaggtgaccgtgaagcagctgaaggaggactacttcaagaagatcgagtgcttcgactccgtggagatctccggcgtggaggaccggttcaacgcctccctgggcacctaccacgacctgctgaagatcatcaaggacaaggacttcctggacaacgaggagaacgaggacatcctggaggacatcgtgctgaccctgaccctgttcgaggaccgggagatgatcgaggagcggctgaagacctacgcccacctgttcgacgacaaggtgatgaagcagctgaagcggcggcggtacaccggctggggccggctgtcccggaagctgatcaacggcatccgggacaagcagtccggcaagaccatcctggacttcctgaagtccgacggcttcgccaaccggaacttcatgcagctgatccacgacgactccctgaccttcaaggaggacatccagaaggcccaggtgtccggccagggcgactccctgcacgagcacatcgccaacctggccggctcccccgccatcaagaagggcatcctgcagaccgtgaaggtggtggacgagctggtgaaggtgatgggccggcacaagcccgagaacatcgtgatcgagatggcccgggagaaccagaccacccagaagggccagaagaactcccgggagcggatgaagcggatcgaggagggcatcaaggagctgggctcccagatcctgaaggagcaccccgtggagaacacccagctgcagaacgagaagctgtacctgtactacctgcagaacggccgggacatgtacgtggaccaggagctggacatcaaccggctgtccgactacgacgtggaccacatcgtgccccagtccttcctgaaggacgactccatcgacaacaaggtgctgacccggtccgacaagaaccggggcaagtccgacaacgtgccctccgaggaggtggtgaagaagatgaagaactactggcggcagctgctgaacgccaagctgatcacccagcggaagttcgacaacctgaccaaggccgagcggggcggcctgtccgagctggacaaggccggcttcatcaagcggcagctggtggagacccggcagatcaccaagcacgtggcccagatcctggactcccggatgaacaccaagtacgacgagaacgacaagctgatccgggaggtgaaggtgatcaccctgaagtccaagctggtgtccgacttccggaaggacttccagttctacaaggtgcgggagatcaacaactaccaccacgcccacgacgcctacctgaacgccgtggtgggcaccgccctgatcaagaagtaccccaagctggagtccgagttcgtgtacggcgactacaaggtgtacgacgtgcggaagatgatcgccaagtccgagcaggagatcggcaaggccaccgccaagtacttcttctactccaacatcatgaacttcttcaagaccgagatcaccctggccaacggcgagatccggaagcggcccctgatcgagaccaacggcgagaccggcgagatcgtgtgggacaagggccgggacttcgccaccgtgcggaaggtgctgtccatgccccaggtgaacatcgtgaagaagaccgaggtgcagaccggcggcttctccaaggagtccatcctgcccaagcggaactccgacaagctgatcgcccggaagaaggactgggaccccaagaagtacggcggcttcgactcccccaccgtggcctactccgtgctggtggtggccaaggtggagaagggcaagtccaagaagctgaagtccgtgaaggagctgctgggcatcaccatcatggagcggtcctccttcgagaagaaccccatcgacttcctggaggccaagggctacaaggaggtgaagaaggacctgatcatcaagctgcccaagtactccctgttcgagctggagaacggccggaagcggatgctggcctccgccggcgagctgcagaagggcaacgagctggccctgccctccaagtacgtgaacttcctgtacctggcctcccactacgagaagctgaagggctcccccgaggacaacgagcagaagcagctgttcgtggagcagcacaagcactacctggacgagatcatcgagcagatctccgagttctccaagcgggtgatcctggccgacgccaacctggacaaggtgctgtccgcctacaacaagcaccgggacaagcccatccgggagcaggccgagaacatcatccacctgttcaccctgaccaacctgggcgcccccgccgccttcaagtacttcgacaccaccatcgaccggaagcggtacacctccaccaaggaggtgctggacgccaccctgatccaccagtccatcaccggcctgtacgagacccggatcgacctgtcccagctgggcggcgacggcggcggctcccccaagaagaagcggaaggtgtccgagtccgccacccccgagtccgtgtccggctggcggctgttcaagaagatctcctga

SEQ ID NO: 1003 - protein, 1398 aa, synthetic construct
  REGION 1..1398: note = Synthetic
MDKKYSIGLDIGTNSVGWAVITDEYKVPSKKFKVLGNTDRHSIKKNLIGALLFDSGETAEATRLKRTARRRYTRRKNRICYLQEIFSNEMAKVDDSFFHRLEESFLVEEDKKHERHPIFGNIVDEVAYHEKYPTIYHLRKKLVDSTDKADLRLIYLALAHMIKFRGHFLIEGDLNPDNSDVDKLFIQLVQTYNQLFEENPINASGVDAKAILSARLSKSRRLENLIAQLPGEKKNGLFGNLIALSLGLTPNFKSNFDLAEDAKLQLSKDTYDDDLDNLLAQIGDQYADLFLAAKNLSDAILLSDILRVNTEITKAPLSASMIKRYDEHHQDLTLLKALVRQQLPEKYKEIFFDQSKNGYAGYIDGGASQEEFYKFIKPILEKMDGTEELLVKLNREDLLRKQRTFDNGSIPHQIHLGELHAILRRQEDFYPFLKDNREKIEKILTFRIPYYVGPLARGNSRFAWMTRKSEETITPWNFEEVVDKGASAQSFIERMTNFDKNLPNEKVLPKHSLLYEYFTVYNELTKVKYVTEGMRKPAFLSGEQKKAIVDLLFKTNRKVTVKQLKEDYFKKIECFDSVEISGVEDRFNASLGTYHDLLKIIKDKDFLDNEENEDILEDIVLTLTLFEDREMIEERLKTYAHLFDDKVMKQLKRRRYTGWGRLSRKLINGIRDKQSGKTILDFLKSDGFANRNFMQLIHDDSLTFKEDIQKAQVSGQGDSLHEHIANLAGSPAIKKGILQTVKVVDELVKVMGRHKPENIVIEMARENQTTQKGQKNSRERMKRIEEGIKELGSQILKEHPVENTQLQNEKLYLYYLQNGRDMYVDQELDINRLSDYDVDHIVPQSFLKDDSIDNKVLTRSDKNRGKSDNVPSEEVVKKMKNYWRQLLNAKLITQRKFDNLTKAERGGLSELDKAGFIKRQLVETRQITKHVAQILDSRMNTKYDENDKLIREVKVITLKSKLVSDFRKDFQFYKVREINNYHHAHDAYLNAVVGTALIKKYPKLESEFVYGDYKVYDVRKMIAKSEQEIGKATAKYFFYSNIMNFFKTEITLANGEIRKRPLIETNGETGEIVWDKGRDFATVRKVLSMPQVNIVKKTEVQTGGFSKESILPKRNSDKLIARKKDWDPKKYGGFDSPTVAYSVLVVAKVEKGKSKKLKSVKELLGITIMERSSFEKNPIDFLEAKGYKEVKKDLIIKLPKYSLFELENGRKRMLASAGELQKGNELALPSKYVNFLYLASHYEKLKGSPEDNEQKQLFVEQHKHYLDEIIEQISEFSKRVILADANLDKVLSAYNKHRDKPIREQAENIIHLFTLTNLGAPAAFKYFDTTIDRKRYTSTKEVLDATLIHQSITGLYETRIDLSQLGGDGGGSPKKKRKVSESATPESVSGWRLFKKIS

SEQ ID NO: 1004 - RNA, 4423 nt, synthetic construct
  misc_feature 1..4423: note = Synthetic
  source 1..4423: mol_type = other RNA
gggaagctcagaataaacgctcaactttggccggatctgccaccatggacaagaagtactccatcggcctggacatcggcaccaactccgtgggctgggccgtgatcaccgacgagtacaaggtgccctccaagaagttcaaggtgctgggcaacaccgaccggcactccatcaagaagaacctgatcggcgccctgctgttcgactccggcgagaccgccgaggccacccggctgaagcggaccgcccggcggcggtacacccggcggaagaaccggatctgctacctgcaggagatcttctccaacgagatggccaaggtggacgactccttcttccaccggctggaggagtccttcctggtggaggaggacaagaagcacgagcggcaccccatcttcggcaacatcgtggacgaggtggcctaccacgagaagtaccccaccatctaccacctgcggaagaagctggtggactccaccgacaaggccgacctgcggctgatctacctggccctggcccacatgatcaagttccggggccacttcctgatcgagggcgacctgaaccccgacaactccgacgtggacaagctgttcatccagctggtgcagacctacaaccagctgttcgaggagaaccccatcaacgcctccggcgtggacgccaaggccatcctgtccgcccggctgtccaagtcccggcggctggagaacctgatcgcccagctgcccggcgagaagaagaacggcctgttcggcaacctgatcgccctgtccctgggcctgacccccaacttcaagtccaacttcgacctggccgaggacgccaagctgcagctgtccaaggacacctacgacgacgacctggacaacctgctggcccagatcggcgaccagtacgccgacctgttcctggccgccaagaacctgtccgacgccatcctgctgtccgacatcctgcgggtgaacaccgagatcaccaaggcccccctgtccgcctccatgatcaagcggtacgacgagcaccaccaggacctgaccctgctgaaggccctggtgcggcagcagctgcccgagaagtacaaggagatcttcttcgaccagtccaagaacggctacgccggctacatcgacggcggcgcctcccaggaggagttctacaagttcatcaagcccatcctggagaagatggacggcaccgaggagctgctggtgaagctgaaccgggaggacctgctgcggaagcagcggaccttcgacaacggctccatcccccaccagatccacctgggcgagctgcacgccatcctgcggcggcaggaggacttctaccccttcctgaaggacaaccgggagaagatcgagaagatcctgaccttccggatcccctactacgtgggccccctggcccggggcaactcccggttcgcctggatgacccggaagtccgaggagaccatcaccccctggaacttcgaggaggtggtggacaagggcgcctccgcccagtccttcatcgagcggatgaccaacttcgacaagaacctgcccaacgagaaggtgctgcccaagcactccctgctgtacgagtacttcaccgtgtacaacgagctgaccaaggtgaagtacgtgaccgagggcatgcggaagcccgccttcctgtccggcgagcagaagaaggccatcgtggacctgctgttcaagaccaaccggaaggtgaccgtgaagcagctgaaggaggactacttcaagaagatcgagtgcttcgactccgtggagatctccggcgtggaggaccggttcaacgcctccctgggcacctaccacgacctgctgaagatcatcaaggacaaggacttcctggacaacgaggagaacgaggacatcctggaggacatcgtgctgaccctgaccctgttcgaggaccgggagatgatcgaggagcggctgaagacctacgcccacctgttcgacgacaaggtgatgaagcagctgaagcggcggcggtacaccggctggggccggctgtcccggaagctgatcaacggcatccgggacaagcagtccggcaagaccatcctggacttcctgaagtccgacggcttcgccaaccggaacttcatgcagctgatccacgacgactccctgaccttcaaggaggacatccagaaggcccaggtgtccggccagggcgactccctgcacgagcacatcgccaacctggccggctcccccgccatcaagaagggcatcctgcagaccgtgaaggtggtggacgagctggtgaaggtgatgggccggcacaagcccgagaacatcgtgatcgagatggcccgggagaaccagaccacccagaagggccagaagaactcccgggagcggatgaagcggatcgaggagggcatcaaggagctgggctcccagatcctgaaggagcaccccgtggagaacacccagctgcagaacgagaagctgtacctgtactacctgcagaacggccgggacatgtacgtggaccaggagctggacatcaaccggctgtccgactacgacgtggaccacatcgtgccccagtccttcctgaaggacgactccatcgacaacaaggtgctgacccggtccgacaagaaccggggcaagtccgacaacgtgccctccgaggaggtggtgaagaagatgaagaactactggcggcagctgctgaacgccaagctgatcacccagcggaagttcgacaacctgaccaaggccgagcggggcggcctgtccgagctggacaaggccggcttcatcaagcggcagctggtggagacccggcagatcaccaagcacgtggcccagatcctggactcccggatgaacaccaagtacgacgagaacgacaagctgatccgggaggtgaaggtgatcaccctgaagtccaagctggtgtccgacttccggaaggacttccagttctacaaggtgcgggagatcaacaactaccaccacgcccacgacgcctacctgaacgccgtggtgggcaccgccctgatcaagaagtaccccaagctggagtccgagttcgtgtacggcgactacaaggtgtacgacgtgcggaagatgatcgccaagtccgagcaggagatcggcaaggccaccgccaagtacttcttctactccaacatcatgaacttcttcaagaccgagatcaccctggccaacggcgagatccggaagcggcccctgatcgagaccaacggcgagaccggcgagatcgtgtgggacaagggccgggacttcgccaccgtgcggaaggtgctgtccatgccccaggtgaacatcgtgaagaagaccgaggtgcagaccggcggcttctccaaggagtccatcctgcccaagcggaactccgacaagctgatcgcccggaagaaggactgggaccccaagaagtacggcggcttcgactcccccaccgtggcctactccgtgctggtggtggccaaggtggagaagggcaagtccaagaagctgaagtccgtgaaggagctgctgggcatcaccatcatggagcggtcctccttcgagaagaaccccatcgacttcctggaggccaagggctacaaggaggtgaagaaggacctgatcatcaagctgcccaagtactccctgttcgagctggagaacggccggaagcggatgctggcctccgccggcgagctgcagaagggcaacgagctggccctgccctccaagtacgtgaacttcctgtacctggcctcccactacgagaagctgaagggctcccccgaggacaacgagcagaagcagctgttcgtggagcagcacaagcactacctggacgagatcatcgagcagatctccgagttctccaagcgggtgatcctggccgacgccaacctggacaaggtgctgtccgcctacaacaagcaccgggacaagcccatccgggagcaggccgagaacatcatccacctgttcaccctgaccaacctgggcgcccccgccgccttcaagtacttcgacaccaccatcgaccggaagcggtacacctccaccaaggaggtgctggacgccaccctgatccaccagtccatcaccggcctgtacgagacccggatcgacctgtcccagctgggcggcgacggcggcggctcccccaagaagaagcggaaggtgtgactagcaccagcctcaagaacacccgaatggagtctctaagctacataataccaacttacactttacaaaatgttgtcccccaaaatgtagccattcgtatctgctcctaataaaaagaaagtttcttcacattctctcgagaaaaaaaaaaaaaaaaaaaaaaaaaaaaaaaaaaaaaaaaaaaaaaaaaaaaaaaaaaaaaaaaaaaaaaaaaaaaaaaaaaaaaaaaaaaaatctag

SEQ ID NO: 1005 - RNA, 4140 nt, synthetic construct
  misc_feature 1..4140: note = Synthetic
  source 1..4140: mol_type = other RNA
atggacaagaagtactccatcggcctggacatcggcaccaactccgtgggctgggccgtgatcaccgacgagtacaaggtgccctccaagaagttcaaggtgctgggcaacaccgaccggcactccatcaagaagaacctgatcggcgccctgctgttcgactccggcgagaccgccgaggccacccggctgaagcggaccgcccggcggcggtacacccggcggaagaaccggatctgctacctgcaggagatcttctccaacgagatggccaaggtggacgactccttcttccaccggctggaggagtccttcctggtggaggaggacaagaagcacgagcggcaccccatcttcggcaacatcgtggacgaggtggcctaccacgagaagtaccccaccatctaccacctgcggaagaagctggtggactccaccgacaaggccgacctgcggctgatctacctggccctggcccacatgatcaagttccggggccacttcctgatcgagggcgacctgaaccccgacaactccgacgtggacaagctgttcatccagctggtgcagacctacaaccagctgttcgaggagaaccccatcaacgcctccggcgtggacgccaaggccatcctgtccgcccggctgtccaagtcccggcggctggagaacctgatcgcccagctgcccggcgagaagaagaacggcctgttcggcaacctgatcgccctgtccctgggcctgacccccaacttcaagtccaacttcgacctggccgaggacgccaagctgcagctgtccaaggacacctacgacgacgacctggacaacctgctggcccagatcggcgaccagtacgccgacctgttcctggccgccaagaacctgtccgacgccatcctgctgtccgacatcctgcgggtgaacaccgagatcaccaaggcccccctgtccgcctccatgatcaagcggtacgacgagcaccaccaggacctgaccctgctgaaggccctggtgcggcagcagctgcccgagaagtacaaggagatcttcttcgaccagtccaagaacggctacgccggctacatcgacggcggcgcctcccaggaggagttctacaagttcatcaagcccatcctggagaagatggacggcaccgaggagctgctggtgaagctgaaccgggaggacctgctgcggaagcagcggaccttcgacaacggctccatcccccaccagatccacctgggcgagctgcacgccatcctgcggcggcaggaggacttctaccccttcctgaaggacaaccgggagaagatcgagaagatcctgaccttccggatcccctactacgtgggccccctggcccggggcaactcccggttcgcctggatgacccggaagtccgaggagaccatcaccccctggaacttcgaggaggtggtggacaagggcgcctccgcccagtccttcatcgagcggatgaccaacttcgacaagaacctgcccaacgagaaggtgctgcccaagcactccctgctgtacgagtacttcaccgtgtacaacgagctgaccaaggtgaagtacgtgaccgagggcatgcggaagcccgccttcctgtccggcgagcagaagaaggccatcgtggacctgctgttcaagaccaaccggaaggtgaccgtgaagcagctgaaggaggactacttcaagaagatcgagtgcttcgactccgtggagatctccggcgtggaggaccggttcaacgcctccctgggcacctaccacgacctgctgaagatcatcaaggacaaggacttcctggacaacgaggagaacgaggacatcctggaggacatcgtgctgaccctgaccctgttcgaggaccgggagatgatcgaggagcggctgaagacctacgcccacctgttcgacgacaaggtgatgaagcagctgaagcggcggcggtacaccggctggggccggctgtcccggaagctgatcaacggcatccgggacaagcagtccggcaagaccatcctggacttcctgaagtccgacggcttcgccaaccggaacttcatgcagctgatccacgacgactccctgaccttcaaggaggacatccagaaggcccaggtgtccggccagggcgactccctgcacgagcacatcgccaacctggccggctcccccgccatcaagaagggcatcctgcagaccgtgaaggtggtggacgagctggtgaaggtgatgggccggcacaagcccgagaacatcgtgatcgagatggcccgggagaaccagaccacccagaagggccagaagaactcccgggagcggatgaagcggatcgaggagggcatcaaggagctgggctcccagatcctgaaggagcaccccgtggagaacacccagctgcagaacgagaagctgtacctgtactacctgcagaacggccgggacatgtacgtggaccaggagctggacatcaaccggctgtccgactacgacgtggaccacatcgtgccccagtccttcctgaaggacgactccatcgacaacaaggtgctgacccggtccgacaagaaccggggcaagtccgacaacgtgccctccgaggaggtggtgaagaagatgaagaactactggcggcagctgctgaacgccaagctgatcacccagcggaagttcgacaacctgaccaaggccgagcggggcggcctgtccgagctggacaaggccggcttcatcaagcggcagctggtggagacccggcagatcaccaagcacgtggcccagatcctggactcccggatgaacaccaagtacgacgagaacgacaagctgatccgggaggtgaaggtgatcaccctgaagtccaagctggtgtccgacttccggaaggacttccagttctacaaggtgcgggagatcaacaactaccaccacgcccacgacgcctacctgaacgccgtggtgggcaccgccctgatcaagaagtaccccaagctggagtccgagttcgtgtacggcgactacaaggtgtacgacgtgcggaagatgatcgccaagtccgagcaggagatcggcaaggccaccgccaagtacttcttctactccaacatcatgaacttcttcaagaccgagatcaccctggccaacggcgagatccggaagcggcccctgatcgagaccaacggcgagaccggcgagatcgtgtgggacaagggccgggacttcgccaccgtgcggaaggtgctgtccatgccccaggtgaacatcgtgaagaagaccgaggtgcagaccggcggcttctccaaggagtccatcctgcccaagcggaactccgacaagctgatcgcccggaagaaggactgggaccccaagaagtacggcggcttcgactcccccaccgtggcctactccgtgctggtggtggccaaggtggagaagggcaagtccaagaagctgaagtccgtgaaggagctgctgggcatcaccatcatggagcggtcctccttcgagaagaaccccatcgacttcctggaggccaagggctacaaggaggtgaagaaggacctgatcatcaagctgcccaagtactccctgttcgagctggagaacggccggaagcggatgctggcctccgccggcgagctgcagaagggcaacgagctggccctgccctccaagtacgtgaacttcctgtacctggcctcccactacgagaagctgaagggctcccccgaggacaacgagcagaagcagctgttcgtggagcagcacaagcactacctggacgagatcatcgagcagatctccgagttctccaagcgggtgatcctggccgacgccaacctggacaaggtgctgtccgcctacaacaagcaccgggacaagcccatccgggagcaggccgagaacatcatccacctgttcaccctgaccaacctgggcgcccccgccgccttcaagtacttcgacaccaccatcgaccggaagcggtacacctccaccaaggaggtgctggacgccaccctgatccaccagtccatcaccggcctgtacgagacccggatcgacctgtcccagctgggcggcgacggcggcggctcccccaagaagaagcggaaggtgtga

SEQ ID NO: 1006 - protein, 1379 aa, synthetic construct
  REGION 1..1379: note = Synthetic
MDKKYSIGLDIGTNSVGWAVITDEYKVPSKKFKVLGNTDRHSIKKNLIGALLFDSGETAEATRLKRTARRRYTRRKNRICYLQEIFSNEMAKVDDSFFHRLEESFLVEEDKKHERHPIFGNIVDEVAYHEKYPTIYHLRKKLVDSTDKADLRLIYLALAHMIKFRGHFLIEGDLNPDNSDVDKLFIQLVQTYNQLFEENPINASGVDAKAILSARLSKSRRLENLIAQLPGEKKNGLFGNLIALSLGLTPNFKSNFDLAEDAKLQLSKDTYDDDLDNLLAQIGDQYADLFLAAKNLSDAILLSDILRVNTEITKAPLSASMIKRYDEHHQDLTLLKALVRQQLPEKYKEIFFDQSKNGYAGYIDGGASQEEFYKFIKPILEKMDGTEELLVKLNREDLLRKQRTFDNGSIPHQIHLGELHAILRRQEDFYPFLKDNREKIEKILTFRIPYYVGPLARGNSRFAWMTRKSEETITPWNFEEVVDKGASAQSFIERMTNFDKNLPNEKVLPKHSLLYEYFTVYNELTKVKYVTEGMRKPAFLSGEQKKAIVDLLFKTNRKVTVKQLKEDYFKKIECFDSVEISGVEDRFNASLGTYHDLLKIIKDKDFLDNEENEDILEDIVLTLTLFEDREMIEERLKTYAHLFDDKVMKQLKRRRYTGWGRLSRKLINGIRDKQSGKTILDFLKSDGFANRNFMQLIHDDSLTFKEDIQKAQVSGQGDSLHEHIANLAGSPAIKKGILQTVKVVDELVKVMGRHKPENIVIEMARENQTTQKGQKNSRERMKRIEEGIKELGSQILKEHPVENTQLQNEKLYLYYLQNGRDMYVDQELDINRLSDYDVDHIVPQSFLKDDSIDNKVLTRSDKNRGKSDNVPSEEVVKKMKNYWRQLLNAKLITQRKFDNLTKAERGGLSELDKAGFIKRQLVETRQITKHVAQILDSRMNTKYDENDKLIREVKVITLKSKLVSDFRKDFQFYKVREINNYHHAHDAYLNAVVGTALIKKYPKLESEFVYGDYKVYDVRKMIAKSEQEIGKATAKYFFYSNIMNFFKTEITLANGEIRKRPLIETNGETGEIVWDKGRDFATVRKVLSMPQVNIVKKTEVQTGGFSKESILPKRNSDKLIARKKDWDPKKYGGFDSPTVAYSVLVVAKVEKGKSKKLKSVKELLGITIMERSSFEKNPIDFLEAKGYKEVKKDLIIKLPKYSLFELENGRKRMLASAGELQKGNELALPSKYVNFLYLASHYEKLKGSPEDNEQKQLFVEQHKHYLDEIIEQISEFSKRVILADANLDKVLSAYNKHRDKPIREQAENIIHLFTLTNLGAPAAFKYFDTTIDRKRYTSTKEVLDATLIHQSITGLYETRIDLSQLGGDGGGSPKKKRKV

SEQ ID NO: 1007-1009 - skipped (3 entries)

SEQ ID NO: 1010 - RNA, 4480 nt, synthetic construct
  misc_feature 1..4480: note = Synthetic
  source 1..4480: mol_type = other RNA
gggaagctcagaataaacgctcaactttggccggatctgccaccatggacaagaagtactccatcggcctggacatcggcaccaactccgtgggctgggccgtgatcaccgacgagtacaaggtgccctccaagaagttcaaggtgctgggcaacaccgaccggcactccatcaagaagaacctgatcggcgccctgctgttcgactccggcgagaccgccgaggccacccggctgaagcggaccgcccggcggcggtacacccggcggaagaaccggatctgctacctgcaggagatcttctccaacgagatggccaaggtggacgactccttcttccaccggctggaggagtccttcctggtggaggaggacaagaagcacgagcggcaccccatcttcggcaacatcgtggacgaggtggcctaccacgagaagtaccccaccatctaccacctgcggaagaagctggtggactccaccgacaaggccgacctgcggctgatctacctggccctggcccacatgatcaagttccggggccacttcctgatcgagggcgacctgaaccccgacaactccgacgtggacaagctgttcatccagctggtgcagacctacaaccagctgttcgaggagaaccccatcaacgcctccggcgtggacgccaaggccatcctgtccgcccggctgtccaagtcccggcggctggagaacctgatcgcccagctgcccggcgagaagaagaacggcctgttcggcaacctgatcgccctgtccctgggcctgacccccaacttcaagtccaacttcgacctggccgaggacgccaagctgcagctgtccaaggacacctacgacgacgacctggacaacctgctggcccagatcggcgaccagtacgccgacctgttcctggccgccaagaacctgtccgacgccatcctgctgtccgacatcctgcgggtgaacaccgagatcaccaaggcccccctgtccgcctccatgatcaagcggtacgacgagcaccaccaggacctgaccctgctgaaggccctggtgcggcagcagctgcccgagaagtacaaggagatcttcttcgaccagtccaagaacggctacgccggctacatcgacggcggcgcctcccaggaggagttctacaagttcatcaagcccatcctggagaagatggacggcaccgaggagctgctggtgaagctgaaccgggaggacctgctgcggaagcagcggaccttcgacaacggctccatcccccaccagatccacctgggcgagctgcacgccatcctgcggcggcaggaggacttctaccccttcctgaaggacaaccgggagaagatcgagaagatcctgaccttccggatcccctactacgtgggccccctggcccggggcaactcccggttcgcctggatgacccggaagtccgaggagaccatcaccccctggaacttcgaggaggtggtggacaagggcgcctccgcccagtccttcatcgagcggatgaccaacttcgacaagaacctgcccaacgagaaggtgctgcccaagcactccctgctgtacgagtacttcaccgtgtacaacgagctgaccaaggtgaagtacgtgaccgagggcatgcggaagcccgccttcctgtccggcgagcagaagaaggccatcgtggacctgctgttcaagaccaaccggaaggtgaccgtgaagcagctgaaggaggactacttcaagaagatcgagtgcttcgactccgtggagatctccggcgtggaggaccggttcaacgcctccctgggcacctaccacgacctgctgaagatcatcaaggacaaggacttcctggacaacgaggagaacgaggacatcctggaggacatcgtgctgaccctgaccctgttcgaggaccgggagatgatcgaggagcggctgaagacctacgcccacctgttcgacgacaaggtgatgaagcagctgaagcggcggcggtacaccggctggggccggctgtcccggaagctgatcaacggcatccgggacaagcagtccggcaagaccatcctggacttcctgaagtccgacggcttcgccaaccggaacttcatgcagctgatccacgacgactccctgaccttcaaggaggacatccagaaggcccaggtgtccggccagggcgactccctgcacgagcacatcgccaacctggccggctcccccgccatcaagaagggcatcctgcagaccgtgaaggtggtggacgagctggtgaaggtgatgggccggcacaagcccgagaacatcgtgatcgagatggcccgggagaaccagaccacccagaagggccagaagaactcccgggagcggatgaagcggatcgaggagggcatcaaggagctgggctcccagatcctgaaggagcaccccgtggagaacacccagctgcagaacgagaagctgtacctgtactacctgcagaacggccgggacatgtacgtggaccaggagctggacatcaaccggctgtccgactacgacgtggacgccatcgtgccccagtccttcctgaaggacgactccatcgacaacaaggtgctgacccggtccgacaagaaccggggcaagtccgacaacgtgccctccgaggaggtggtgaagaagatgaagaactactggcggcagctgctgaacgccaagctgatcacccagcggaagttcgacaacctgaccaaggccgagcggggcggcctgtccgagctggacaaggccggcttcatcaagcggcagctggtggagacccggcagatcaccaagcacgtggcccagatcctggactcccggatgaacaccaagtacgacgagaacgacaagctgatccgggaggtgaaggtgatcaccctgaagtccaagctggtgtccgacttccggaaggacttccagttctacaaggtgcgggagatcaacaactaccaccacgcccacgacgcctacctgaacgccgtggtgggcaccgccctgatcaagaagtaccccaagctggagtccgagttcgtgtacggcgactacaaggtgtacgacgtgcggaagatgatcgccaagtccgagcaggagatcggcaaggccaccgccaagtacttcttctactccaacatcatgaacttcttcaagaccgagatcaccctggccaacggcgagatccggaagcggcccctgatcgagaccaacggcgagaccggcgagatcgtgtgggacaagggccgggacttcgccaccgtgcggaaggtgctgtccatgccccaggtgaacatcgtgaagaagaccgaggtgcagaccggcggcttctccaaggagtccatcctgcccaagcggaactccgacaagctgatcgcccggaagaaggactgggaccccaagaagtacggcggcttcgactcccccaccgtggcctactccgtgctggtggtggccaaggtggagaagggcaagtccaagaagctgaagtccgtgaaggagctgctgggcatcaccatcatggagcggtcctccttcgagaagaaccccatcgacttcctggaggccaagggctacaaggaggtgaagaaggacctgatcatcaagctgcccaagtactccctgttcgagctggagaacggccggaagcggatgctggcctccgccggcgagctgcagaagggcaacgagctggccctgccctccaagtacgtgaacttcctgtacctggcctcccactacgagaagctgaagggctcccccgaggacaacgagcagaagcagctgttcgtggagcagcacaagcactacctggacgagatcatcgagcagatctccgagttctccaagcgggtgatcctggccgacgccaacctggacaaggtgctgtccgcctacaacaagcaccgggacaagcccatccgggagcaggccgagaacatcatccacctgttcaccctgaccaacctgggcgcccccgccgccttcaagtacttcgacaccaccatcgaccggaagcggtacacctccaccaaggaggtgctggacgccaccctgatccaccagtccatcaccggcctgtacgagacccggatcgacctgtcccagctgggcggcgacggcggcggctcccccaagaagaagcggaaggtgtccgagtccgccacccccgagtccgtgtccggctggcggctgttcaagaagatctcctgactagcaccagcctcaagaacacccgaatggagtctctaagctacataataccaacttacactttacaaaatgttgtcccccaaaatgtagccattcgtatctgctcctaataaaaagaaagtttcttcacattctctcgagaaaaaaaaaaaaaaaaaaaaaaaaaaaaaaaaaaaaaaaaaaaaaaaaaaaaaaaaaaaaaaaaaaaaaaaaaaaaaaaaaaaaaaaaaaaaatctag

SEQ ID NO: 1011 - RNA, 4197 nt, synthetic construct
  misc_feature 1..4197: note = Synthetic
  source 1..4197: mol_type = other RNA
atggacaagaagtactccatcggcctggacatcggcaccaactccgtgggctgggccgtgatcaccgacgagtacaaggtgccctccaagaagttcaaggtgctgggcaacaccgaccggcactccatcaagaagaacctgatcggcgccctgctgttcgactccggcgagaccgccgaggccacccggctgaagcggaccgcccggcggcggtacacccggcggaagaaccggatctgctacctgcaggagatcttctccaacgagatggccaaggtggacgactccttcttccaccggctggaggagtccttcctggtggaggaggacaagaagcacgagcggcaccccatcttcggcaacatcgtggacgaggtggcctaccacgagaagtaccccaccatctaccacctgcggaagaagctggtggactccaccgacaaggccgacctgcggctgatctacctggccctggcccacatgatcaagttccggggccacttcctgatcgagggcgacctgaaccccgacaactccgacgtggacaagctgttcatccagctggtgcagacctacaaccagctgttcgaggagaaccccatcaacgcctccggcgtggacgccaaggccatcctgtccgcccggctgtccaagtcccggcggctggagaacctgatcgcccagctgcccggcgagaagaagaacggcctgttcggcaacctgatcgccctgtccctgggcctgacccccaacttcaagtccaacttcgacctggccgaggacgccaagctgcagctgtccaaggacacctacgacgacgacctggacaacctgctggcccagatcggcgaccagtacgccgacctgttcctggccgccaagaacctgtccgacgccatcctgctgtccgacatcctgcgggtgaacaccgagatcaccaaggcccccctgtccgcctccatgatcaagcggtacgacgagcaccaccaggacctgaccctgctgaaggccctggtgcggcagcagctgcccgagaagtacaaggagatcttcttcgaccagtccaagaacggctacgccggctacatcgacggcggcgcctcccaggaggagttctacaagttcatcaagcccatcctggagaagatggacggcaccgaggagctgctggtgaagctgaaccgggaggacctgctgcggaagcagcggaccttcgacaacggctccatcccccaccagatccacctgggcgagctgcacgccatcctgcggcggcaggaggacttctaccccttcctgaaggacaaccgggagaagatcgagaagatcctgaccttccggatcccctactacgtgggccccctggcccggggcaactcccggttcgcctggatgacccggaagtccgaggagaccatcaccccctggaacttcgaggaggtggtggacaagggcgcctccgcccagtccttcatcgagcggatgaccaacttcgacaagaacctgcccaacgagaaggtgctgcccaagcactccctgctgtacgagtacttcaccgtgtacaacgagctgaccaaggtgaagtacgtgaccgagggcatgcggaagcccgccttcctgtccggcgagcagaagaaggccatcgtggacctgctgttcaagaccaaccggaaggtgaccgtgaagcagctgaaggaggactacttcaagaagatcgagtgcttcgactccgtggagatctccggcgtggaggaccggttcaacgcctccctgggcacctaccacgacctgctgaagatcatcaaggacaaggacttcctggacaacgaggagaacgaggacatcctggaggacatcgtgctgaccctgaccctgttcgaggaccgggagatgatcgaggagcggctgaagacctacgcccacctgttcgacgacaaggtgatgaagcagctgaagcggcggcggtacaccggctggggccggctgtcccggaagctgatcaacggcatccgggacaagcagtccggcaagaccatcctggacttcctgaagtccgacggcttcgccaaccggaacttcatgcagctgatccacgacgactccctgaccttcaaggaggacatccagaaggcccaggtgtccggccagggcgactccctgcacgagcacatcgccaacctggccggctcccccgccatcaagaagggcatcctgcagaccgtgaaggtggtggacgagctggtgaaggtgatgggccggcacaagcccgagaacatcgtgatcgagatggcccgggagaaccagaccacccagaagggccagaagaactcccgggagcggatgaagcggatcgaggagggcatcaaggagctgggctcccagatcctgaaggagcaccccgtggagaacacccagctgcagaacgagaagctgtacctgtactacctgcagaacggccgggacatgtacgtggaccaggagctggacatcaaccggctgtccgactacgacgtggacgccatcgtgccccagtccttcctgaaggacgactccatcgacaacaaggtgctgacccggtccgacaagaaccggggcaagtccgacaacgtgccctccgaggaggtggtgaagaagatgaagaactactggcggcagctgctgaacgccaagctgatcacccagcggaagttcgacaacctgaccaaggccgagcggggcggcctgtccgagctggacaaggccggcttcatcaagcggcagctggtggagacccggcagatcaccaagcacgtggcccagatcctggactcccggatgaacaccaagtacgacgagaacgacaagctgatccgggaggtgaaggtgatcaccctgaagtccaagctggtgtccgacttccggaaggacttccagttctacaaggtgcgggagatcaacaactaccaccacgcccacgacgcctacctgaacgccgtggtgggcaccgccctgatcaagaagtaccccaagctggagtccgagttcgtgtacggcgactacaaggtgtacgacgtgcggaagatgatcgccaagtccgagcaggagatcggcaaggccaccgccaagtacttcttctactccaacatcatgaacttcttcaagaccgagatcaccctggccaacggcgagatccggaagcggcccctgatcgagaccaacggcgagaccggcgagatcgtgtgggacaagggccgggacttcgccaccgtgcggaaggtgctgtccatgccccaggtgaacatcgtgaagaagaccgaggtgcagaccggcggcttctccaaggagtccatcctgcccaagcggaactccgacaagctgatcgcccggaagaaggactgggaccccaagaagtacggcggcttcgactcccccaccgtggcctactccgtgctggtggtggccaaggtggagaagggcaagtccaagaagctgaagtccgtgaaggagctgctgggcatcaccatcatggagcggtcctccttcgagaagaaccccatcgacttcctggaggccaagggctacaaggaggtgaagaaggacctgatcatcaagctgcccaagtactccctgttcgagctggagaacggccggaagcggatgctggcctccgccggcgagctgcagaagggcaacgagctggccctgccctccaagtacgtgaacttcctgtacctggcctcccactacgagaagctgaagggctcccccgaggacaacgagcagaagcagctgttcgtggagcagcacaagcactacctggacgagatcatcgagcagatctccgagttctccaagcgggtgatcctggccgacgccaacctggacaaggtgctgtccgcctacaacaagcaccgggacaagcccatccgggagcaggccgagaacatcatccacctgttcaccctgaccaacctgggcgcccccgccgccttcaagtacttcgacaccaccatcgaccggaagcggtacacctccaccaaggaggtgctggacgccaccctgatccaccagtccatcaccggcctgtacgagacccggatcgacctgtcccagctgggcggcgacggcggcggctcccccaagaagaagcggaaggtgtccgagtccgccacccccgagtccgtgtccggctggcggctgttcaagaagatctcctga

SEQ ID NO: 1012 - protein, 1398 aa, synthetic construct
  REGION 1..1398: note = Synthetic
MDKKYSIGLDIGTNSVGWAVITDEYKVPSKKFKVLGNTDRHSIKKNLIGALLFDSGETAEATRLKRTARRRYTRRKNRICYLQEIFSNEMAKVDDSFFHRLEESFLVEEDKKHERHPIFGNIVDEVAYHEKYPTIYHLRKKLVDSTDKADLRLIYLALAHMIKFRGHFLIEGDLNPDNSDVDKLFIQLVQTYNQLFEENPINASGVDAKAILSARLSKSRRLENLIAQLPGEKKNGLFGNLIALSLGLTPNFKSNFDLAEDAKLQLSKDTYDDDLDNLLAQIGDQYADLFLAAKNLSDAILLSDILRVNTEITKAPLSASMIKRYDEHHQDLTLLKALVRQQLPEKYKEIFFDQSKNGYAGYIDGGASQEEFYKFIKPILEKMDGTEELLVKLNREDLLRKQRTFDNGSIPHQIHLGELHAILRRQEDFYPFLKDNREKIEKILTFRIPYYVGPLARGNSRFAWMTRKSEETITPWNFEEVVDKGASAQSFIERMTNFDKNLPNEKVLPKHSLLYEYFTVYNELTKVKYVTEGMRKPAFLSGEQKKAIVDLLFKTNRKVTVKQLKEDYFKKIECFDSVEISGVEDRFNASLGTYHDLLKIIKDKDFLDNEENEDILEDIVLTLTLFEDREMIEERLKTYAHLFDDKVMKQLKRRRYTGWGRLSRKLINGIRDKQSGKTILDFLKSDGFANRNFMQLIHDDSLTFKEDIQKAQVSGQGDSLHEHIANLAGSPAIKKGILQTVKVVDELVKVMGRHKPENIVIEMARENQTTQKGQKNSRERMKRIEEGIKELGSQILKEHPVENTQLQNEKLYLYYLQNGRDMYVDQELDINRLSDYDVDAIVPQSFLKDDSIDNKVLTRSDKNRGKSDNVPSEEVVKKMKNYWRQLLNAKLITQRKFDNLTKAERGGLSELDKAGFIKRQLVETRQITKHVAQILDSRMNTKYDENDKLIREVKVITLKSKLVSDFRKDFQFYKVREINNYHHAHDAYLNAVVGTALIKKYPKLESEFVYGDYKVYDVRKMIAKSEQEIGKATAKYFFYSNIMNFFKTEITLANGEIRKRPLIETNGETGEIVWDKGRDFATVRKVLSMPQVNIVKKTEVQTGGFSKESILPKRNSDKLIARKKDWDPKKYGGFDSPTVAYSVLVVAKVEKGKSKKLKSVKELLGITIMERSSFEKNPIDFLEAKGYKEVKKDLIIKLPKYSLFELENGRKRMLASAGELQKGNELALPSKYVNFLYLASHYEKLKGSPEDNEQKQLFVEQHKHYLDEIIEQISEFSKRVILADANLDKVLSAYNKHRDKPIREQAENIIHLFTLTNLGAPAAFKYFDTTIDRKRYTSTKEVLDATLIHQSITGLYETRIDLSQLGGDGGGSPKKKRKVSESATPESVSGWRLFKKIS

SEQ ID NO: 1013 - RNA, 4137 nt, synthetic construct
  misc_feature 1..4137: note = Synthetic
  source 1..4137: mol_type = other RNA
atggacaagaagtactccatcggcctggacatcggcaccaactccgtgggctgggccgtgatcaccgacgagtacaaggtgccctccaagaagttcaaggtgctgggcaacaccgaccggcactccatcaagaagaacctgatcggcgccctgctgttcgactccggcgagaccgccgaggccacccggctgaagcggaccgcccggcggcggtacacccggcggaagaaccggatctgctacctgcaggagatcttctccaacgagatggccaaggtggacgactccttcttccaccggctggaggagtccttcctggtggaggaggacaagaagcacgagcggcaccccatcttcggcaacatcgtggacgaggtggcctaccacgagaagtaccccaccatctaccacctgcggaagaagctggtggactccaccgacaaggccgacctgcggctgatctacctggccctggcccacatgatcaagttccggggccacttcctgatcgagggcgacctgaaccccgacaactccgacgtggacaagctgttcatccagctggtgcagacctacaaccagctgttcgaggagaaccccatcaacgcctccggcgtggacgccaaggccatcctgtccgcccggctgtccaagtcccggcggctggagaacctgatcgcccagctgcccggcgagaagaagaacggcctgttcggcaacctgatcgccctgtccctgggcctgacccccaacttcaagtccaacttcgacctggccgaggacgccaagctgcagctgtccaaggacacctacgacgacgacctggacaacctgctggcccagatcggcgaccagtacgccgacctgttcctggccgccaagaacctgtccgacgccatcctgctgtccgacatcctgcgggtgaacaccgagatcaccaaggcccccctgtccgcctccatgatcaagcggtacgacgagcaccaccaggacctgaccctgctgaaggccctggtgcggcagcagctgcccgagaagtacaaggagatcttcttcgaccagtccaagaacggctacgccggctacatcgacggcggcgcctcccaggaggagttctacaagttcatcaagcccatcctggagaagatggacggcaccgaggagctgctggtgaagctgaaccgggaggacctgctgcggaagcagcggaccttcgacaacggctccatcccccaccagatccacctgggcgagctgcacgccatcctgcggcggcaggaggacttctaccccttcctgaaggacaaccgggagaagatcgagaagatcctgaccttccggatcccctactacgtgggccccctggcccggggcaactcccggttcgcctggatgacccggaagtccgaggagaccatcaccccctggaacttcgaggaggtggtggacaagggcgcctccgcccagtccttcatcgagcggatgaccaacttcgacaagaacctgcccaacgagaaggtgctgcccaagcactccctgctgtacgagtacttcaccgtgtacaacgagctgaccaaggtgaagtacgtgaccgagggcatgcggaagcccgccttcctgtccggcgagcagaagaaggccatcgtggacctgctgttcaagaccaaccggaaggtgaccgtgaagcagctgaaggaggactacttcaagaagatcgagtgcttcgactccgtggagatctccggcgtggaggaccggttcaacgcctccctgggcacctaccacgacctgctgaagatcatcaaggacaaggacttcctggacaacgaggagaacgaggacatcctggaggacatcgtgctgaccctgaccctgttcgaggaccgggagatgatcgaggagcggctgaagacctacgcccacctgttcgacgacaaggtgatgaagcagctgaagcggcggcggtacaccggctggggccggctgtcccggaagctgatcaacggcatccgggacaagcagtccggcaagaccatcctggacttcctgaagtccgacggcttcgccaaccggaacttcatgcagctgatccacgacgactccctgaccttcaaggaggacatccagaaggcccaggtgtccggccagggcgactccctgcacgagcacatcgccaacctggccggctcccccgccatcaagaagggcatcctgcagaccgtgaaggtggtggacgagctggtgaaggtgatgggccggcacaagcccgagaacatcgtgatcgagatggcccgggagaaccagaccacccagaagggccagaagaactcccgggagcggatgaagcggatcgaggagggcatcaaggagctgggctcccagatcctgaaggagcaccccgtggagaacacccagctgcagaacgagaagctgtacctgtactacctgcagaacggccgggacatgtacgtggaccaggagctggacatcaaccggctgtccgactacgacgtggacgccatcgtgccccagtccttcctgaaggacgactccatcgacaacaaggtgctgacccggtccgacaagaaccggggcaagtccgacaacgtgccctccgaggaggtggtgaagaagatgaagaactactggcggcagctgctgaacgccaagctgatcacccagcggaagttcgacaacctgaccaaggccgagcggggcggcctgtccgagctggacaaggccggcttcatcaagcggcagctggtggagacccggcagatcaccaagcacgtggcccagatcctggactcccggatgaacaccaagtacgacgagaacgacaagctgatccgggaggtgaaggtgatcaccctgaagtccaagctggtgtccgacttccggaaggacttccagttctacaaggtgcgggagatcaacaactaccaccacgcccacgacgcctacctgaacgccgtggtgggcaccgccctgatcaagaagtaccccaagctggagtccgagttcgtgtacggcgactacaaggtgtacgacgtgcggaagatgatcgccaagtccgagcaggagatcggcaaggccaccgccaagtacttcttctactccaacatcatgaacttcttcaagaccgagatcaccctggccaacggcgagatccggaagcggcccctgatcgagaccaacggcgagaccggcgagatcgtgtgggacaagggccgggacttcgccaccgtgcggaaggtgctgtccatgccccaggtgaacatcgtgaagaagaccgaggtgcagaccggcggcttctccaaggagtccatcctgcccaagcggaactccgacaagctgatcgcccggaagaaggactgggaccccaagaagtacggcggcttcgactcccccaccgtggcctactccgtgctggtggtggccaaggtggagaagggcaagtccaagaagctgaagtccgtgaaggagctgctgggcatcaccatcatggagcggtcctccttcgagaagaaccccatcgacttcctggaggccaagggctacaaggaggtgaagaaggacctgatcatcaagctgcccaagtactccctgttcgagctggagaacggccggaagcggatgctggcctccgccggcgagctgcagaagggcaacgagctggccctgccctccaagtacgtgaacttcctgtacctggcctcccactacgagaagctgaagggctcccccgaggacaacgagcagaagcagctgttcgtggagcagcacaagcactacctggacgagatcatcgagcagatctccgagttctccaagcgggtgatcctggccgacgccaacctggacaaggtgctgtccgcctacaacaagcaccgggacaagcccatccgggagcaggccgagaacatcatccacctgttcaccctgaccaacctgggcgcccccgccgccttcaagtacttcgacaccaccatcgaccggaagcggtacacctccaccaaggaggtgctggacgccaccctgatccaccagtccatcaccggcctgtacgagacccggatcgacctgtcccagctgggcggcgacggcggcggctcccccaagaagaagcggaaggtg

SEQ ID NO: 1014 - protein, 1379 aa, synthetic construct
  REGION 1..1379: note = Synthetic
MDKKYSIGLDIGTNSVGWAVITDEYKVPSKKFKVLGNTDRHSIKKNLIGALLFDSGETAEATRLKRTARRRYTRRKNRICYLQEIFSNEMAKVDDSFFHRLEESFLVEEDKKHERHPIFGNIVDEVAYHEKYPTIYHLRKKLVDSTDKADLRLIYLALAHMIKFRGHFLIEGDLNPDNSDVDKLFIQLVQTYNQLFEENPINASGVDAKAILSARLSKSRRLENLIAQLPGEKKNGLFGNLIALSLGLTPNFKSNFDLAEDAKLQLSKDTYDDDLDNLLAQIGDQYADLFLAAKNLSDAILLSDILRVNTEITKAPLSASMIKRYDEHHQDLTLLKALVRQQLPEKYKEIFFDQSKNGYAGYIDGGASQEEFYKFIKPILEKMDGTEELLVKLNREDLLRKQRTFDNGSIPHQIHLGELHAILRRQEDFYPFLKDNREKIEKILTFRIPYYVGPLARGNSRFAWMTRKSEETITPWNFEEVVDKGASAQSFIERMTNFDKNLPNEKVLPKHSLLYEYFTVYNELTKVKYVTEGMRKPAFLSGEQKKAIVDLLFKTNRKVTVKQLKEDYFKKIECFDSVEISGVEDRFNASLGTYHDLLKIIKDKDFLDNEENEDILEDIVLTLTLFEDREMIEERLKTYAHLFDDKVMKQLKRRRYTGWGRLSRKLINGIRDKQSGKTILDFLKSDGFANRNFMQLIHDDSLTFKEDIQKAQVSGQGDSLHEHIANLAGSPAIKKGILQTVKVVDELVKVMGRHKPENIVIEMARENQTTQKGQKNSRERMKRIEEGIKELGSQILKEHPVENTQLQNEKLYLYYLQNGRDMYVDQELDINRLSDYDVDAIVPQSFLKDDSIDNKVLTRSDKNRGKSDNVPSEEVVKKMKNYWRQLLNAKLITQRKFDNLTKAERGGLSELDKAGFIKRQLVETRQITKHVAQILDSRMNTKYDENDKLIREVKVITLKSKLVSDFRKDFQFYKVREINNYHHAHDAYLNAVVGTALIKKYPKLESEFVYGDYKVYDVRKMIAKSEQEIGKATAKYFFYSNIMNFFKTEITLANGEIRKRPLIETNGETGEIVWDKGRDFATVRKVLSMPQVNIVKKTEVQTGGFSKESILPKRNSDKLIARKKDWDPKKYGGFDSPTVAYSVLVVAKVEKGKSKKLKSVKELLGITIMERSSFEKNPIDFLEAKGYKEVKKDLIIKLPKYSLFELENGRKRMLASAGELQKGNELALPSKYVNFLYLASHYEKLKGSPEDNEQKQLFVEQHKHYLDEIIEQISEFSKRVILADANLDKVLSAYNKHRDKPIREQAENIIHLFTLTNLGAPAAFKYFDTTIDRKRYTSTKEVLDATLIHQSITGLYETRIDLSQLGGDGGGSPKKKRKV

SEQ ID NO: 1015-1017 - skipped (3 entries)

SEQ ID NO: 1018 - DNA, 1578 bp, synthetic construct
  misc_feature 1..1578: note = Synthetic
  source 1..1578: mol_type = other DNA
atggactccaccaaggagaagtgcgactcctacaaggacgacctgctgctgcggatgggcctgaacgacaacaaggccggcatggagggcctggacaaggagaagatcaacaagatcatcatggaggccaccaagggctcccggttctacggcaacgagctgaagaaggagaagcaggtgaaccagcggatcgagaacatgatgcagcagaaggcccagatcacctcccagcagctgcggaaggcccagctgcaggtggaccggttcgccatggagctggagcagtcccggaacctgtccaacaccatcgtgcacatcgacatggacgccttctacgccgccgtggagatgcgggacaaccccgagctgaaggacaagcccatcgccgtgggctccatgtccatgctgtccacctccaactaccacgcccggcggttcggcgtgcgggccgccatgcccggcttcatcgccaagcggctgtgcccccagctgatcatcgtgccccccaacttcgacaagtaccgggccgtgtccaaggaggtgaaggagatcctggccgactacgaccccaacttcatggccatgtccctggacgaggcctacctgaacatcaccaagcacctggaggagcggcagaactggcccgaggacaagcggcggtacttcatcaagatgggctcctccgtggagaacgacaaccccggcaaggaggtgaacaagctgtccgagcacgagcggtccatctcccccctgctgttcgaggagtccccctccgacgtgcagccccccggcgaccccttccaggtgaacttcgaggagcagaacaacccccagatcctgcagaactccgtggtgttcggcacctccgcccaggaggtggtgaaggagatccggttccggatcgagcagaagaccaccctgaccgcctccgccggcatcgcccccaacaccatgctggccaaggtgtgctccgacaagaacaagcccaacggccagtaccagatcctgcccaaccggcaggccgtgatggacttcatcaaggacctgcccatccggaaggtgtccggcatcggcaaggtgaccgagaagatgctgaaggccctgggcatcatcacctgcaccgagctgtaccagcagcgggccctgctgtccctgctgttctccgagacctcctggcactacttcctgcacatctccctgggcctgggctccacccacctgacccgggaccgggtgcggaagtccatgtccgtggagcggaccttctccgagatcaacaaggccgaggagcagtactccctgtgccaggagctgtgctccgagctggcccaggacctgcagaaggagcggctgaagggccggaccgtgaccatcaagctgaagaacgtgaacttcgaggtgaagacccgggcctccaccgtgtcctccgtggtgtccaccgccgaggagatcttcgccatcgccaaggagctgctgaagaccgagatcgacgccgacttcccccaccccctgcggctgcggctgatgggcgtgcggatctcctccttccccaacgaggaggaccggaagcaccagcag

SEQ ID NO: 1019 - DNA, 1578 bp, synthetic construct; identical to SEQ ID NO: 1018
  misc_feature 1..1578: note = Synthetic
  source 1..1578: mol_type = other DNA

SEQ ID NO: 1020 - DNA, 2610 bp, synthetic construct
  misc_feature 1..2610: note = Synthetic
  source 1..2610: mol_type = other DNA
atggactccaccaaggagaagtgcgactcctacaaggacgacctgctgctgcggatgggcctgaacgacaacaaggccggcatggagggcctggacaaggagaagatcaacaagatcatcatggaggccaccaagggctcccggttctacggcaacgagctgaagaaggagaagcaggtgaaccagcggatcgagaacatgatgcagcagaaggcccagatcacctcccagcagctgcggaaggcccagctgcaggtggaccggttcgccatggagctggagcagtcccggaacctgtccaacaccatcgtgcacatcgacatggacgccttctacgccgccgtggagatgcgggacaaccccgagctgaaggacaagcccatcgccgtgggctccatgtccatgctgtccacctccaactaccacgcccggcggttcggcgtgcgggccgccatgcccggcttcatcgccaagcggctgtgcccccagctgatcatcgtgccccccaacttcgacaagtaccgggccgtgtccaaggaggtgaaggagatcctggccgactacgaccccaacttcatggccatgtccctggacgaggcctacctgaacatcaccaagcacctggaggagcggcagaactggcccgaggacaagcggcggtacttcatcaagatgggctcctccgtggagaacgacaaccccggcaaggaggtgaacaagctgtccgagcacgagcggtccatctcccccctgctgttcgaggagtccccctccgacgtgcagccccccggcgaccccttccaggtgaacttcgaggagcagaacaacccccagatcctgcagaactccgtggtgttcggcacctccgcccaggaggtggtgaaggagatccggttccggatcgagcagaagaccaccctgaccgcctccgccggcatcgcccccaacaccatgctggccaaggtgtgctccgacaagaacaagcccaacggccagtaccagatcctgcccaaccggcaggccgtgatggacttcatcaaggacctgcccatccggaaggtgtccggcatcggcaaggtgaccgagaagatgctgaaggccctgggcatcatcacctgcaccgagctgtaccagcagcgggccctgctgtccctgctgttctccgagacctcctggcactacttcctgcacatctccctgggcctgggctccacccacctgacccgggacggcgagcggaagtccatgtccgtggagcggaccttctccgagatcaacaaggccgaggagcagtactccctgtgccaggagctgtgctccgagctggcccaggacctgcagaaggagcggctgaagggccggaccgtgaccatcaagctgaagaacgtgaacttcgaggtgaagacccgggcctccaccgtgtcctccgtggtgtccaccgccgaggagatcttcgccatcgccaaggagctgctgaagaccgagatcgacgccgacttcccccaccccctgcggctgcggctgatgggcgtgcggatctcctccttccccaacgaggaggaccggaagcaccagcagcggtccatcatcggcttcctgcaggccggcaaccaggccctgtccgccaccgagtgcaccctggagaagaccgacaaggacaagttcgtgaagcccctggagatgtcccacaagaagtccttcttcgacaagaagcggtccgagcggaagtggtcccaccaggacaccttcaagtgcgaggccgtgaacaagcagtccttccagacctcccagcccttccaggtgctgaagaagaagatgaacgagaacctggagatctccgagaactccgacgactgccagatcctgacctgccccgtgtgcttccgggcccagggctgcatctccctggaggccctgaacaagcacgtggacgagtgcctggacggcccctccatctccgagaacttcaagatgttctcctgctcccacgtgtccgccaccaaggtgaacaagaaggagaacgtgcccgcctcctccctgtgcgagaagcaggactacgaggcccaccccaagatcaaggagatctcctccgtggactgcatcgccctggtggacaccatcgacaactcctccaaggccgagtccatcgacgccctgtccaacaagcactccaaggaggagtgctcctccctgccctccaagtccttcaacatcgagcactgccaccagaactcctcctccaccgtgtccctggagaacgaggacgtgggctccttccggcaggagtaccggcagccctacctgtgcgaggtgaagaccggccaggccctggtgtgccccgtgtgcaacgtggagcagaagacctccgacctgaccctgttcaacgtgcacgtggacgtgtgcctgaacaagtccttcatccaggagctgcggaaggacaagttcaaccccgtgaaccagcccaaggagtcctcccggtccaccggctcctcctccggcgtgcagaaggccgtgacccggaccaagcggcccggcctgatgaccaagtactccacctccaagaagatcaagcccaacaaccccaagcacaccctggacatcttcttcaag

SEQ ID NO: 1021 - protein, 870 aa, synthetic construct
  REGION 1..870: note = Synthetic
MDSTKEKCDSYKDDLLLRMGLNDNKAGMEGLDKEKINKIIMEATKGSRFYGNELKKEKQVNQRIENMMQQKAQITSQQLRKAQLQVDRFAMELEQSRNLSNTIVHIDMDAFYAAVEMRDNPELKDKPIAVGSMSMLSTSNYHARRFGVRAAMPGFIAKRLCPQLIIVPPNFDKYRAVSKEVKEILADYDPNFMAMSLDEAYLNITKHLEERQNWPEDKRRYFIKMGSSVENDNPGKEVNKLSEHERSISPLLFEESPSDVQPPGDPFQVNFEEQNNPQILQNSVVFGTSAQEVVKEIRFRIEQKTTLTASAGIAPNTMLAKVCSDKNKPNGQYQILPNRQAVMDFIKDLPIRKVSGIGKVTEKMLKALGIITCTELYQQRALLSLLFSETSWHYFLHISLGLGSTHLTRDGERKSMSVERTFSEINKAEEQYSLCQELCSELAQDLQKERLKGRTVTIKLKNVNFEVKTRASTVSSVVSTAEEIFAIAKELLKTEIDADFPHPLRLRLMGVRISSFPNEEDRKHQQRSIIGFLQAGNQALSATECTLEKTDKDKFVKPLEMSHKKSFFDKKRSERKWSHQDTFKCEAVNKQSFQTSQPFQVLKKKMNENLEISENSDDCQILTCPVCFRAQGCISLEALNKHVDECLDGPSISENFKMFSCSHVSATKVNKKENVPASSLCEKQDYEAHPKIKEISSVDCIALVDTIDNSSKAESIDALSNKHSKEECSSLPSKSFNIEHCHQNSSSTVSLENEDVGSFRQEYRQPYLCEVKTGQALVCPVCNVEQKTSDLTLFNVHVDVCLNKSFIQELRKDKFNPVNQPKESSRSTGSSSGVQKAVTRTKRPGLMTKYSTSKKIKPNNPKHTLDIFFK

SEQ ID NO: 1022 - RNA, 7432 nt, synthetic construct
  misc_feature 1..7432: note = Synthetic
  source 1..7432: mol_type = other RNA
gggaagctcagaataaacgctcaactttggccggatctgccaccatgaagcggaccgccgacggctccgagttcgagtcccccaagaagaagcggaaggtggacaagaagtactccatcggcctggacatcggcaccaactccgtgggctgggccgtgatcaccgacgagtacaaggtgccctccaagaagttcaaggtgctgggcaacaccgaccggcactccatcaagaagaacctgatcggcgccctgctgttcgactccggcgagaccgccgaggccacccggctgaagcggaccgcccggcggcggtacacccggcggaagaaccggatctgctacctgcaggagatcttctccaacgagatggccaaggtggacgactccttcttccaccggctggaggagtccttcctggtggaggaggacaagaagcacgagcggcaccccatcttcggcaacatcgtggacgaggtggcctaccacgagaagtaccccaccatctaccacctgcggaagaagctggtggactccaccgacaaggccgacctgcggctgatctacctggccctggcccacatgatcaagttccggggccacttcctgatcgagggcgacctgaaccccgacaactccgacgtggacaagctgttcatccagctggtgcagacctacaaccagctgttcgaggagaaccccatcaacgcctccggcgtggacgccaaggccatcctgtccgcccggctgtccaagtcccggcggctggagaacctgatcgcccagctgcccggcgagaagaagaacggcctgttcggcaacctgatcgccctgtccctgggcctgacccccaacttcaagtccaacttcgacctggccgaggacgccaagctgcagctgtccaaggacacctacgacgacgacctggacaacctgctggcccagatcggcgaccagtacgccgacctgttcctggccgccaagaacctgtccgacgccatcctgctgtccgacatcctgcgggtgaacaccgagatcaccaaggcccccctgtccgcctccatgatcaagcggtacgacgagcaccaccaggacctgaccctgctgaaggccctggtgcggcagcagctgcccgagaagtacaaggagatcttcttcgaccagtccaagaacggctacgccggctacatcgacggcggcgcctcccaggaggagttctacaagttcatcaagcccatcctggagaagatggacggcaccgaggagctgctggtgaagctgaaccgggaggacctgctgcggaagcagcggaccttcgacaacggctccatcccccaccagatccacctgggcgagctgcacgccatcctgcggcggcaggaggacttctaccccttcctgaaggacaaccgggagaagatcgagaagatcctgaccttccggatcccctactacgtgggccccctggcccggggcaactcccggttcgcctggatgacccggaagtccgaggagaccatcaccccctggaacttcgaggaggtggtggacaagggcgcctccgcccagtccttcatcgagcggatgaccaacttcgacaagaacctgcccaacgagaaggtgctgcccaagcactccctgctgtacgagtacttcaccgtgtacaacgagctgaccaaggtgaagtacgtgaccgagggcatgcggaagcccgccttcctgtccggcgagcagaagaaggccatcgtggacctgctgttcaagaccaaccggaaggtgaccgtgaagcagctgaaggaggactacttcaagaagatcgagtgcttcgactccgtggagatctccggcgtggaggaccggttcaacgcctccctgggcacctaccacgacctgctgaagatcatcaaggacaaggacttcctggacaacgaggagaacgaggacatcctggaggacatcgtgctgaccctgaccctgttcgaggaccgggagatgatcgaggagcggctgaagacctacgcccacctgttcgacgacaaggtgatgaagcagctgaagcggcggcggtacaccggctggggccggctgtcccggaagctgatcaacggcatccgggacaagcagtccggcaagaccatcctggacttcctgaagtccgacggcttcgccaaccggaacttcatgcagctgatccacgacgactccctgaccttcaaggaggacatccagaaggcccaggtgtccggccagggcgactccctgcacgagcacatcgccaacctggccggctcccccgccatcaagaagggcatcctgcagaccgtgaaggtggtggacgagctggtgaaggtgatgggccggcacaagcccgagaacatcgtgatcgagatggcccgggagaaccagaccacccagaagggccagaagaactcccgggagcggatgaagcggatcgaggagggcatcaaggagctgggctcccagatcctgaaggagcaccccgtggagaacacccagctgcagaacgagaagctgtacctgtactacctgcagaacggccgggacatgtacgtggaccaggagctggacatcaaccggctgtccgactacgacgtggacgccatcgtgccccagtccttcctgaaggacgactccatcgacaacaaggtgctgacccggtccgacaagaaccggggcaagtccgacaacgtgccctccgaggaggtggtgaagaagatgaagaactactggcggcagctgctgaacgccaagctgatcacccagcggaagttcgacaacctgaccaaggccgagcggggcggcctgtccgagctggacaaggccggcttcatcaagcggcagctggtggagacccggcagatcaccaagcacgtggcccagatcctggactcccggatgaacaccaagtacgacgagaacgacaagctgatccgggaggtgaaggtgatcaccctgaagtccaagctggtgtccgacttccggaaggacttccagttctacaaggtgcgggagatcaacaactaccaccacgcccacgacgcctacctgaacgccgtggtgggcaccgccctgatcaagaagtaccccaagctggagtccgagttcgtgtacggcgactacaaggtgtacgacgtgcggaagatgatcgccaagtccgagcaggagatcggcaaggccaccgccaagtacttcttctactccaacatcatgaacttcttcaagaccgagatcaccctggccaacggcgagatccggaagcggcccctgatcgagaccaacggcgagaccggcgagatcgtgtgggacaagggccgggacttcgccaccgtgcggaaggtgctgtccatgccccaggtgaacatcgtgaagaagaccgaggtgcagaccggcggcttctccaaggagtccatcctgcccaagcggaactccgacaagctgatcgcccggaagaaggactgggaccccaagaagtacggcggcttcgactcccccaccgtggcctactccgtgctggtggtggccaaggtggagaagggcaagtccaagaagctgaagtccgtgaaggagctgctgggcatcaccatcatggagcggtcctccttcgagaagaaccccatcgacttcctggaggccaagggctacaaggaggtgaagaaggacctgatcatcaagctgcccaagtactccctgttcgagctggagaacggccggaagcggatgctggcctccgccggcgagctgcagaagggcaacgagctggccctgccctccaagtacgtgaacttcctgtacctggcctcccactacgagaagctgaagggctcccccgaggacaacgagcagaagcagctgttcgtggagcagcacaagcactacctggacgagatcatcgagcagatctccgagttctccaagcgggtgatcctggccgacgccaacctggacaaggtgctgtccgcctacaacaagcaccgggacaagcccatccgggagcaggccgagaacatcatccacctgttcaccctgaccaacctgggcgcccccgccgccttcaagtacttcgacaccaccatcgaccggaagcggtacacctccaccaaggaggtgctggacgccaccctgatccaccagtccatcaccggcctgtacgagacccggatcgacctgtcccagctgggcggcgactccggcggctcctccggcggctccaagcggaccgccgacggctccgagttcgagtcccccaagaagaagcggaaggtgtccggcggctcctccggcggctccatggactccaccaaggagaagtgcgactcctacaaggacgacctgctgctgcggatgggcctgaacgacaacaaggccggcatggagggcctggacaaggagaagatcaacaagatcatcatggaggccaccaagggctcccggttctacggcaacgagctgaagaaggagaagcaggtgaaccagcggatcgagaacatgatgcagcagaaggcccagatcacctcccagcagctgcggaaggcccagctgcaggtggaccggttcgccatggagctggagcagtcccggaacctgtccaacaccatcgtgcacatcgacatggacgccttctacgccgccgtggagatgcgggacaaccccgagctgaaggacaagcccatcgccgtgggctccatgtccatgctgtccacctccaactaccacgcccggcggttcggcgtgcgggccgccatgcccggcttcatcgccaagcggctgtgcccccagctgatcatcgtgccccccaacttcgacaagtaccgggccgtgtccaaggaggtgaaggagatcctggccgactacgaccccaacttcatggccatgtccctggacgaggcctacctgaacatcaccaagcacctggaggagcggcagaactggcccgaggacaagcggcggtacttcatcaagatgggctcctccgtggagaacgacaaccccggcaaggaggtgaacaagctgtccgagcacgagcggtccatctcccccctgctgttcgaggagtccccctccgacgtgcagccccccggcgaccccttccaggtgaacttcgaggagcagaacaacccccagatcctgcagaactccgtggtgttcggcacctccgcccaggaggtggtgaaggagatccggttccggatcgagcagaagaccaccctgaccgcctccgccggcatcgcccccaacaccatgctggccaaggtgtgctccgacaagaacaagcccaacggccagtaccagatcctgcccaaccggcaggccgtgatggacttcatcaaggacctgcccatccggaaggtgtccggcatcggcaaggtgaccgagaagatgctgaaggccctgggcatcatcacctgcaccgagctgtaccagcagcgggccctgctgtccctgctgttctccgagacctcctggcactacttcctgcacatctccctgggcctgggctccacccacctgacccgggacggcgagcggaagtccatgtccgtggagcggaccttctccgagatcaacaaggccgaggagcagtactccctgtgccaggagctgtgctccgagctggcccaggacctgcagaaggagcggctgaagggccggaccgtgaccatcaagctgaagaacgtgaacttcgaggtgaagacccgggcctccaccgtgtcctccgtggtgtccaccgccgaggagatcttcgccatcgccaaggagctgctgaagaccgagatcgacgccgacttcccccaccccctgcggctgcggctgatgggcgtgcggatctcctccttccccaacgaggaggaccggaagcaccagcagcggtccatcatcggcttcctgcaggccggcaaccaggccctgtccgccaccgagtgcaccctggagaagaccgacaaggacaagttcgtgaagcccctggagatgtcccacaagaagtccttcttcgacaagaagcggtccgagcggaagtggtcccaccaggacaccttcaagtgcgaggccgtgaacaagcagtccttccagacctcccagcccttccaggtgctgaagaagaagatgaacgagaacctggagatctccgagaactccgacgactgccagatcctgacctgccccgtgtgcttccgggcccagggctgcatctccctggaggccctgaacaagcacgtggacgagtgcctggacggcccctccatctccgagaacttcaagatgttctcctgctcccacgtgtccgccaccaaggtgaacaagaaggagaacgtgcccgcctcctccctgtgcgagaagcaggactacgaggcccaccccaagatcaaggagatctcctccgtggactgcatcgccctggtggacaccatcgacaactcctccaaggccgagtccatcgacgccctgtccaacaagcactccaaggaggagtgctcctccctgccctccaagtccttcaacatcgagcactgccaccagaactcctcctccaccgtgtccctggagaacgaggacgtgggctccttccggcaggagtaccggcagccctacctgtgcgaggtgaagaccggccaggccctggtgtgccccgtgtgcaacgtggagcagaagacctccgacctgaccctgttcaacgtgcacgtggacgtgtgcctgaacaagtccttcatccaggagctgcggaaggacaagttcaaccccgtgaaccagcccaaggagtcctcccggtccaccggctcctcctccggcgtgcagaaggccgtgacccggaccaagcggcccggcctgatgaccaagtactccacctccaagaagatcaagcccaacaaccccaagcacaccctggacatcttcttcaagtagctagcaccagcctcaagaacacccgaatggagtctctaagctacataataccaacttacactttacaaaatgttgtcccccaaaatgtagccattcgtatctgctcctaataaaaagaaagtttcttcacattctctcgagaaaaaaaaaaaatggaaaaaaaaaaaacggaaaaaaaaaaaaggtaaaaaaaaaaaatataaaaaaaaaaaacataaaaaaaaaaaacgaaaaaaaaaaaacgtaaaaaaaaaaaactcaaaaaaaaaaaagataaaaaaaaaaaacctaaaaaaaaaaaatgtaaaaaaaaaaaagggaaaaaaaaaaaacgcaaaaaaaaaaaacacaaaaaaaaaaaatgcaaaaaaaaaaaatcgaaaaaaaaaaaatctaaaaaaaaaaaacgaaaaaaaaaaaacccaaaaaaaaaaaagacaaaaaaaaaaaatagaaaaaaaaaaagttaaaaaaaaaaaactgaaaaaaaaaaaatttaaaaaaaaaaaatctag

SEQ ID NO: 1023 - RNA, 6873 nt, synthetic construct
  misc_feature 1..6873: note = Synthetic
  source 1..6873: mol_type = other RNA
atgaagcggaccgccgacggctccgagttcgagtcccccaagaagaagcggaaggtggacaagaagtactccatcggcctggacatcggcaccaactccgtgggctgggccgtgatcaccgacgagtacaaggtgccctccaagaagttcaaggtgctgggcaacaccgaccggcactccatcaagaagaacctgatcggcgccctgctgttcgactccggcgagaccgccgaggccacccggctgaagcggaccgcccggcggcggtacacccggcggaagaaccggatctgctacctgcaggagatcttctccaacgagatggccaaggtggacgactccttcttccaccggctggaggagtccttcctggtggaggaggacaagaagcacgagcggcaccccatcttcggcaacatcgtggacgaggtggcctaccacgagaagtaccccaccatctaccacctgcggaagaagctggtggactccaccgacaaggccgacctgcggctgatctacctggccctggcccacatgatcaagttccggggccacttcctgatcgagggcgacctgaaccccgacaactccgacgtggacaagctgttcatccagctggtgcagacctacaaccagctgttcgaggagaaccccatcaacgcctccggcgtggacgccaaggccatcctgtccgcccggctgtccaagtcccggcggctggagaacctgatcgcccagctgcccggcgagaagaagaacggcctgttcggcaacctgatcgccctgtccctgggcctgacccccaacttcaagtccaacttcgacctggccgaggacgccaagctgcagctgtccaaggacacctacgacgacgacctggacaacctgctggcccagatcggcgaccagtacgccgacctgttcctggccgccaagaacctgtccgacgccatcctgctgtccgacatcctgcgggtgaacaccgagatcaccaaggcccccctgtccgcctccatgatcaagcggtacgacgagcaccaccaggacctgaccctgctgaaggccctggtgcggcagcagctgcccgagaagtacaaggagatcttcttcgaccagtccaagaacggctacgccggctacatcgacggcggcgcctcccaggaggagttctacaagttcatcaagcccatcctggagaagatggacggcaccgaggagctgctggtgaagctgaaccgggaggacctgctgcggaagcagcggaccttcgacaacggctccatcccccaccagatccacctgggcgagctgcacgccatcctgcggcggcaggaggacttctaccccttcctgaaggacaaccgggagaagatcgagaagatcctgaccttccggatcccctactacgtgggccccctggcccggggcaactcccggttcgcctggatgacccggaagtccgaggagaccatcaccccctggaacttcgaggaggtggtggacaagggcgcctccgcccagtccttcatcgagcggatgaccaacttcgacaagaacctgcccaacgagaaggtgctgcccaagcactccctgctgtacgagtacttcaccgtgtacaacgagctgaccaaggtgaagtacgtgaccgagggcatgcggaagcccgccttcctgtccggcgagcagaagaaggccatcgtggacctgctgttcaagaccaaccggaaggtgaccgtgaagcagctgaaggaggactacttcaagaagatcgagtgcttcgactccgtggagatctccggcgtggaggaccggttcaacgcctccctgggcacctaccacgacctgctgaagatcatcaaggacaaggacttcctggacaacgaggagaacgaggacatcctggaggacatcgtgctgaccctgaccctgttcgaggaccgggagatgatcgaggagcggctgaagacctacgcccacctgttcgacgacaaggtgatgaagcagctgaagcggcggcggtacaccggctggggccggctgtcccggaagctgatcaacggcatccgggacaagcagtccggcaagaccatcctggacttcctgaagtccgacggcttcgccaaccggaacttcatgcagctgatccacgacgactccctgaccttcaaggaggacatccagaaggcccaggtgtccggccagggcgactccctgcacgagcacatcgccaacctggccggctcccccgccatcaagaagggcatcctgcagaccgtgaaggtggtggacgagctggtgaaggtgatgggccggcacaagcccgagaacatcgtgatcgagatggcccgggagaaccagaccacccagaagggccagaagaactcccgggagcggatgaagcggatcgaggagggcatcaaggagctgggctcccagatcctgaaggagcaccccgtggagaacacccagctgcagaacgagaagctgtacctgtactacctgcagaacggccgggacatgtacgtggaccaggagctggacatcaaccggctgtccgactacgacgtggacgccatcgtgccccagtccttcctgaaggacgactccatcgacaacaaggtgctgacccggtccgacaagaaccggggcaagtccgacaacgtgccctccgaggaggtggtgaagaagatgaagaactactggcggcagctgctgaacgccaagctgatcacccagcggaagttcgacaacctgaccaaggccgagcggggcggcctgtccgagctggacaaggccggcttcatcaagcggcagctggtggagacccggcagatcaccaagcacgtggcccagatcctggactcccggatgaacaccaagtacgacgagaacgacaagctgatccgggaggtgaaggtgatcaccctgaagtccaagctggtgtccgacttccggaaggacttccagttctacaaggtgcgggagatcaacaactaccaccacgcccacgacgcctacctgaacgccgtggtgggcaccgccctgatcaagaagtaccccaagctggagtccgagttcgtgtacggcgactacaaggtgtacgacgtgcggaagatgatcgccaagtccgagcaggagatcggcaaggccaccgccaagtacttcttctactccaacatcatgaacttcttcaagaccgagatcaccctggccaacggcgagatccggaagcggcccctgatcgagaccaacggcgagaccggcgagatcgtgtgggacaagggccgggacttcgccaccgtgcggaaggtgctgtccatgccccaggtgaacatcgtgaagaagaccgaggtgcagaccggcggcttctccaaggagtccatcctgcccaagcggaactccgacaagctgatcgcccggaagaaggactgggaccccaagaagtacggcggcttcgactcccccaccgtggcctactccgtgctggtggtggccaaggtggagaagggcaagtccaagaagctgaagtccgtgaaggagctgctgggcatcaccatcatggagcggtcctccttcgagaagaaccccatcgacttcctggaggccaagggctacaaggaggtgaagaaggacctgatcatcaagctgcccaagtactccctgttcgagctggagaacggccggaagcggatgctggcctccgccggcgagctgcagaagggcaacgagctggccctgccctccaagtacgtgaacttcctgtacctggcctcccactacgagaagctgaagggctcccccgaggacaacgagcagaagcagctgttcgtggagcagcacaagcactacctggacgagatcatcgagcagatctccgagttctccaagcgggtgatcctggccgacgccaacctggacaaggtgctgtccgcctacaacaagcaccgggacaagcccatccgggagcaggccgagaacatcatccacctgttcaccctgaccaacctgggcgcccccgccgccttcaagtacttcgacaccaccatcgaccggaagcggtacacctccaccaaggaggtgctggacgccaccctgatccaccagtccatcaccggcctgtacgagacccggatcgacctgtcccagctgggcggcgactccggcggctcctccggcggctccaagcggaccgccgacggctccgagttcgagtcccccaagaagaagcggaaggtgtccggcggctcctccggcggctccatggactccaccaaggagaagtgcgactcctacaaggacgacctgctgctgcggatgggcctgaacgacaacaaggccggcatggagggcctggacaaggagaagatcaacaagatcatcatggaggccaccaagggctcccggttctacggcaacgagctgaagaaggagaagcaggtgaaccagcggatcgagaacatgatgcagcagaaggcccagatcacctcccagcagctgcggaaggcccagctgcaggtggaccggttcgccatggagctggagcagtcccggaacctgtccaacaccatcgtgcacatcgacatggacgccttctacgccgccgtggagatgcgggacaaccccgagctgaaggacaagcccatcgccgtgggctccatgtccatgctgtccacctccaactaccacgcccggcggttcggcgtgcgggccgccatgcccggcttcatcgccaagcggctgtgcccccagctgatcatcgtgccccccaacttcgacaagtaccgggccgtgtccaaggaggtgaaggagatcctggccgactacgaccccaacttcatggccatgtccctggacgaggcctacctgaacatcaccaagcacctggaggagcggcagaactggcccgaggacaagcggcggtacttcatcaagatgggctcctccgtggagaacgacaaccccggcaaggaggtgaacaagctgtccgagcacgagcggtccatctcccccctgctgttcgaggagtccccctccgacgtgcagccccccggcgaccccttccaggtgaacttcgaggagcagaacaacccccagatcctgcagaactccgtggtgttcggcacctccgcccaggaggtggtgaaggagatccggttccggatcgagcagaagaccaccctgaccgcctccgccggcatcgcccccaacaccatgctggccaaggtgtgctccgacaagaacaagcccaacggccagtaccagatcctgcccaaccggcaggccgtgatggacttcatcaaggacctgcccatccggaaggtgtccggcatcggcaaggtgaccgagaagatgctgaaggccctgggcatcatcacctgcaccgagctgtaccagcagcgggccctgctgtccctgctgttctccgagacctcctggcactacttcctgcacatctccctgggcctgggctccacccacctgacccgggacggcgagcggaagtccatgtccgtggagcggaccttctccgagatcaacaaggccgaggagcagtactccctgtgccaggagctgtgctccgagctggcccaggacctgcagaaggagcggctgaagggccggaccgtgaccatcaagctgaagaacgtgaacttcgaggtgaagacccgggcctccaccgtgtcctccgtggtgtccaccgccgaggagatcttcgccatcgccaaggagctgctgaagaccgagatcgacgccgacttcccccaccccctgcggctgcggctgatgggcgtgcggatctcctccttccccaacgaggaggaccggaagcaccagcagcggtccatcatcggcttcctgcaggccggcaaccaggccctgtccgccaccgagtgcaccctggagaagaccgacaaggacaagttcgtgaagcccctggagatgtcccacaagaagtccttcttcgacaagaagcggtccgagcggaagtggtcccaccaggacaccttcaagtgcgaggccgtgaacaagcagtccttccagacctcccagcccttccaggtgctgaagaagaagatgaacgagaacctggagatctccgagaactccgacgactgccagatcctgacctgccccgtgtgcttccgggcccagggctgcatctccctggaggccctgaacaagcacgtggacgagtgcctggacggcccctccatctccgagaacttcaagatgttctcctgctcccacgtgtccgccaccaaggtgaacaagaaggagaacgtgcccgcctcctccctgtgcgagaagcaggactacgaggcccaccccaagatcaaggagatctcctccgtggactgcatcgccctggtggacaccatcgacaactcctccaaggccgagtccatcgacgccctgtccaacaagcactccaaggaggagtgctcctccctgccctccaagtccttcaacatcgagcactgccaccagaactcctcctccaccgtgtccctggagaacgaggacgtgggctccttccggcaggagtaccggcagccctacctgtgcgaggtgaagaccggccaggccctggtgtgccccgtgtgcaacgtggagcagaagacctccgacctgaccctgttcaacgtgcacgtggacgtgtgcctgaacaagtccttcatccaggagctgcggaaggacaagttcaaccccgtgaaccagcccaaggagtcctcccggtccaccggctcctcctccggcgtgcagaaggccgtgacccggaccaagcggcccggcctgatgaccaagtactccacctccaagaagatcaagcccaacaaccccaagcacaccctggacatcttcttcaagtag

SEQ ID NO: 1024 - protein, 2290 aa, synthetic construct
  REGION 1..2290: note = Synthetic
MKRTADGSEFESPKKKRKVDKKYSIGLDIGTNSVGWAVITDEYKVPSKKFKVLGNTDRHSIKKNLIGALLFDSGETAEATRLKRTARRRYTRRKNRICYLQEIFSNEMAKVDDSFFHRLEESFLVEEDKKHERHPIFGNIVDEVAYHEKYPTIYHLRKKLVDSTDKADLRLIYLALAHMIKFRGHFLIEGDLNPDNSDVDKLFIQLVQTYNQLFEENPINASGVDAKAILSARLSKSRRLENLIAQLPGEKKNGLFGNLIALSLGLTPNFKSNFDLAEDAKLQLSKDTYDDDLDNLLAQIGDQYADLFLAAKNLSDAILLSDILRVNTEITKAPLSASMIKRYDEHHQDLTLLKALVRQQLPEKYKEIFFDQSKNGYAGYIDGGASQEEFYKFIKPILEKMDGTEELLVKLNREDLLRKQRTFDNGSIPHQIHLGELHAILRRQEDFYPFLKDNREKIEKILTFRIPYYVGPLARGNSRFAWMTRKSEETITPWNFEEVVDKGASAQSFIERMTNFDKNLPNEKVLPKHSLLYEYFTVYNELTKVKYVTEGMRKPAFLSGEQKKAIVDLLFKTNRKVTVKQLKEDYFKKIECFDSVEISGVEDRFNASLGTYHDLLKIIKDKDFLDNEENEDILEDIVLTLTLFEDREMIEERLKTYAHLFDDKVMKQLKRRRYTGWGRLSRKLINGIRDKQSGKTILDFLKSDGFANRNFMQLIHDDSLTFKEDIQKAQVSGQGDSLHEHIANLAGSPAIKKGILQTVKVVDELVKVMGRHKPENIVIEMARENQTTQKGQKNSRERMKRIEEGIKELGSQILKEHPVENTQLQNEKLYLYYLQNGRDMYVDQELDINRLSDYDVDAIVPQSFLKDDSIDNKVLTRSDKNRGKSDNVPSEEVVKKMKNYWRQLLNAKLITQRKFDNLTKAERGGLSELDKAGFIKRQLVETRQITKHVAQILDSRMNTKYDENDKLIREVKVITLKSKLVSDFRKDFQFYKVREINNYHHAHDAYLNAVVGTALIKKYPKLESEFVYGDYKVYDVRKMIAKSEQEIGKATAKYFFYSNIMNFFKTEITLANGEIRKRPLIETNGETGEIVWDKGRDFATVRKVLSMPQVNIVKKTEVQTGGFSKESILPKRNSDKLIARKKDWDPKKYGGFDSPTVAYSVLVVAKVEKGKSKKLKSVKELLGITIMERSSFEKNPIDFLEAKGYKEVKKDLIIKLPKYSLFELENGRKRMLASAGELQKGNELALPSKYVNFLYLASHYEKLKGSPEDNEQKQLFVEQHKHYLDEIIEQISEFSKRVILADANLDKVLSAYNKHRDKPIREQAENIIHLFTLTNLGAPAAFKYFDTTIDRKRYTSTKEVLDATLIHQSITGLYETRIDLSQLGGDSGGSSGGSKRTADGSEFESPKKKRKVSGGSSGGSMDSTKEKCDSYKDDLLLRMGLNDNKAGMEGLDKEKINKIIMEATKGSRFYGNELKKEKQVNQRIENMMQQKAQITSQQLRKAQLQVDRFAMELEQSRNLSNTIVHIDMDAFYAAVEMRDNPELKDKPIAVGSMSMLSTSNYHARRFGVRAAMPGFIAKRLCPQLIIVPPNFDKYRAVSKEVKEILADYDPNFMAMSLDEAYLNITKHLEERQNWPEDKRRYFIKMGSSVENDNPGKEVNKLSEHERSISPLLFEESPSDVQPPGDPFQVNFEEQNNPQILQNSVVFGTSAQEVVKEIRFRIEQKTTLTASAGIAPNTMLAKVCSDKNKPNGQYQILPNRQAVMDFIKDLPIRKVSGIGKVTEKMLKALGIITCTELYQQRALLSLLFSETSWHYFLHISLGLGSTHLTRDGERKSMSVERTFSEINKAEEQYSLCQELCSELAQDLQKERLKGRTVTIKLKNVNFEVKTRASTVSSVVSTAEEIFAIAKELLKTEIDADFPHPLRLRLMGVRISSFPNEEDRKHQQRSIIGFLQAGNQALSATECTLEKTDKDKFVKPLEMSHKKSFFDKKRSERKWSHQDTFKCEAVNKQSFQTSQPFQVLKKKMNENLEISENSDDCQILTCPVCFRAQGCISLEALNKHVDECLDGPSISENFKMFSCSHVSATKVNKKENVPASSLCEKQDYEAHPKIKEISSVDCIALVDTIDNSSKAESIDALSNKHSKEECSSLPSKSFNIEHCHQNSSSTVSLENEDVGSFRQEYRQPYLCEVKTGQALVCPVCNVEQKTSDLTLFNVHVDVCLNKSFIQELRKDKFNPVNQPKESSRSTGSSSGVQKAVTRTKRPGLMTKYSTSKKIKPNNPKHTLDIFFK

SEQ ID NO: 1025 - RNA, 7441 nt, synthetic construct
  misc_feature 1..7441: note = Synthetic
  source 1..7441: mol_type = other RNA
gggaagctcagaataaacgctcaactttggccggatctgccaccatggactccaccaaggagaagtgcgactcctacaaggacgacctgctgctgcggatgggcctgaacgacaacaaggccggcatggagggcctggacaaggagaagatcaacaagatcatcatggaggccaccaagggctcccggttctacggcaacgagctgaagaaggagaagcaggtgaaccagcggatcgagaacatgatgcagcagaaggcccagatcacctcccagcagctgcggaaggcccagctgcaggtggaccggttcgccatggagctggagcagtcccggaacctgtccaacaccatcgtgcacatcgacatggacgccttctacgccgccgtggagatgcgggacaaccccgagctgaaggacaagcccatcgccgtgggctccatgtccatgctgtccacctccaactaccacgcccggcggttcggcgtgcgggccgccatgcccggcttcatcgccaagcggctgtgcccccagctgatcatcgtgccccccaacttcgacaagtaccgggccgtgtccaaggaggtgaaggagatcctggccgactacgaccccaacttcatggccatgtccctggacgaggcctacctgaacatcaccaagcacctggaggagcggcagaactggcccgaggacaagcggcggtacttcatcaagatgggctcctccgtggagaacgacaaccccggcaaggaggtgaacaagctgtccgagcacgagcggtccatctcccccctgctgttcgaggagtccccctccgacgtgcagccccccggcgaccccttccaggtgaacttcgaggagcagaacaacccccagatcctgcagaactccgtggtgttcggcacctccgcccaggaggtggtgaaggagatccggttccggatcgagcagaagaccaccctgaccgcctccgccggcatcgcccccaacaccatgctggccaaggtgtgctccgacaagaacaagcccaacggccagtaccagatcctgcccaaccggcaggccgtgatggacttcatcaaggacctgcccatccggaaggtgtccggcatcggcaaggtgaccgagaagatgctgaaggccctgggcatcatcacctgcaccgagctgtaccagcagcgggccctgctgtccctgctgttctccgagacctcctggcactacttcctgcacatctccctgggcctgggctccacccacctgacccgggacggcgagcggaagtccatgtccgtggagcggaccttctccgagatcaacaaggccgaggagcagtactccctgtgccaggagctgtgctccgagctggcccaggacctgcagaaggagcggctgaagggccggaccgtgaccatcaagctgaagaacgtgaacttcgaggtgaagacccgggcctccaccgtgtcctccgtggtgtccaccgccgaggagatcttcgccatcgccaaggagctgctgaagaccgagatcgacgccgacttcccccaccccctgcggctgcggctgatgggcgtgcggatctcctccttccccaacgaggaggaccggaagcaccagcagcggtccatcatcggcttcctgcaggccggcaaccaggccctgtccgccaccgagtgcaccctggagaagaccgacaaggacaagttcgtgaagcccctggagatgtcccacaagaagtccttcttcgacaagaagcggtccgagcggaagtggtcccaccaggacaccttcaagtgcgaggccgtgaacaagcagtccttccagacctcccagcccttccaggtgctgaagaagaagatgaacgagaacctggagatctccgagaactccgacgactgccagatcctgacctgccccgtgtgcttccgggcccagggctgcatctccctggaggccctgaacaagcacgtggacgagtgcctggacggcccctccatctccgagaacttcaagatgttctcctgctcccacgtgtccgccaccaaggtgaacaagaaggagaacgtgcccgcctcctccctgtgcgagaagcaggactacgaggcccaccccaagatcaaggagatctcctccgtggactgcatcgccctggtggacaccatcgacaactcctccaaggccgagtccatcgacgccctgtccaacaagcactccaaggaggagtgctcctccctgccctccaagtccttcaacatcgagcactgccaccagaactcctcctccaccgtgtccctggagaacgaggacgtgggctccttccggcaggagtaccggcagccctacctgtgcgaggtgaagaccggccaggccctggtgtgccccgtgtgcaacgtggagcagaagacctccgacctgaccctgttcaacgtgcacgtggacgtgtgcctgaacaagtccttcatccaggagctgcggaaggacaagttcaaccccgtgaaccagcccaaggagtcctcccggtccaccggctcctcctccggcgtgcagaaggccgtgacccggaccaagcggcccggcctgatgaccaagtactccacctccaagaagatcaagcccaacaaccccaagcacaccctggacatcttcttcaagtccggcggctcctccggcggctccaagcggaccgccgacggctccgagttcgagtcccccaagaagaagcggaaggtgtccggcggctcctccggcggctccgacaagaagtactccatcggcctggacatcggcaccaactccgtgggctgggccgtgatcaccgacgagtacaaggtgccctccaagaagttcaaggtgctgggcaacaccgaccggcactccatcaagaagaacctgatcggcgccctgctgttcgactccggcgagaccgccgaggccacccggctgaagcggaccgcccggcggcggtacacccggcggaagaaccggatctgctacctgcaggagatcttctccaacgagatggccaaggtggacgactccttcttccaccggctggaggagtccttcctggtggaggaggacaagaagcacgagcggcaccccatcttcggcaacatcgtggacgaggtggcctaccacgagaagtaccccaccatctaccacctgcggaagaagctggtggactccaccgacaaggccgacctgcggctgatctacctggccctggcccacatgatcaagttccggggccacttcctgatcgagggcgacctgaaccccgacaactccgacgtggacaagctgttcatccagctggtgcagacctacaaccagctgttcgaggagaaccccatcaacgcctccggcgtggacgccaaggccatcctgtccgcccggctgtccaagtcccggcggctggagaacctgatcgcccagctgcccggcgagaagaagaacggcctgttcggcaacctgatcgccctgtccctgggcctgacccccaacttcaagtccaacttcgacctggccgaggacgccaagctgcagctgtccaaggacacctacgacgacgacctggacaacctgctggcccagatcggcgaccagtacgccgacctgttcctggccgccaagaacctgtccgacgccatcctgctgtccgacatcctgcgggtgaacaccgagatcaccaaggcccccctgtccgcctccatgatcaagcggtacgacgagcaccaccaggacctgaccctgctgaaggccctggtgcggcagcagctgcccgagaagtacaaggagatcttcttcgaccagtccaagaacggctacgccggctacatcgacggcggcgcctcccaggaggagttctacaagttcatcaagcccatcctggagaagatggacggcaccgaggagctgctggtgaagctgaaccgggaggacctgctgcggaagcagcggaccttcgacaacggctccatcccccaccagatccacctgggcgagctgcacgccatcctgcggcggcaggaggacttctaccccttcctgaaggacaaccgggagaagatcgagaagatcctgaccttccggatcccctactacgtgggccccctggcccggggcaactcccggttcgcctggatgacccggaagtccgaggagaccatcaccccctggaacttcgaggaggtggtggacaagggcgcctccgcccagtccttcatcgagcggatgaccaacttcgacaagaacctgcccaacgagaaggtgctgcccaagcactccctgctgtacgagtacttcaccgtgtacaacgagctgaccaaggtgaagtacgtgaccgagggcatgcggaagcccgccttcctgtccggcgagcagaagaaggccatcgtggacctgctgttcaagaccaaccggaaggtgaccgtgaagcagctgaaggaggactacttcaagaagatcgagtgcttcgactccgtggagatctccggcgtggaggaccggttcaacgcctccctgggcacctaccacgacctgctgaagatcatcaaggacaaggacttcctggacaacgaggagaacgaggacatcctggaggacatcgtgctgaccctgaccctgttcgaggaccgggagatgatcgaggagcggctgaagacctacgcccacctgttcgacgacaaggtgatgaagcagctgaagcggcggcggtacaccggctggggccggctgtcccggaagctgatcaacggcatccgggacaagcagtccggcaagaccatcctggacttcctgaagtccgacggcttcgccaaccggaacttcatgcagctgatccacgacgactccctgaccttcaaggaggacatccagaaggcccaggtgtccggccagggcgactccctgcacgagcacatcgccaacctggccggctcccccgccatcaagaagggcatcctgcagaccgtgaaggtggtggacgagctggtgaaggtgatgggccggcacaagcccgagaacatcgtgatcgagatggcccgggagaaccagaccacccagaagggccagaagaactcccgggagcggatgaagcggatcgaggagggcatcaaggagctgggctcccagatcctgaaggagcaccccgtggagaacacccagctgcagaacgagaagctgtacctgtactacctgcagaacggccgggacatgtacgtggaccaggagctggacatcaaccggctgtccgactacgacgtggacgccatcgtgccccagtccttcctgaaggacgactccatcgacaacaaggtgctgacccggtccgacaagaaccggggcaagtccgacaacgtgccctccgaggaggtggtgaagaagatgaagaactactggcggcagctgctgaacgccaagctgatcacccagcggaagttcgacaacctgaccaaggccgagcggggcggcctgtccgagctggacaaggccggcttcatcaagcggcagctggtggagacccggcagatcaccaagcacgtggcccagatcctggactcccggatgaacaccaagtacgacgagaacgacaagctgatccgggaggtgaaggtgatcaccctgaagtccaagctggtgtccgacttccggaaggacttccagttctacaaggtgcgggagatcaacaactaccaccacgcccacgacgcctacctgaacgccgtggtgggcaccgccctgatcaagaagtaccccaagctggagtccgagttcgtgtacggcgactacaaggtgtacgacgtgcggaagatgatcgccaagtccgagcaggagatcggcaaggccaccgccaagtacttcttctactccaacatcatgaacttcttcaagaccgagatcaccctggccaacggcgagatccggaagcggcccctgatcgagaccaacggcgagaccggcgagatcgtgtgggacaagggccgggacttcgccaccgtgcggaaggtgctgtccatgccccaggtgaacatcgtgaagaagaccgaggtgcagaccggcggcttctccaaggagtccatcctgcccaagcggaactccgacaagctgatcgcccggaagaaggactgggaccccaagaagtacggcggcttcgactcccccaccgtggcctactccgtgctggtggtggccaaggtggagaagggcaagtccaagaagctgaagtccgtgaaggagctgctgggcatcaccatcatggagcggtcctccttcgagaagaaccccatcgacttcctggaggccaagggctacaaggaggtgaagaaggacctgatcatcaagctgcccaagtactccctgttcgagctggagaacggccggaagcggatgctggcctccgccggcgagctgcagaagggcaacgagctggccctgccctccaagtacgtgaacttcctgtacctggcctcccactacgagaagctgaagggctcccccgaggacaacgagcagaagcagctgttcgtggagcagcacaagcactacctggacgagatcatcgagcagatctccgagttctccaagcgggtgatcctggccgacgccaacctggacaaggtgctgtccgcctacaacaagcaccgggacaagcccatccgggagcaggccgagaacatcatccacctgttcaccctgaccaacctgggcgcccccgccgccttcaagtacttcgacaccaccatcgaccggaagcggtacacctccaccaaggaggtgctggacgccaccctgatccaccagtccatcaccggcctgtacgagacccggatcgacctgtcccagctgggcggcgactccggcggctccaagcggaccgccgacggctccgagttcgagtcccccaagaagaagcggaaggtgtagctagcaccagcctcaagaacacccgaatggagtctctaagctacataataccaacttacactttacaaaatgttgtcccccaaaatgtagccattcgtatctgctcctaataaaaagaaagtttcttcacattctctcgagaaaaaaaaaaaatggaaaaaaaaaaaacggaaaaaaaaaaaaggtaaaaaaaaaaaatataaaaaaaaaaaacataaaaaaaaaaaacgaaaaaaaaaaaacgtaaaaaaaaaaaactcaaaaaaaaaaaagataaaaaaaaaaaacctaaaaaaaaaaaatgtaaaaaaaaaaaagggaaaaaaaaaaaacgcaaaaaaaaaaaacacaaaaaaaaaaaatgcaaaaaaaaaaaatcgaaaaaaaaaaaatctaaaaaaaaaaaacgaaaaaaaaaaaacccaaaaaaaaaaaagacaaaaaaaaaaaatagaaaaaaaaaaagttaaaaaaaaaaaactgaaaaaaaaaaaatttaaaaaaaaaaaatctag

SEQ ID NO: 1026 - RNA, 6882 nt, synthetic construct
  misc_feature 1..6882: note = Synthetic
  source 1..6882: mol_type = other RNA
atggactccaccaaggagaagtgcgactcctacaaggacgacctgctgctgcggatgggcctgaacgacaacaaggccggcatggagggcctggacaaggagaagatcaacaagatcatcatggaggccaccaagggctcccggttctacggcaacgagctgaagaaggagaagcaggtgaaccagcggatcgagaacatgatgcagcagaaggcccagatcacctcccagcagctgcggaaggcccagctgcaggtggaccggttcgccatggagctggagcagtcccggaacctgtccaacaccatcgtgcacatcgacatggacgccttctacgccgccgtggagatgcgggacaaccccgagctgaaggacaagcccatcgccgtgggctccatgtccatgctgtccacctccaactaccacgcccggcggttcggcgtgcgggccgccatgcccggcttcatcgccaagcggctgtgcccccagctgatcatcgtgccccccaacttcgacaagtaccgggccgtgtccaaggaggtgaaggagatcctggccgactacgaccccaacttcatggccatgtccctggacgaggcctacctgaacatcaccaagcacctggaggagcggcagaactggcccgaggacaagcggcggtacttcatcaagatgggctcctccgtggagaacgacaaccccggcaaggaggtgaacaagctgtccgagcacgagcggtccatctcccccctgctgttcgaggagtccccctccgacgtgcagccccccggcgaccccttccaggtgaacttcgaggagcagaacaacccccagatcctgcagaactccgtggtgttcggcacctccgcccaggaggtggtgaaggagatccggttccggatcgagcagaagaccaccctgaccgcctccgccggcatcgcccccaacaccatgctggccaaggtgtgctccgacaagaacaagcccaacggccagtaccagatcctgcccaaccggcaggccgtgatggacttcatcaaggacctgcccatccggaaggtgtccggcatcggcaaggtgaccgagaagatgctgaaggccctgggcatcatcacctgcaccgagctgtaccagcagcgggccctgctgtccctgctgttctccgagacctcctggcactacttcctgcacatctccctgggcctgggctccacccacctgacccgggacggcgagcggaagtccatgtccgtggagcggaccttctccgagatcaacaaggccgaggagcagtactccctgtgccaggagctgtgctccgagctggcccaggacctgcagaaggagcggctgaagggccggaccgtgaccatcaagctgaagaacgtgaacttcgaggtgaagacccgggcctccaccgtgtcctccgtggtgtccaccgccgaggagatcttcgccatcgccaaggagctgctgaagaccgagatcgacgccgacttcccccaccccctgcggctgcggctgatgggcgtgcggatctcctccttccccaacgaggaggaccggaagcaccagcagcggtccatcatcggcttcctgcaggccggcaaccaggccctgtccgccaccgagtgcaccctggagaagaccgacaaggacaagttcgtgaagcccctggagatgtcccacaagaagtccttcttcgacaagaagcggtccgagcggaagtggtcccaccaggacaccttcaagtgcgaggccgtgaacaagcagtccttccagacctcccagcccttccaggtgctgaagaagaagatgaacgagaacctggagatctccgagaactccgacgactgccagatcctgacctgccccgtgtgcttccgggcccagggctgcatctccctggaggccctgaacaagcacgtggacgagtgcctggacggcccctccatctccgagaacttcaagatgttctcctgctcccacgtgtccgccaccaaggtgaacaagaaggagaacgtgcccgcctcctccctgtgcgagaagcaggactacgaggcccaccccaagatcaaggagatctcctccgtggactgcatcgccctggtggacaccatcgacaactcctccaaggccgagtccatcgacgccctgtccaacaagcactccaaggaggagtgctcctccctgccctccaagtccttcaacatcgagcactgccaccagaactcctcctccaccgtgtccctggagaacgaggacgtgggctccttccggcaggagtaccggcagccctacctgtgcgaggtgaagaccggccaggccctggtgtgccccgtgtgcaacgtggagcagaagacctccgacctgaccctgttcaacgtgcacgtggacgtgtgcctgaacaagtccttcatccaggagctgcggaaggacaagttcaaccccgtgaaccagcccaaggagtcctcccggtccaccggctcctcctccggcgtgcagaaggccgtgacccggaccaagcggcccggcctgatgaccaagtactccacctccaagaagatcaagcccaacaaccccaagcacaccctggacatcttcttcaagtccggcggctcctccggcggctccaagcggaccgccgacggctccgagttcgagtcccccaagaagaagcggaaggtgtccggcggctcctccggcggctccgacaagaagtactccatcggcctggacatcggcaccaactccgtgggctgggccgtgatcaccgacgagtacaaggtgccctccaagaagttcaaggtgctgggcaacaccgaccggcactccatcaagaagaacctgatcggcgccctgctgttcgactccggcgagaccgccgaggccacccggctgaagcggaccgcccggcggcggtacacccggcggaagaaccggatctgctacctgcaggagatcttctccaacgagatggccaaggtggacgactccttcttccaccggctggaggagtccttcctggtggaggaggacaagaagcacgagcggcaccccatcttcggcaacatcgtggacgaggtggcctaccacgagaagtaccccaccatctaccacctgcggaagaagctggtggactccaccgacaaggccgacctgcggctgatctacctggccctggcccacatgatcaagttccggggccacttcctgatcgagggcgacctgaaccccgacaactccgacgtggacaagctgttcatccagctggtgcagacctacaaccagctgttcgaggagaaccccatcaacgcctccggcgtggacgccaaggccatcctgtccgcccggctgtccaagtcccggcggctggagaacctgatcgcccagctgcccggcgagaagaagaacggcctgttcggcaacctgatcgccctgtccctgggcctgacccccaacttcaagtccaacttcgacctggccgaggacgccaagctgcagctgtccaaggacacctacgacgacgacctggacaacctgctggcccagatcggcgaccagtacgccgacctgttcctggccgccaagaacctgtccgacgccatcctgctgtccgacatcctgcgggtgaacaccgagatcaccaaggcccccctgtccgcctccatgatcaagcggtacgacgagcaccaccaggacctgaccctgctgaaggccctggtgcggcagcagctgcccgagaagtacaaggagatcttcttcgaccagtccaagaacggctacgccggctacatcgacggcggcgcctcccaggaggagttctacaagttcatcaagcccatcctggagaagatggacggcaccgaggagctgctggtgaagctgaaccgggaggacctgctgcggaagcagcggaccttcgacaacggctccatcccccaccagatccacctgggcgagctgcacgccatcctgcggcggcaggaggacttctaccccttcctgaaggacaaccgggagaagatcgagaagatcctgaccttccggatcccctactacgtgggccccctggcccggggcaactcccggttcgcctggatgacccggaagtccgaggagaccatcaccccctggaacttcgaggaggtggtggacaagggcgcctccgcccagtccttcatcgagcggatgaccaacttcgacaagaacctgcccaacgagaaggtgctgcccaagcactccctgctgtacgagtacttcaccgtgtacaacgagctgaccaaggtgaagtacgtgaccgagggcatgcggaagcccgccttcctgtccggcgagcagaagaaggccatcgtggacctgctgttcaagaccaaccggaaggtgaccgtgaagcagctgaaggaggactacttcaagaagatcgagtgcttcgactccgtggagatctccggcgtggaggaccggttcaacgcctccctgggcacctaccacgacctgctgaagatcatcaaggacaaggacttcctggacaacgaggagaacgaggacatcctggaggacatcgtgctgaccctgaccctgttcgaggaccgggagatgatcgaggagcggctgaagacctacgcccacctgttcgacgacaaggtgatgaagcagctgaagcggcggcggtacaccggctggggccggctgtcccggaagctgatcaacggcatccgggacaagcagtccggcaagaccatcctggacttcctgaagtccgacggcttcgccaaccggaacttcatgcagctgatccacgacgactccctgaccttcaaggaggacatccagaaggcccaggtgtccggccagggcgactccctgcacgagcacatcgccaacctggccggctcccccgccatcaagaagggcatcctgcagaccgtgaaggtggtggacgagctggtgaaggtgatgggccggcacaagcccgagaacatcgtgatcgagatggcccgggagaaccagaccacccagaagggccagaagaactcccgggagcggatgaagcggatcgaggagggcatcaaggagctgggctcccagatcctgaaggagcaccccgtggagaacacccagctgcagaacgagaagctgtacctgtactacctgcagaacggccgggacatgtacgtggaccaggagctggacatcaaccggctgtccgactacgacgtggacgccatcgtgccccagtccttcctgaaggacgactccatcgacaacaaggtgctgacccggtccgacaagaaccggggcaagtccgacaacgtgccctccgaggaggtggtgaagaagatgaagaactactggcggcagctgctgaacgccaagctgatcacccagcggaagttcgacaacctgaccaaggccgagcggggcggcctgtccgagctggacaaggccggcttcatcaagcggcagctggtggagacccggcagatcaccaagcacgtggcccagatcctggactcccggatgaacaccaagtacgacgagaacgacaagctgatccgggaggtgaaggtgatcaccctgaagtccaagctggtgtccgacttccggaaggacttccagttctacaaggtgcgggagatcaacaactaccaccacgcccacgacgcctacctgaacgccgtggtgggcaccgccctgatcaagaagtaccccaagctggagtccgagttcgtgtacggcgactacaaggtgtacgacgtgcggaagatgatcgccaagtccgagcaggagatcggcaaggccaccgccaagtacttcttctactccaacatcatgaacttcttcaagaccgagatcaccctggccaacggcgagatccggaagcggcccctgatcgagaccaacggcgagaccggcgagatcgtgtgggacaagggccgggacttcgccaccgtgcggaaggtgctgtccatgccccaggtgaacatcgtgaagaagaccgaggtgcagaccggcggcttctccaaggagtccatcctgcccaagcggaactccgacaagctgatcgcccggaagaaggactgggaccccaagaagtacggcggcttcgactcccccaccgtggcctactccgtgctggtggtggccaaggtggagaagggcaagtccaagaagctgaagtccgtgaaggagctgctgggcatcaccatcatggagcggtcctccttcgagaagaaccccatcgacttcctggaggccaagggctacaaggaggtgaagaaggacctgatcatcaagctgcccaagtactccctgttcgagctggagaacggccggaagcggatgctggcctccgccggcgagctgcagaagggcaacgagctggccctgccctccaagtacgtgaacttcctgtacctggcctcccactacgagaagctgaagggctcccccgaggacaacgagcagaagcagctgttcgtggagcagcacaagcactacctggacgagatcatcgagcagatctccgagttctccaagcgggtgatcctggccgacgccaacctggacaaggtgctgtccgcctacaacaagcaccgggacaagcccatccgggagcaggccgagaacatcatccacctgttcaccctgaccaacctgggcgcccccgccgccttcaagtacttcgacaccaccatcgaccggaagcggtacacctccaccaaggaggtgctggacgccaccctgatccaccagtccatcaccggcctgtacgagacccggatcgacctgtcccagctgggcggcgactccggcggctccaagcggaccgccgacggctccgagttcgagtcccccaagaagaagcggaaggtgtag

SEQ ID NO: 1027 - protein, 2293 aa, synthetic construct
  REGION 1..2293: note = Synthetic
MDSTKEKCDSYKDDLLLRMGLNDNKAGMEGLDKEKINKIIMEATKGSRFYGNELKKEKQVNQRIENMMQQKAQITSQQLRKAQLQVDRFAMELEQSRNLSNTIVHIDMDAFYAAVEMRDNPELKDKPIAVGSMSMLSTSNYHARRFGVRAAMPGFIAKRLCPQLIIVPPNFDKYRAVSKEVKEILADYDPNFMAMSLDEAYLNITKHLEERQNWPEDKRRYFIKMGSSVENDNPGKEVNKLSEHERSISPLLFEESPSDVQPPGDPFQVNFEEQNNPQILQNSVVFGTSAQEVVKEIRFRIEQKTTLTASAGIAPNTMLAKVCSDKNKPNGQYQILPNRQAVMDFIKDLPIRKVSGIGKVTEKMLKALGIITCTELYQQRALLSLLFSETSWHYFLHISLGLGSTHLTRDGERKSMSVERTFSEINKAEEQYSLCQELCSELAQDLQKERLKGRTVTIKLKNVNFEVKTRASTVSSVVSTAEEIFAIAKELLKTEIDADFPHPLRLRLMGVRISSFPNEEDRKHQQRSIIGFLQAGNQALSATECTLEKTDKDKFVKPLEMSHKKSFFDKKRSERKWSHQDTFKCEAVNKQSFQTSQPFQVLKKKMNENLEISENSDDCQILTCPVCFRAQGCISLEALNKHVDECLDGPSISENFKMFSCSHVSATKVNKKENVPASSLCEKQDYEAHPKIKEISSVDCIALVDTIDNSSKAESIDALSNKHSKEECSSLPSKSFNIEHCHQNSSSTVSLENEDVGSFRQEYRQPYLCEVKTGQALVCPVCNVEQKTSDLTLFNVHVDVCLNKSFIQELRKDKFNPVNQPKESSRSTGSSSGVQKAVTRTKRPGLMTKYSTSKKIKPNNPKHTLDIFFKSGGSSGGSKRTADGSEFESPKKKRKVSGGSSGGSDKKYSIGLDIGTNSVGWAVITDEYKVPSKKFKVLGNTDRHSIKKNLIGALLFDSGETAEATRLKRTARRRYTRRKNRICYLQEIFSNEMAKVDDSFFHRLEESFLVEEDKKHERHPIFGNIVDEVAYHEKYPTIYHLRKKLVDSTDKADLRLIYLALAHMIKFRGHFLIEGDLNPDNSDVDKLFIQLVQTYNQLFEENPINASGVDAKAILSARLSKSRRLENLIAQLPGEKKNGLFGNLIALSLGLTPNFKSNFDLAEDAKLQLSKDTYDDDLDNLLAQIGDQYADLFLAAKNLSDAILLSDILRVNTEITKAPLSASMIKRYDEHHQDLTLLKALVRQQLPEKYKEIFFDQSKNGYAGYIDGGASQEEFYKFIKPILEKMDGTEELLVKLNREDLLRKQRTFDNGSIPHQIHLGELHAILRRQEDFYPFLKDNREKIEKILTFRIPYYVGPLARGNSRFAWMTRKSEETITPWNFEEVVDKGASAQSFIERMTNFDKNLPNEKVLPKHSLLYEYFTVYNELTKVKYVTEGMRKPAFLSGEQKKAIVDLLFKTNRKVTVKQLKEDYFKKIECFDSVEISGVEDRFNASLGTYHDLLKIIKDKDFLDNEENEDILEDIVLTLTLFEDREMIEERLKTYAHLFDDKVMKQLKRRRYTGWGRLSRKLINGIRDKQSGKTILDFLKSDGFANRNFMQLIHDDSLTFKEDIQKAQVSGQGDSLHEHIANLAGSPAIKKGILQTVKVVDELVKVMGRHKPENIVIEMARENQTTQKGQKNSRERMKRIEEGIKELGSQILKEHPVENTQLQNEKLYLYYLQNGRDMYVDQELDINRLSDYDVDAIVPQSFLKDDSIDNKVLTRSDKNRGKSDNVPSEEVVKKMKNYWRQLLNAKLITQRKFDNLTKAERGGLSELDKAGFIKRQLVETRQITKHVAQILDSRMNTKYDENDKLIREVKVITLKSKLVSDFRKDFQFYKVREINNYHHAHDAYLNAVVGTALIKKYPKLESEFVYGDYKVYDVRKMIAKSEQEIGKATAKYFFYSNIMNFFKTEITLANGEIRKRPLIETNGETGEIVWDKGRDFATVRKVLSMPQVNIVKKTEVQTGGFSKESILPKRNSDKLIARKKDWDPKKYGGFDSPTVAYSVLVVAKVEKGKSKKLKSVKELLGITIMERSSFEKNPIDFLEAKGYKEVKKDLIIKLPKYSLFELENGRKRMLASAGELQKGNELALPSKYVNFLYLASHYEKLKGSPEDNEQKQLFVEQHKHYLDEIIEQISEFSKRVILADANLDKVLSAYNKHRDKPIREQAENIIHLFTLTNLGAPAAFKYFDTTIDRKRYTSTKEVLDATLIHQSITGLYETRIDLSQLGGDSGGSKRTADGSEFESPKKKRKV

SEQ ID NO: 1028 - RNA, 7432 nt, synthetic construct
  misc_feature 1..7432: note = Synthetic
  source 1..7432: mol_type = other RNA
gggaagctcagaataaacgctcaactttggccggatctgccaccatgaagcggaccgccgacggctccgagttcgagtcccccaagaagaagcggaaggtggacaagaagtactccatcggcctggacatcggcaccaactccgtgggctgggccgtgatcaccgacgagtacaaggtgccctccaagaagttcaaggtgctgggcaacaccgaccggcactccatcaagaagaacctgatcggcgccctgctgttcgactccggcgagaccgccgaggccacccggctgaagcggaccgcccggcggcggtacacccggcggaagaaccggatctgctacctgcaggagatcttctccaacgagatggccaaggtggacgactccttcttccaccggctggaggagtccttcctggtggaggaggacaagaagcacgagcggcaccccatcttcggcaacatcgtggacgaggtggcctaccacgagaagtaccccaccatctaccacctgcggaagaagctggtggactccaccgacaaggccgacctgcggctgatctacctggccctggcccacatgatcaagttccggggccacttcctgatcgagggcgacctgaaccccgacaactccgacgtggacaagctgttcatccagctggtgcagacctacaaccagctgttcgaggagaaccccatcaacgcctccggcgtggacgccaaggccatcctgtccgcccggctgtccaagtcccggcggctggagaacctgatcgcccagctgcccggcgagaagaagaacggcctgttcggcaacctgatcgccctgtccctgggcctgacccccaacttcaagtccaacttcgacctggccgaggacgccaagctgcagctgtccaaggacacctacgacgacgacctggacaacctgctggcccagatcggcgaccagtacgccgacctgttcctggccgccaagaacctgtccgacgccatcctgctgtccgacatcctgcgggtgaacaccgagatcaccaaggcccccctgtccgcctccatgatcaagcggtacgacgagcaccaccaggacctgaccctgctgaaggccctggtgcggcagcagctgcccgagaagtacaaggagatcttcttcgaccagtccaagaacggctacgccggctacatcgacggcggcgcctcccaggaggagttctacaagttcatcaagcccatcctggagaagatggacggcaccgaggagctgctggtgaagctgaaccgggaggacctgctgcggaagcagcggaccttcgacaacggctccatcccccaccagatccacctgggcgagctgcacgccatcctgcggcggcaggaggacttctaccccttcctgaaggacaaccgggagaagatcgagaagatcctgaccttccggatcccctactacgtgggccccctggcccggggcaactcccggttcgcctggatgacccggaagtccgaggagaccatcaccccctggaacttcgaggaggtggtggacaagggcgcctccgcccagtccttcatcgagcggatgaccaacttcgacaagaacctgcccaacgagaaggtgctgcccaagcactccctgctgtacgagtacttcaccgtgtacaacgagctgaccaaggtgaagtacgtgaccgagggcatgcggaagcccgccttcctgtccggcgagcagaagaaggccatcgtggacctgctgttcaagaccaaccggaaggtgaccgtgaagcagctgaaggaggactacttcaagaagatcgagtgcttcgactccgtggagatctccggcgtggaggaccggttcaacgcctccctgggcacctaccacgacctgctgaagatcatcaaggacaaggacttcctggacaacgaggagaacgaggacatcctggaggacatcgtgctgaccctgaccctgttcgaggaccgggagatgatcgaggagcggctgaagacctacgcccacctgttcgacgacaaggtgatgaagcagctgaagcggcggcggtacaccggctggggccggctgtcccggaagctgatcaacggcatccgggacaagcagtccggcaagaccatcctggacttcctgaagtccgacggcttcgccaaccggaacttcatgcagctgatccacgacgactccctgaccttcaaggaggacatccagaaggcccaggtgtccggccagggcgactccctgcacgagcacatcgccaacctggccggctcccccgccatcaagaagggcatcctgcagaccgtgaaggtggtggacgagctggtgaaggtgatgggccggcacaagcccgagaacatcgtgatcgagatggcccgggagaaccagaccacccagaagggccagaagaactcccgggagcggatgaagcggatcgaggagggcatcaaggagctgggctcccagatcctgaaggagcaccccgtggagaacacccagctgcagaacgagaagctgtacctgtactacctgcagaacggccgggacatgtacgtggaccaggagctggacatcaaccggctgtccgactacgacgtggacgccatcgtgccccagtccttcctgaaggacgactccatcgacaacaaggtgctgacccggtccgacaagaaccggggcaagtccgacaacgtgccctccgaggaggtggtgaagaagatgaagaactactggcggcagctgctgaacgccaagctgatcacccagcggaagttcgacaacctgaccaaggccgagcggggcggcctgtccgagctggacaaggccggcttcatcaagcggcagctggtggagacccggcagatcaccaagcacgtggcccagatcctggactcccggatgaacaccaagtacgacgagaacgacaagctgatccgggaggtgaaggtgatcaccctgaagtccaagctggtgtccgacttccggaaggacttccagttctacaaggtgcgggagatcaacaactaccaccacgcccacgacgcctacctgaacgccgtggtgggcaccgccctgatcaagaagtaccccaagctggagtccgagttcgtgtacggcgactacaaggtgtacgacgtgcggaagatgatcgccaagtccgagcaggagatcggcaaggccaccgccaagtacttcttctactccaacatcatgaacttcttcaagaccgagatcaccctggccaacggcgagatccggaagcggcccctgatcgagaccaacggcgagaccggcgagatcgtgtgggacaagggccgggacttcgccaccgtgcggaaggtgctgtccatgccccaggtgaacatcgtgaagaagaccgaggtgcagaccggcggcttctccaaggagtccatcctgcccaagcggaactccgacaagctgatcgcccggaagaaggactgggaccccaagaagtacggcggcttcgactcccccaccgtggcctactccgtgctggtggtggccaaggtggagaagggcaagtccaagaagctgaagtccgtgaaggagctgctgggcatcaccatcatggagcggtcctccttcgagaagaaccccatcgacttcctggaggccaagggctacaaggaggtgaagaaggacctgatcatcaagctgcccaagtactccctgttcgagctggagaacggccggaagcggatgctggcctccgccggcgagctgcagaagggcaacgagctggccctgccctccaagtacgtgaacttcctgtacctggcctcccactacgagaagctgaagggctcccccgaggacaacgagcagaagcagctgttcgtggagcagcacaagcactacctggacgagatcatcgagcagatctccgagttctccaagcgggtgatcctggccgacgccaacctggacaaggtgctgtccgcctacaacaagcaccgggacaagcccatccgggagcaggccgagaacatcatccacctgttcaccctgaccaacctgggcgcccccgccgccttcaagtacttcgacaccaccatcgaccggaagcggtacacctccaccaaggaggtgctggacgccaccctgatccaccagtccatcaccggcctgtacgagacccggatcgacctgtcccagctgggcggcgactccggcggctcctccggcggctccaagcggaccgccgacggctccgagttcgagtcccccaagaagaagcggaaggtgtccggcggctcctccggcggctccatggactccaccaaggagaagtgcgactcctacaaggacgacctgctgctgcggatgggcctgaacgacaacaaggccggcatggagggcctggacaaggagaagatcaacaagatcatcatggaggccaccaagggctcccggttctacggcaacgagctgaagaaggagaagcaggtgaaccagcggatcgagaacatgatgcagcagaaggcccagatcacctcccagcagctgcggaaggcccagctgcaggtggaccggttcgccatggagctggagcagtcccggaacctgtccaacaccatcgtgcacatcgacatggacgccttctacgccgccgtggagatgcgggacaaccccgagctgaaggacaagcccatcgccgtgggctccatgtccatgctgtccacctccaactaccacgcccggcggttcggcgtgcgggccgccatgcccggcttcatcgccaagcggctgtgcccccagctgatcatcgtgccccccaacttcgacaagtaccgggccgtgtccaaggaggtgaaggagatcctggccgactacgaccccaacttcatggccatgtccctggacgaggcctacctgaacatcaccaagcacctggaggagcggcagaactggcccgaggacaagcggcggtacttcatcaagatgggctcctccgtggagaacgacaaccccggcaaggaggtgaacaagctgtccgagcacgagcggtccatctcccccctgctgttcgaggagtccccctccgacgtgcagccccccggcgaccccttccaggtgaacttcgaggagcagaacaacccccagatcctgcagaactccgtggtgttcggcacctccgcccaggaggtggtgaaggagatccggttccggatcgagcagaagaccaccctgaccgcctccgccggcatcgcccccaacaccatgctggccaaggtgtgctccgacaagaacaagcccaacggccagtaccagatcctgcccaaccggcaggccgtgatggacttcatcaaggacctgcccatccggaaggtgtccggcatcggcaaggtgaccgagaagatgctgaaggccctgggcatcatcacctgcaccgagctgtaccagcagcgggccctgctgtccctgctgttctccgagacctcctggcactacttcctgcacatctccctgggcctgggctccacccacctgacccgggaccgggtgcggaagtccatgtccgtggagcggaccttctccgagatcaacaaggccgaggagcagtactccctgtgccaggagctgtgctccgagctggcccaggacctgcagaaggagcggctgaagggccggaccgtgaccatcaagctgaagaacgtgaacttcgaggtgaagacccgggcctccaccgtgtcctccgtggtgtccaccgccgaggagatcttcgccatcgccaaggagctgctgaagaccgagatcgacgccgacttcccccaccccctgcggctgcggctgatgggcgtgcggatctcctccttccccaacgaggaggaccggaagcaccagcagcggtccatcatcggcttcctgcaggccggcaaccaggccctgtccgccaccgagtgcaccctggagaagaccgacaaggacaagttcgtgaagcccctggagatgtcccacaagaagtccttcttcgacaagaagcggtccgagcggaagtggtcccaccaggacaccttcaagtgcgaggccgtgaacaagcagtccttccagacctcccagcccttccaggtgctgaagaagaagatgaacgagaacctggagatctccgagaactccgacgactgccagatcctgacctgccccgtgtgcttccgggcccagggctgcatctccctggaggccctgaacaagcacgtggacgagtgcctggacggcccctccatctccgagaacttcaagatgttctcctgctcccacgtgtccgccaccaaggtgaacaagaaggagaacgtgcccgcctcctccctgtgcgagaagcaggactacgaggcccaccccaagatcaaggagatctcctccgtggactgcatcgccctggtggacaccatcgacaactcctccaaggccgagtccatcgacgccctgtccaacaagcactccaaggaggagtgctcctccctgccctccaagtccttcaacatcgagcactgccaccagaactcctcctccaccgtgtccctggagaacgaggacgtgggctccttccggcaggagtaccggcagccctacctgtgcgaggtgaagaccggccaggccctggtgtgccccgtgtgcaacgtggagcagaagacctccgacctgaccctgttcaacgtgcacgtggacgtgtgcctgaacaagtccttcatccaggagctgcggaaggacaagttcaaccccgtgaaccagcccaaggagtcctcccggtccaccggctcctcctccggcgtgcagaaggccgtgacccggaccaagcggcccggcctgatgaccaagtactccacctccaagaagatcaagcccaacaaccccaagcacaccctggacatcttcttcaagtagctagcaccagcctcaagaacacccgaatggagtctctaagctacataataccaacttacactttacaaaatgttgtcccccaaaatgtagccattcgtatctgctcctaataaaaagaaagtttcttcacattctctcgagaaaaaaaaaaaatggaaaaaaaaaaaacggaaaaaaaaaaaaggtaaaaaaaaaaaatataaaaaaaaaaaacataaaaaaaaaaaacgaaaaaaaaaaaacgtaaaaaaaaaaaactcaaaaaaaaaaaagataaaaaaaaaaaacctaaaaaaaaaaaatgtaaaaaaaaaaaagggaaaaaaaaaaaacgcaaaaaaaaaaaacacaaaaaaaaaaaatgcaaaaaaaaaaaatcgaaaaaaaaaaaatctaaaaaaaaaaaacgaaaaaaaaaaaacccaaaaaaaaaaaagacaaaaaaaaaaaatagaaaaaaaaaaagttaaaaaaaaaaaactgaaaaaaaaaaaatttaaaaaaaaaaaatctag

SEQ ID NO: 1029 - RNA, 6873 nt, synthetic construct
  misc_feature 1..6873: note = Synthetic
  source 1..6873: mol_type = other RNA
atgaagcggaccgccgacggctccgagttcgagtcccccaagaagaagcggaaggtggacaagaagtactccatcggcctggacatcggcaccaactccgtgggctgggccgtgatcaccgacgagtacaaggtgccctccaagaagttcaaggtgctgggcaacaccgaccggcactccatcaagaagaacctgatcggcgccctgctgttcgactccggcgagaccgccgaggccacccggctgaagcggaccgcccggcggcggtacacccggcggaagaaccggatctgctacctgcaggagatcttctccaacgagatggccaaggtggacgactccttcttccaccggctggaggagtccttcctggtggaggaggacaagaagcacgagcggcaccccatcttcggcaacatcgtggacgaggtggcctaccacgagaagtaccccaccatctaccacctgcggaagaagctggtggactccaccgacaaggccgacctgcggctgatctacctggccctggcccacatgatcaagttccggggccacttcctgatcgagggcgacctgaaccccgacaactccgacgtggacaagctgttcatccagctggtgcagacctacaaccagctgttcgaggagaaccccatcaacgcctccggcgtggacgccaaggccatcctgtccgcccggctgtccaagtcccggcggctggagaacctgatcgcccagctgcccggcgagaagaagaacggcctgttcggcaacctgatcgccctgtccctgggcctgacccccaacttcaagtccaacttcgacctggccgaggacgccaagctgcagctgtccaaggacacctacgacgacgacctggacaacctgctggcccagatcggcgaccagtacgccgacctgttcctggccgccaagaacctgtccgacgccatcctgctgtccgacatcctgcgggtgaacaccgagatcaccaaggcccccctgtccgcctccatgatcaagcggtacgacgagcaccaccaggacctgaccctgctgaaggccctggtgcggcagcagctgcccgagaagtacaaggagatcttcttcgaccagtccaagaacggctacgccggctacatcgacggcggcgcctcccaggaggagttctacaagttcatcaagcccatcctggagaagatggacggcaccgaggagctgctggtgaagctgaaccgggaggacctgctgcggaagcagcggaccttcgacaacggctccatcccccaccagatccacctgggcgagctgcacgccatcctgcggcggcaggaggacttctaccccttcctgaaggacaaccgggagaagatcgagaagatcctgaccttccggatcccctactacgtgggccccctggcccggggcaactcccggttcgcctggatgacccggaagtccgaggagaccatcaccccctggaacttcgaggaggtggtggacaagggcgcctccgcccagtccttcatcgagcggatgaccaacttcgacaagaacctgcccaacgagaaggtgctgcccaagcactccctgctgtacgagtacttcaccgtgtacaacgagctgaccaaggtgaagtacgtgaccgagggcatgcggaagcccgccttcctgtccggcgagcagaagaaggccatcgtggacctgctgttcaagaccaaccggaaggtgaccgtgaagcagctgaaggaggactacttcaagaagatcgagtgcttcgactccgtggagatctccggcgtggaggaccggttcaacgcctccctgggcacctaccacgacctgctgaagatcatcaaggacaaggacttcctggacaacgaggagaacgaggacatcctggaggacatcgtgctgaccctgaccctgttcgaggaccgggagatgatcgaggagcggctgaagacctacgcccacctgttcgacgacaaggtgatgaagcagctgaagcggcggcggtacaccggctggggccggctgtcccggaagctgatcaacggcatccgggacaagcagtccggcaagaccatcctggacttcctgaagtccgacggcttcgccaaccggaacttcatgcagctgatccacgacgactccctgaccttcaaggaggacatccagaaggcccaggtgtccggccagggcgactccctgcacgagcacatcgccaacctggccggctcccccgccatcaagaagggcatcctgcagaccgtgaaggtggtggacgagctggtgaaggtgatgggccggcacaagcccgagaacatcgtgatcgagatggcccgggagaaccagaccacccagaagggccagaagaactcccgggagcggatgaagcggatcgaggagggcatcaaggagctgggctcccagatcctgaaggagcaccccgtggagaacacccagctgcagaacgagaagctgtacctgtactacctgcagaacggccgggacatgtacgtggaccaggagctggacatcaaccggctgtccgactacgacgtggacgccatcgtgccccagtccttcctgaaggacgactccatcgacaacaaggtgctgacccggtccgacaagaaccggggcaagtccgacaacgtgccctccgaggaggtggtgaagaagatgaagaactactggcggcagctgctgaacgccaagctgatcacccagcggaagttcgacaacctgaccaaggccgagcggggcggcctgtccgagctggacaaggccggcttcatcaagcggcagctggtggagacccggcagatcaccaagcacgtggcccagatcctggactcccggatgaacaccaagtacgacgagaacgacaagctgatccgggaggtgaaggtgatcaccctgaagtccaagctggtgtccgacttccggaaggacttccagttctacaaggtgcgggagatcaacaactaccaccacgcccacgacgcctacctgaacgccgtggtgggcaccgccctgatcaagaagtaccccaagctggagtccgagttcgtgtacggcgactacaaggtgtacgacgtgcggaagatgatcgccaagtccgagcaggagatcggcaaggccaccgccaagtacttcttctactccaacatcatgaacttcttcaagaccgagatcaccctggccaacggcgagatccggaagcggcccctgatcgagaccaacggcgagaccggcgagatcgtgtgggacaagggccgggacttcgccaccgtgcggaaggtgctgtccatgccccaggtgaacatcgtgaagaagaccgaggtgcagaccggcggcttctccaaggagtccatcctgcccaagcggaactccgacaagctgatcgcccggaagaaggactgggaccccaagaagtacggcggcttcgactcccccaccgtggcctactccgtgctggtggtggccaaggtggagaagggcaagtccaagaagctgaagtccgtgaaggagctgctgggcatcaccatcatggagcggtcctccttcgagaagaaccccatcgacttcctggaggccaagggctacaaggaggtgaagaaggacctgatcatcaagctgcccaagtactccctgttcgagctggagaacggccggaagcggatgctggcctccgccggcgagctgcagaagggcaacgagctggccctgccctccaagtacgtgaacttcctgtacctggcctcccactacgagaagctgaagggctcccccgaggacaacgagcagaagcagctgttcgtggagcagcacaagcactacctggacgagatcatcgagcagatctccgagttctccaagcgggtgatcctggccgacgccaacctggacaaggtgctgtccgcctacaacaagcaccgggacaagcccatccgggagcaggccgagaacatcatccacctgttcaccctgaccaacctgggcgcccccgccgccttcaagtacttcgacaccaccatcgaccggaagcggtacacctccaccaaggaggtgctggacgccaccctgatccaccagtccatcaccggcctgtacgagacccggatcgacctgtcccagctgggcggcgactccggcggctcctccggcggctccaagcggaccgccgacggctccgagttcgagtcccccaagaagaagcggaaggtgtccggcggctcctccggcggctccatggactccaccaaggagaagtgcgactcctacaaggacgacctgctgctgcggatgggcctgaacgacaacaaggccggcatggagggcctggacaaggagaagatcaacaagatcatcatggaggccaccaagggctcccggttctacggcaacgagctgaagaaggagaagcaggtgaaccagcggatcgagaacatgatgcagcagaaggcccagatcacctcccagcagctgcggaaggcccagctgcaggtggaccggttcgccatggagctggagcagtcccggaacctgtccaacaccatcgtgcacatcgacatggacgccttctacgccgccgtggagatgcgggacaaccccgagctgaaggacaagcccatcgccgtgggctccatgtccatgctgtccacctccaactaccacgcccggcggttcggcgtgcgggccgccatgcccggcttcatcgccaagcggctgtgcccccagctgatcatcgtgccccccaacttcgacaagtaccgggccgtgtccaaggaggtgaaggagatcctggccgactacgaccccaacttcatggccatgtccctggacgaggcctacctgaacatcaccaagcacctggaggagcggcagaactggcccgaggacaagcggcggtacttcatcaagatgggctcctccgtggagaacgacaaccccggcaaggaggtgaacaagctgtccgagcacgagcggtccatctcccccctgctgttcgaggagtccccctccgacgtgcagccccccggcgaccccttccaggtgaacttcgaggagcagaacaacccccagatcctgcagaactccgtggtgttcggcacctccgcccaggaggtggtgaaggagatccggttccggatcgagcagaagaccaccctgaccgcctccgccggcatcgcccccaacaccatgctggccaaggtgtgctccgacaagaacaagcccaacggccagtaccagatcctgcccaaccggcaggccgtgatggacttcatcaaggacctgcccatccggaaggtgtccggcatcggcaaggtgaccgagaagatgctgaaggccctgggcatcatcacctgcaccgagctgtaccagcagcgggccctgctgtccctgctgttctccgagacctcctggcactacttcctgcacatctccctgggcctgggctccacccacctgacccgggaccgggtgcggaagtccatgtccgtggagcggaccttctccgagatcaacaaggccgaggagcagtactccctgtgccaggagctgtgctccgagctggcccaggacctgcagaaggagcggctgaagggccggaccgtgaccatcaagctgaagaacgtgaacttcgaggtgaagacccgggcctccaccgtgtcctccgtggtgtccaccgccgaggagatcttcgccatcgccaaggagctgctgaagaccgagatcgacgccgacttcccccaccccctgcggctgcggctgatgggcgtgcggatctcctccttccccaacgaggaggaccggaagcaccagcagcggtccatcatcggcttcctgcaggccggcaaccaggccctgtccgccaccgagtgcaccctggagaagaccgacaaggacaagttcgtgaagcccctggagatgtcccacaagaagtccttcttcgacaagaagcggtccgagcggaagtggtcccaccaggacaccttcaagtgcgaggccgtgaacaagcagtccttccagacctcccagcccttccaggtgctgaagaagaagatgaacgagaacctggagatctccgagaactccgacgactgccagatcctgacctgccccgtgtgcttccgggcccagggctgcatctccctggaggccctgaacaagcacgtggacgagtgcctggacggcccctccatctccgagaacttcaagatgttctcctgctcccacgtgtccgccaccaaggtgaacaagaaggagaacgtgcccgcctcctccctgtgcgagaagcaggactacgaggcccaccccaagatcaaggagatctcctccgtggactgcatcgccctggtggacaccatcgacaactcctccaaggccgagtccatcgacgccctgtccaacaagcactccaaggaggagtgctcctccctgccctccaagtccttcaacatcgagcactgccaccagaactcctcctccaccgtgtccctggagaacgaggacgtgggctccttccggcaggagtaccggcagccctacctgtgcgaggtgaagaccggccaggccctggtgtgccccgtgtgcaacgtggagcagaagacctccgacctgaccctgttcaacgtgcacgtggacgtgtgcctgaacaagtccttcatccaggagctgcggaaggacaagttcaaccccgtgaaccagcccaaggagtcctcccggtccaccggctcctcctccggcgtgcagaaggccgtgacccggaccaagcggcccggcctgatgaccaagtactccacctccaagaagatcaagcccaacaaccccaagcacaccctggacatcttcttcaagtag

SEQ ID NO: 1030 - protein, 2290 aa, synthetic construct
  REGION 1..2290: note = Synthetic
MKRTADGSEFESPKKKRKVDKKYSIGLDIGTNSVGWAVITDEYKVPSKKFKVLGNTDRHSIKKNLIGALLFDSGETAEATRLKRTARRRYTRRKNRICYLQEIFSNEMAKVDDSFFHRLEESFLVEEDKKHERHPIFGNIVDEVAYHEKYPTIYHLRKKLVDSTDKADLRLIYLALAHMIKFRGHFLIEGDLNPDNSDVDKLFIQLVQTYNQLFEENPINASGVDAKAILSARLSKSRRLENLIAQLPGEKKNGLFGNLIALSLGLTPNFKSNFDLAEDAKLQLSKDTYDDDLDNLLAQIGDQYADLFLAAKNLSDAILLSDILRVNTEITKAPLSASMIKRYDEHHQDLTLLKALVRQQLPEKYKEIFFDQSKNGYAGYIDGGASQEEFYKFIKPILEKMDGTEELLVKLNREDLLRKQRTFDNGSIPHQIHLGELHAILRRQEDFYPFLKDNREKIEKILTFRIPYYVGPLARGNSRFAWMTRKSEETITPWNFEEVVDKGASAQSFIERMTNFDKNLPNEKVLPKHSLLYEYFTVYNELTKVKYVTEGMRKPAFLSGEQKKAIVDLLFKTNRKVTVKQLKEDYFKKIECFDSVEISGVEDRFNASLGTYHDLLKIIKDKDFLDNEENEDILEDIVLTLTLFEDREMIEERLKTYAHLFDDKVMKQLKRRRYTGWGRLSRKLINGIRDKQSGKTILDFLKSDGFANRNFMQLIHDDSLTFKEDIQKAQVSGQGDSLHEHIANLAGSPAIKKGILQTVKVVDELVKVMGRHKPENIVIEMARENQTTQKGQKNSRERMKRIEEGIKELGSQILKEHPVENTQLQNEKLYLYYLQNGRDMYVDQELDINRLSDYDVDAIVPQSFLKDDSIDNKVLTRSDKNRGKSDNVPSEEVVKKMKNYWRQLLNAKLITQRKFDNLTKAERGGLSELDKAGFIKRQLVETRQITKHVAQILDSRMNTKYDENDKLIREVKVITLKSKLVSDFRKDFQFYKVREINNYHHAHDAYLNAVVGTALIKKYPKLESEFVYGDYKVYDVRKMIAKSEQEIGKATAKYFFYSNIMNFFKTEITLANGEIRKRPLIETNGETGEIVWDKGRDFATVRKVLSMPQVNIVKKTEVQTGGFSKESILPKRNSDKLIARKKDWDPKKYGGFDSPTVAYSVLVVAKVEKGKSKKLKSVKELLGITIMERSSFEKNPIDFLEAKGYKEVKKDLIIKLPKYSLFELENGRKRMLASAGELQKGNELALPSKYVNFLYLASHYEKLKGSPEDNEQKQLFVEQHKHYLDEIIEQISEFSKRVILADANLDKVLSAYNKHRDKPIREQAENIIHLFTLTNLGAPAAFKYFDTTIDRKRYTSTKEVLDATLIHQSITGLYETRIDLSQLGGDSGGSSGGSKRTADGSEFESPKKKRKVSGGSSGGSMDSTKEKCDSYKDDLLLRMGLNDNKAGMEGLDKEKINKIIMEATKGSRFYGNELKKEKQVNQRIENMMQQKAQITSQQLRKAQLQVDRFAMELEQSRNLSNTIVHIDMDAFYAAVEMRDNPELKDKPIAVGSMSMLSTSNYHARRFGVRAAMPGFIAKRLCPQLIIVPPNFDKYRAVSKEVKEILADYDPNFMAMSLDEAYLNITKHLEERQNWPEDKRRYFIKMGSSVENDNPGKEVNKLSEHERSISPLLFEESPSDVQPPGDPFQVNFEEQNNPQILQNSVVFGTSAQEVVKEIRFRIEQKTTLTASAGIAPNTMLAKVCSDKNKPNGQYQILPNRQAVMDFIKDLPIRKVSGIGKVTEKMLKALGIITCTELYQQRALLSLLFSETSWHYFLHISLGLGSTHLTRDRVRKSMSVERTFSEINKAEEQYSLCQELCSELAQDLQKERLKGRTVTIKLKNVNFEVKTRASTVSSVVSTAEEIFAIAKELLKTEIDADFPHPLRLRLMGVRISSFPNEEDRKHQQRSIIGFLQAGNQALSATECTLEKTDKDKFVKPLEMSHKKSFFDKKRSERKWSHQDTFKCEAVNKQSFQTSQPFQVLKKKMNENLEISENSDDCQILTCPVCFRAQGCISLEALNKHVDECLDGPSISENFKMFSCSHVSATKVNKKENVPASSLCEKQDYEAHPKIKEISSVDCIALVDTIDNSSKAESIDALSNKHSKEECSSLPSKSFNIEHCHQNSSSTVSLENEDVGSFRQEYRQPYLCEVKTGQALVCPVCNVEQKTSDLTLFNVHVDVCLNKSFIQELRKDKFNPVNQPKESSRSTGSSSGVQKAVTRTKRPGLMTKYSTSKKIKPNNPKHTLDIFFK

SEQ ID NO: 1031 - RNA, 7432 nt, synthetic construct
  misc_feature 1..7432: note = Synthetic
  source 1..7432: mol_type = other RNA
gggaagctcagaataaacgctcaactttggccggatctgccaccatgaagcggaccgccgacggctccgagttcgagtcccccaagaagaagcggaaggtggacaagaagtactccatcggcctggacatcggcaccaactccgtgggctgggccgtgatcaccgacgagtacaaggtgccctccaagaagttcaaggtgctgggcaacaccgaccggcactccatcaagaagaacctgatcggcgccctgctgttcgactccggcgagaccgccgaggccacccggctgaagcggaccgcccggcggcggtacacccggcggaagaaccggatctgctacctgcaggagatcttctccaacgagatggccaaggtggacgactccttcttccaccggctggaggagtccttcctggtggaggaggacaagaagcacgagcggcaccccatcttcggcaacatcgtggacgaggtggcctaccacgagaagtaccccaccatctaccacctgcggaagaagctggtggactccaccgacaaggccgacctgcggctgatctacctggccctggcccacatgatcaagttccggggccacttcctgatcgagggcgacctgaaccccgacaactccgacgtggacaagctgttcatccagctggtgcagacctacaaccagctgttcgaggagaaccccatcaacgcctccggcgtggacgccaaggccatcctgtccgcccggctgtccaagtcccggcggctggagaacctgatcgcccagctgcccggcgagaagaagaacggcctgttcggcaacctgatcgccctgtccctgggcctgacccccaacttcaagtccaacttcgacctggccgaggacgccaagctgcagctgtccaaggacacctacgacgacgacctggacaacctgctggcccagatcggcgaccagtacgccgacctgttcctggccgccaagaacctgtccgacgccatcctgctgtccgacatcctgcgggtgaacaccgagatcaccaaggcccccctgtccgcctccatgatcaagcggtacgacgagcaccaccaggacctgaccctgctgaaggccctggtgcggcagcagctgcccgagaagtacaaggagatcttcttcgaccagtccaagaacggctacgccggctacatcgacggcggcgcctcccaggaggagttctacaagttcatcaagcccatcctggagaagatggacggcaccgaggagctgctggtgaagctgaaccgggaggacctgctgcggaagcagcggaccttcgacaacggctccatcccccaccagatccacctgggcgagctgcacgccatcctgcggcggcaggaggacttctaccccttcctgaaggacaaccgggagaagatcgagaagatcctgaccttccggatcccctactacgtgggccccctggcccggggcaactcccggttcgcctggatgacccggaagtccgaggagaccatcaccccctggaacttcgaggaggtggtggacaagggcgcctccgcccagtccttcatcgagcggatgaccaacttcgacaagaacctgcccaacgagaaggtgctgcccaagcactccctgctgtacgagtacttcaccgtgtacaacgagctgaccaaggtgaagtacgtgaccgagggcatgcggaagcccgccttcctgtccggcgagcagaagaaggccatcgtggacctgctgttcaagaccaaccggaaggtgaccgtgaagcagctgaaggaggactacttcaagaagatcgagtgcttcgactccgtggagatctccggcgtggaggaccggttcaacgcctccctgggcacctaccacgacctgctgaagatcatcaaggacaaggacttcctggacaacgaggagaacgaggacatcctggaggacatcgtgctgaccctgaccctgttcgaggaccgggagatgatcgaggagcggctgaagacctacgcccacctgttcgacgacaaggtgatgaagcagctgaagcggcggcggtacaccggctggggccggctgtcccggaagctgatcaacggcatccgggacaagcagtccggcaagaccatcctggacttcctgaagtccgacggcttcgccaaccggaacttcatgcagctgatccacgacgactccctgaccttcaaggaggacatccagaaggcccaggtgtccggccagggcgactccctgcacgagcacatcgccaacctggccggctcccccgccatcaagaagggcatcctgcagaccgtgaaggtggtggacgagctggtgaaggtgatgggccggcacaagcccgagaacatcgtgatcgagatggcccgggagaaccagaccacccagaagggccagaagaactcccgggagcggatgaagcggatcgaggagggcatcaaggagctgggctcccagatcctgaaggagcaccccgtggagaacacccagctgcagaacgagaagctgtacctgtactacctgcagaacggccgggacatgtacgtggaccaggagctggacatcaaccggctgtccgactacgacgtggacgccatcgtgccccagtccttcctgaaggacgactccatcgacaacaaggtgctgacccggtccgacaagaaccggggcaagtccgacaacgtgccctccgaggaggtggtgaagaagatgaagaactactggcggcagctgctgaacgccaagctgatcacccagcggaagttcgacaacctgaccaaggccgagcggggcggcctgtccgagctggacaaggccggcttcatcaagcggcagctggtggagacccggcagatcaccaagcacgtggcccagatcctggactcccggatgaacaccaagtacgacgagaacgacaagctgatccgggaggtgaaggtgatcaccctgaagtccaagctggtgtccgacttccggaaggacttccagttctacaaggtgcgggagatcaacaactaccaccacgcccacgacgcctacctgaacgccgtggtgggcaccgccctgatcaagaagtaccccaagctggagtccgagttcgtgtacggcgactacaaggtgtacgacgtgcggaagatgatcgccaagtccgagcaggagatcggcaaggccaccgccaagtacttcttctactccaacatcatgaacttcttcaagaccgagatcaccctggccaacggcgagatccggaagcggcccctgatcgagaccaacggcgagaccggcgagatcgtgtgggacaagggccgggacttcgccaccgtgcggaaggtgctgtccatgccccaggtgaacatcgtgaagaagaccgaggtgcagaccggcggcttctccaaggagtccatcctgcccaagcggaactccgacaagctgatcgcccggaagaaggactgggaccccaagaagtacggcggcttcgactcccccaccgtggcctactccgtgctggtggtggccaaggtggagaagggcaagtccaagaagctgaagtccgtgaaggagctgctgggcatcaccatcatggagcggtcctccttcgagaagaaccccatcgacttcctggaggccaagggctacaaggaggtgaagaaggacctgatcatcaagctgcccaagtactccctgttcgagctggagaacggccggaagcggatgctggcctccgccggcgagctgcagaagggcaacgagctggccctgccctccaagtacgtgaacttcctgtacctggcctcccactacgagaagctgaagggctcccccgaggacaacgagcagaagcagctgttcgtggagcagcacaagcactacctggacgagatcatcgagcagatctccgagttctccaagcgggtgatcctggccgacgccaacctggacaaggtgctgtccgcctacaacaagcaccgggacaagcccatccgggagcaggccgagaacatcatccacctgttcaccctgaccaacctgggcgcccccgccgccttcaagtacttcgacaccaccatcgaccggaagcggtacacctccaccaaggaggtgctggacgccaccctgatccaccagtccatcaccggcctgtacgagacccggatcgacctgtcccagctgggcggcgactccggcggctcctccggcggctccaagcggaccgccgacggctccgagttcgagtcccccaagaagaagcggaaggtgtccggcggctcctccggcggctccatggactccaccaaggagaagtgcgactcctacaaggacgacctgctgctgcggatgggcctgaacgacaacaaggccggcatggagggcctggacaaggagaagatcaacaagatcatcatggaggccaccaagggctcccggttctacggcaacgagctgaagaaggagaagcaggtgaaccagcggatcgagaacatgatgcagcagaaggcccagatcacctcccagcagctgcggaaggcccagctgcaggtggaccggttcgccatggagctggagcagtcccggaacctgtccaacaccatcgtgcacatcgacatggacgccttctacgccgccgtggagatgcgggacaaccccgagctgaaggacaagcccatcgccgtgggctccatgtccatgctgtccacctccaactaccacgcccggcggttcggcgtgcgggccgccatgcccggcttcatcgccaagcggctgtgcccccagctgatcatcgtgccccccaacttcgacaagtaccgggccgtgtccaaggaggtgaaggagatcctggccgactacgaccccaacttcatggccatgtccctggacgaggcctacctgaacatcaccaagcacctggaggagcggcagaactggcccgaggacaagcggcggtacttcatcaagatgggctcctccgtggagaacgacaaccccggcaaggaggtgaacaagctgtccgagcacgagcggtccatctcccccctgctgttcgaggagtccccctccgacgtgcagccccccggcgaccccttccaggtgaacttcgaggagcagaacaacccccagatcctgcagaactccgtggtgttcggcacctccgcccaggaggtggtgaaggagatccggttccggatcgagcagaagaccaccctgaccgcctccgccggcatcgcccccaacaccatgctggccaaggtgtgctccgacaagaacaagcccaacggccagtaccagatcctgcccaaccggcaggccgtgatggacttcatcaaggacctgcccatccggaaggtgtccggcatcggcaaggtgaccgagaagatgctgaaggccctgggcatcatcacctgcaccgagctgtaccagcagcgggccctgctgtccctgctgttctccgagacctcctggcactacttcctgcacatctccctgggcctgggctccacccacctgacccgggacggcgagcggaagtccatgtccgtggagcggaccttctccgagatcaacaaggccgaggagcagtactccctgtgccaggagctgtgctccgagctggcccaggacctgcagaaggagcggctgaagggccggaccgtgaccatcaagctgaagaacgtgaacttcgaggtgaagacccgggcctccaccgtgtcctccgtggtgtccaccgccgaggagatcttcgccatcgccaaggagctgctgaagaccgagatcgacgccgacttcccccaccccctgcggctggccctgatgggcgtgcggatctcctccttccccaacgaggaggaccggaagcaccagcagcggtccatcatcggcttcctgcaggccggcaaccaggccctgtccgccaccgagtgcaccctggagaagaccgacaaggacaagttcgtgaagcccctggagatgtcccacaagaagtccttcttcgacaagaagcggtccgagcggaagtggtcccaccaggacaccttcaagtgcgaggccgtgaacaagcagtccttccagacctcccagcccttccaggtgctgaagaagaagatgaacgagaacctggagatctccgagaactccgacgactgccagatcctgacctgccccgtgtgcttccgggcccagggctgcatctccctggaggccctgaacaagcacgtggacgagtgcctggacggcccctccatctccgagaacttcaagatgttctcctgctcccacgtgtccgccaccaaggtgaacaagaaggagaacgtgcccgcctcctccctgtgcgagaagcaggactacgaggcccaccccaagatcaaggagatctcctccgtggactgcatcgccctggtggacaccatcgacaactcctccaaggccgagtccatcgacgccctgtccaacaagcactccaaggaggagtgctcctccctgccctccaagtccttcaacatcgagcactgccaccagaactcctcctccaccgtgtccctggagaacgaggacgtgggctccttccggcaggagtaccggcagccctacctgtgcgaggtgaagaccggccaggccctggtgtgccccgtgtgcaacgtggagcagaagacctccgacctgaccctgttcaacgtgcacgtggacgtgtgcctgaacaagtccttcatccaggagctgcggaaggacaagttcaaccccgtgaaccagcccaaggagtcctcccggtccaccggctcctcctccggcgtgcagaaggccgtgacccggaccaagcggcccggcctgatgaccaagtactccacctccaagaagatcaagcccaacaaccccaagcacaccctggacatcttcttcaagtagctagcaccagcctcaagaacacccgaatggagtctctaagctacataataccaacttacactttacaaaatgttgtcccccaaaatgtagccattcgtatctgctcctaataaaaagaaagtttcttcacattctctcgagaaaaaaaaaaaatggaaaaaaaaaaaacggaaaaaaaaaaaaggtaaaaaaaaaaaatataaaaaaaaaaaacataaaaaaaaaaaacgaaaaaaaaaaaacgtaaaaaaaaaaaactcaaaaaaaaaaaagataaaaaaaaaaaacctaaaaaaaaaaaatgtaaaaaaaaaaaagggaaaaaaaaaaaacgcaaaaaaaaaaaacacaaaaaaaaaaaatgcaaaaaaaaaaaatcgaaaaaaaaaaaatctaaaaaaaaaaaacgaaaaaaaaaaaacccaaaaaaaaaaaagacaaaaaaaaaaaatagaaaaaaaaaaagttaaaaaaaaaaaactgaaaaaaaaaaaatttaaaaaaaaaaaatctag

SEQ ID NO: 1032 - RNA, 6873 nt, synthetic construct
  misc_feature 1..6873: note = Synthetic
  source 1..6873: mol_type = other RNA
atgaagcggaccgccgacggctccgagttcgagtcccccaagaagaagcggaaggtggacaagaagtactccatcggcctggacatcggcaccaactccgtgggctgggccgtgatcaccgacgagtacaaggtgccctccaagaagttcaaggtgctgggcaacaccgaccggcactccatcaagaagaacctgatcggcgccctgctgttcgactccggcgagaccgccgaggccacccggctgaagcggaccgcccggcggcggtacacccggcggaagaaccggatctgctacctgcaggagatcttctccaacgagatggccaaggtggacgactccttcttccaccggctggaggagtccttcctggtggaggaggacaagaagcacgagcggcaccccatcttcggcaacatcgtggacgaggtggcctaccacgagaagtaccccaccatctaccacctgcggaagaagctggtggactccaccgacaaggccgacctgcggctgatctacctggccctggcccacatgatcaagttccggggccacttcctgatcgagggcgacctgaaccccgacaactccgacgtggacaagctgttcatccagctggtgcagacctacaaccagctgttcgaggagaaccccatcaacgcctccggcgtggacgccaaggccatcctgtccgcccggctgtccaagtcccggcggctggagaacctgatcgcccagctgcccggcgagaagaagaacggcctgttcggcaacctgatcgccctgtccctgggcctgacccccaacttcaagtccaacttcgacctggccgaggacgccaagctgcagctgtccaaggacacctacgacgacgacctggacaacctgctggcccagatcggcgaccagtacgccgacctgttcctggccgccaagaacctgtccgacgccatcctgctgtccgacatcctgcgggtgaacaccgagatcaccaaggcccccctgtccgcctccatgatcaagcggtacgacgagcaccaccaggacctgaccctgctgaaggccctggtgcggcagcagctgcccgagaagtacaaggagatcttcttcgaccagtccaagaacggctacgccggctacatcgacggcggcgcctcccaggaggagttctacaagttcatcaagcccatcctggagaagatggacggcaccgaggagctgctggtgaagctgaaccgggaggacctgctgcggaagcagcggaccttcgacaacggctccatcccccaccagatccacctgggcgagctgcacgccatcctgcggcggcaggaggacttctaccccttcctgaaggacaaccgggagaagatcgagaagatcctgaccttccggatcccctactacgtgggccccctggcccggggcaactcccggttcgcctggatgacccggaagtccgaggagaccatcaccccctggaacttcgaggaggtggtggacaagggcgcctccgcccagtccttcatcgagcggatgaccaacttcgacaagaacctgcccaacgagaaggtgctgcccaagcactccctgctgtacgagtacttcaccgtgtacaacgagctgaccaaggtgaagtacgtgaccgagggcatgcggaagcccgccttcctgtccggcgagcagaagaaggccatcgtggacctgctgttcaagaccaaccggaaggtgaccgtgaagcagctgaaggaggactacttcaagaagatcgagtgcttcgactccgtggagatctccggcgtggaggaccggttcaacgcctccctgggcacctaccacgacctgctgaagatcatcaaggacaaggacttcctggacaacgaggagaacgaggacatcctggaggacatcgtgctgaccctgaccctgttcgaggaccgggagatgatcgaggagcggctgaagacctacgcccacctgttcgacgacaaggtgatgaagcagctgaagcggcggcggtacaccggctggggccggctgtcccggaagctgatcaacggcatccgggacaagcagtccggcaagaccatcctggacttcctgaagtccgacggcttcgccaaccggaacttcatgcagctgatccacgacgactccctgaccttcaaggaggacatccagaaggcccaggtgtccggccagggcgactccctgcacgagcacatcgccaacctggccggctcccccgccatcaagaagggcatcctgcagaccgtgaaggtggtggacgagctggtgaaggtgatgggccggcacaagcccgagaacatcgtgatcgagatggcccgggagaaccagaccacccagaagggccagaagaactcccgggagcggatgaagcggatcgaggagggcatcaaggagctgggctcccagatcctgaaggagcaccccgtggagaacacccagctgcagaacgagaagctgtacctgtactacctgcagaacggccgggacatgtacgtggaccaggagctggacatcaaccggctgtccgactacgacgtggacgccatcgtgccccagtccttcctgaaggacgactccatcgacaacaaggtgctgacccggtccgacaagaaccggggcaagtccgacaacgtgccctccgaggaggtggtgaagaagatgaagaactactggcggcagctgctgaacgccaagctgatcacccagcggaagttcgacaacctgaccaaggccgagcggggcggcctgtccgagctggacaaggccggcttcatcaagcggcagctggtggagacccggcagatcaccaagcacgtggcccagatcctggactcccggatgaacaccaagtacgacgagaacgacaagctgatccgggaggtgaaggtgatcaccctgaagtccaagctggtgtccgacttccggaaggacttccagttctacaaggtgcgggagatcaacaactaccaccacgcccacgacgcctacctgaacgccgtggtgggcaccgccctgatcaagaagtaccccaagctggagtccgagttcgtgtacggcgactacaaggtgtacgacgtgcggaagatgatcgccaagtccgagcaggagatcggcaaggccaccgccaagtacttcttctactccaacatcatgaacttcttcaagaccgagatcaccctggccaacggcgagatccggaagcggcccctgatcgagaccaacggcgagaccggcgagatcgtgtgggacaagggccgggacttcgccaccgtgcggaaggtgctgtccatgccccaggtgaacatcgtgaagaagaccgaggtgcagaccggcggcttctccaaggagtccatcctgcccaagcggaactccgacaagctgatcgcccggaagaaggactgggaccccaagaagtacggcggcttcgactcccccaccgtggcctactccgtgctggtggtggccaaggtggagaagggcaagtccaagaagctgaagtccgtgaaggagctgctgggcatcaccatcatggagcggtcctccttcgagaagaaccccatcgacttcctggaggccaagggctacaaggaggtgaagaaggacctgatcatcaagctgcccaagtactccctgttcgagctggagaacggccggaagcggatgctggcctccgccggcgagctgcagaagggcaacgagctggccctgccctccaagtacgtgaacttcctgtacctggcctcccactacgagaagctgaagggctcccccgaggacaacgagcagaagcagctgttcgtggagcagcacaagcactacctggacgagatcatcgagcagatctccgagttctccaagcgggtgatcctggccgacgccaacctggacaaggtgctgtccgcctacaacaagcaccgggacaagcccatccgggagcaggccgagaacatcatccacctgttcaccctgaccaacctgggcgcccccgccgccttcaagtacttcgacaccaccatcgaccggaagcggtacacctccaccaaggaggtgctggacgccaccctgatccaccagtccatcaccggcctgtacgagacccggatcgacctgtcccagctgggcggcgactccggcggctcctccggcggctccaagcggaccgccgacggctccgagttcgagtcccccaagaagaagcggaaggtgtccggcggctcctccggcggctccatggactccaccaaggagaagtgcgactcctacaaggacgacctgctgctgcggatgggcctgaacgacaacaaggccggcatggagggcctggacaaggagaagatcaacaagatcatcatggaggccaccaagggctcccggttctacggcaacgagctgaagaaggagaagcaggtgaaccagcggatcgagaacatgatgcagcagaaggcccagatcacctcccagcagctgcggaaggcccagctgcaggtggaccggttcgccatggagctggagcagtcccggaacctgtccaacaccatcgtgcacatcgacatggacgccttctacgccgccgtggagatgcgggacaaccccgagctgaaggacaagcccatcgccgtgggctccatgtccatgctgtccacctccaactaccacgcccggcggttcggcgtgcgggccgccatgcccggcttcatcgccaagcggctgtgcccccagctgatcatcgtgccccccaacttcgacaagtaccgggccgtgtccaaggaggtgaaggagatcctggccgactacgaccccaacttcatggccatgtccctggacgaggcctacctgaacatcaccaagcacctggaggagcggcagaactggcccgaggacaagcggcggtacttcatcaagatgggctcctccgtggagaacgacaaccccggcaaggaggtgaacaagctgtccgagcacgagcggtccatctcccccctgctgttcgaggagtccccctccgacgtgcagccccccggcgaccccttccaggtgaacttcgaggagcagaacaacccccagatcctgcagaactccgtggtgttcggcacctccgcccaggaggtggtgaaggagatccggttccggatcgagcagaagaccaccctgaccgcctccgccggcatcgcccccaacaccatgctggccaaggtgtgctccgacaagaacaagcccaacggccagtaccagatcctgcccaaccggcaggccgtgatggacttcatcaaggacctgcccatccggaaggtgtccggcatcggcaaggtgaccgagaagatgctgaaggccctgggcatcatcacctgcaccgagctgtaccagcagcgggccctgctgtccctgctgttctccgagacctcctggcactacttcctgcacatctccctgggcctgggctccacccacctgacccgggacggcgagcggaagtccatgtccgtggagcggaccttctccgagatcaacaaggccgaggagcagtactccctgtgccaggagctgtgctccgagctggcccaggacctgcagaaggagcggctgaagggccggaccgtgaccatcaagctgaagaacgtgaacttcgaggtgaagacccgggcctccaccgtgtcctccgtggtgtccaccgccgaggagatcttcgccatcgccaaggagctgctgaagaccgagatcgacgccgacttcccccaccccctgcggctggccctgatgggcgtgcggatctcctccttccccaacgaggaggaccggaagcaccagcagcggtccatcatcggcttcctgcaggccggcaaccaggccctgtccgccaccgagtgcaccctggagaagaccgacaaggacaagttcgtgaagcccctggagatgtcccacaagaagtccttcttcgacaagaagcggtccgagcggaagtggtcccaccaggacaccttcaagtgcgaggccgtgaacaagcagtccttccagacctcccagcccttccaggtgctgaagaagaagatgaacgagaacctggagatctccgagaactccgacgactgccagatcctgacctgccccgtgtgcttccgggcccagggctgcatctccctggaggccctgaacaagcacgtggacgagtgcctggacggcccctccatctccgagaacttcaagatgttctcctgctcccacgtgtccgccaccaaggtgaacaagaaggagaacgtgcccgcctcctccctgtgcgagaagcaggactacgaggcccaccccaagatcaaggagatctcctccgtggactgcatcgccctggtggacaccatcgacaactcctccaaggccgagtccatcgacgccctgtccaacaagcactccaaggaggagtgctcctccctgccctccaagtccttcaacatcgagcactgccaccagaactcctcctccaccgtgtccctggagaacgaggacgtgggctccttccggcaggagtaccggcagccctacctgtgcgaggtgaagaccggccaggccctggtgtgccccgtgtgcaacgtggagcagaagacctccgacctgaccctgttcaacgtgcacgtggacgtgtgcctgaacaagtccttcatccaggagctgcggaaggacaagttcaaccccgtgaaccagcccaaggagtcctcccggtccaccggctcctcctccggcgtgcagaaggccgtgacccggaccaagcggcccggcctgatgaccaagtactccacctccaagaagatcaagcccaacaaccccaagcacaccctggacatcttcttcaagtag

SEQ ID NO: 1033 - protein, 2290 aa, synthetic construct
  REGION 1..2290: note = Synthetic
MKRTADGSEFESPKKKRKVDKKYSIGLDIGTNSVGWAVITDEYKVPSKKFKVLGNTDRHSIKKNLIGALLFDSGETAEATRLKRTARRRYTRRKNRICYLQEIFSNEMAKVDDSFFHRLEESFLVEEDKKHERHPIFGNIVDEVAYHEKYPTIYHLRKKLVDSTDKADLRLIYLALAHMIKFRGHFLIEGDLNPDNSDVDKLFIQLVQTYNQLFEENPINASGVDAKAILSARLSKSRRLENLIAQLPGEKKNGLFGNLIALSLGLTPNFKSNFDLAEDAKLQLSKDTYDDDLDNLLAQIGDQYADLFLAAKNLSDAILLSDILRVNTEITKAPLSASMIKRYDEHHQDLTLLKALVRQQLPEKYKEIFFDQSKNGYAGYIDGGASQEEFYKFIKPILEKMDGTEELLVKLNREDLLRKQRTFDNGSIPHQIHLGELHAILRRQEDFYPFLKDNREKIEKILTFRIPYYVGPLARGNSRFAWMTRKSEETITPWNFEEVVDKGASAQSFIERMTNFDKNLPNEKVLPKHSLLYEYFTVYNELTKVKYVTEGMRKPAFLSGEQKKAIVDLLFKTNRKVTVKQLKEDYFKKIECFDSVEISGVEDRFNASLGTYHDLLKIIKDKDFLDNEENEDILEDIVLTLTLFEDREMIEERLKTYAHLFDDKVMKQLKRRRYTGWGRLSRKLINGIRDKQSGKTILDFLKSDGFANRNFMQLIHDDSLTFKEDIQKAQVSGQGDSLHEHIANLAGSPAIKKGILQTVKVVDELVKVMGRHKPENIVIEMARENQTTQKGQKNSRERMKRIEEGIKELGSQILKEHPVENTQLQNEKLYLYYLQNGRDMYVDQELDINRLSDYDVDAIVPQSFLKDDSIDNKVLTRSDKNRGKSDNVPSEEVVKKMKNYWRQLLNAKLITQRKFDNLTKAERGGLSELDKAGFIKRQLVETRQITKHVAQILDSRMNTKYDENDKLIREVKVITLKSKLVSDFRKDFQFYKVREINNYHHAHDAYLNAVVGTALIKKYPKLESEFVYGDYKVYDVRKMIAKSEQEIGKATAKYFFYSNIMNFFKTEITLANGEIRKRPLIETNGETGEIVWDKGRDFATVRKVLSMPQVNIVKKTEVQTGGFSKESILPKRNSDKLIARKKDWDPKKYGGFDSPTVAYSVLVVAKVEKGKSKKLKSVKELLGITIMERSSFEKNPIDFLEAKGYKEVKKDLIIKLPKYSLFELENGRKRMLASAGELQKGNELALPSKYVNFLYLASHYEKLKGSPEDNEQKQLFVEQHKHYLDEIIEQISEFSKRVILADANLDKVLSAYNKHRDKPIREQAENIIHLFTLTNLGAPAAFKYFDTTIDRKRYTSTKEVLDATLIHQSITGLYETRIDLSQLGGDSGGSSGGSKRTADGSEFESPKKKRKVSGGSSGGSMDSTKEKCDSYKDDLLLRMGLNDNKAGMEGLDKEKINKIIMEATKGSRFYGNELKKEKQVNQRIENMMQQKAQITSQQLRKAQLQVDRFAMELEQSRNLSNTIVHIDMDAFYAAVEMRDNPELKDKPIAVGSMSMLSTSNYHARRFGVRAAMPGFIAKRLCPQLIIVPPNFDKYRAVSKEVKEILADYDPNFMAMSLDEAYLNITKHLEERQNWPEDKRRYFIKMGSSVENDNPGKEVNKLSEHERSISPLLFEESPSDVQPPGDPFQVNFEEQNNPQILQNSVVFGTSAQEVVKEIRFRIEQKTTLTASAGIAPNTMLAKVCSDKNKPNGQYQILPNRQAVMDFIKDLPIRKVSGIGKVTEKMLKALGIITCTELYQQRALLSLLFSETSWHYFLHISLGLGSTHLTRDGERKSMSVERTFSEINKAEEQYSLCQELCSELAQDLQKERLKGRTVTIKLKNVNFEVKTRASTVSSVVSTAEEIFAIAKELLKTEIDADFPHPLRLALMGVRISSFPNEEDRKHQQRSIIGFLQAGNQALSATECTLEKTDKDKFVKPLEMSHKKSFFDKKRSERKWSHQDTFKCEAVNKQSFQTSQPFQVLKKKMNENLEISENSDDCQILTCPVCFRAQGCISLEALNKHVDECLDGPSISENFKMFSCSHVSATKVNKKENVPASSLCEKQDYEAHPKIKEISSVDCIALVDTIDNSSKAESIDALSNKHSKEECSSLPSKSFNIEHCHQNSSSTVSLENEDVGSFRQEYRQPYLCEVKTGQALVCPVCNVEQKTSDLTLFNVHVDVCLNKSFIQELRKDKFNPVNQPKESSRSTGSSSGVQKAVTRTKRPGLMTKYSTSKKIKPNNPKHTLDIFFK

SEQ ID NO: 1034 - RNA, 7432 nt, synthetic construct
  misc_feature 1..7432: note = Synthetic
  source 1..7432: mol_type = other RNA
gggaagctcagaataaacgctcaactttggccggatctgccaccatgaagcggaccgccgacggctccgagttcgagtcccccaagaagaagcggaaggtggacaagaagtactccatcggcctggacatcggcaccaactccgtgggctgggccgtgatcaccgacgagtacaaggtgccctccaagaagttcaaggtgctgggcaacaccgaccggcactccatcaagaagaacctgatcggcgccctgctgttcgactccggcgagaccgccgaggccacccggctgaagcggaccgcccggcggcggtacacccggcggaagaaccggatctgctacctgcaggagatcttctccaacgagatggccaaggtggacgactccttcttccaccggctggaggagtccttcctggtggaggaggacaagaagcacgagcggcaccccatcttcggcaacatcgtggacgaggtggcctaccacgagaagtaccccaccatctaccacctgcggaagaagctggtggactccaccgacaaggccgacctgcggctgatctacctggccctggcccacatgatcaagttccggggccacttcctgatcgagggcgacctgaaccccgacaactccgacgtggacaagctgttcatccagctggtgcagacctacaaccagctgttcgaggagaaccccatcaacgcctccggcgtggacgccaaggccatcctgtccgcccggctgtccaagtcccggcggctggagaacctgatcgcccagctgcccggcgagaagaagaacggcctgttcggcaacctgatcgccctgtccctgggcctgacccccaacttcaagtccaacttcgacctggccgaggacgccaagctgcagctgtccaaggacacctacgacgacgacctggacaacctgctggcccagatcggcgaccagtacgccgacctgttcctggccgccaagaacctgtccgacgccatcctgctgtccgacatcctgcgggtgaacaccgagatcaccaaggcccccctgtccgcctccatgatcaagcggtacgacgagcaccaccaggacctgaccctgctgaaggccctggtgcggcagcagctgcccgagaagtacaaggagatcttcttcgaccagtccaagaacggctacgccggctacatcgacggcggcgcctcccaggaggagttctacaagttcatcaagcccatcctggagaagatggacggcaccgaggagctgctggtgaagctgaaccgggaggacctgctgcggaagcagcggaccttcgacaacggctccatcccccaccagatccacctgggcgagctgcacgccatcctgcggcggcaggaggacttctaccccttcctgaaggacaaccgggagaagatcgagaagatcctgaccttccggatcccctactacgtgggccccctggcccggggcaactcccggttcgcctggatgacccggaagtccgaggagaccatcaccccctggaacttcgaggaggtggtggacaagggcgcctccgcccagtccttcatcgagcggatgaccaacttcgacaagaacctgcccaacgagaaggtgctgcccaagcactccctgctgtacgagtacttcaccgtgtacaacgagctgaccaaggtgaagtacgtgaccgagggcatgcggaagcccgccttcctgtccggcgagcagaagaaggccatcgtggacctgctgttcaagaccaaccggaaggtgaccgtgaagcagctgaaggaggactacttcaagaagatcgagtgcttcgactccgtggagatctccggcgtggaggaccggttcaacgcctccctgggcacctaccacgacctgctgaagatcatcaaggacaaggacttcctggacaacgaggagaacgaggacatcctggaggacatcgtgctgaccctgaccctgttcgaggaccgggagatgatcgaggagcggctgaagacctacgcccacctgttcgacgacaaggtgatgaagcagctgaagcggcggcggtacaccggctggggccggctgtcccggaagctgatcaacggcatccgggacaagcagtccggcaagaccatcctggacttcctgaagtccgacggcttcgccaaccggaacttcatgcagctgatccacgacgactccctgaccttcaaggaggacatccagaaggcccaggtgtccggccagggcgactccctgcacgagcacatcgccaacctggccggctcccccgccatcaagaagggcatcctgcagaccgtgaaggtggtggacgagctggtgaaggtgatgggccggcacaagcccgagaacatcgtgatcgagatggcccgggagaaccagaccacccagaagggccagaagaactcccgggagcggatgaagcggatcgaggagggcatcaaggagctgggctcccagatcctgaaggagcaccccgtggagaacacccagctgcagaacgagaagctgtacctgtactacctgcagaacggccgggacatgtacgtggaccaggagctggacatcaaccggctgtccgactacgacgtggacgccatcgtgccccagtccttcctgaaggacgactccatcgacaacaaggtgctgacccggtccgacaagaaccggggcaagtccgacaacgtgccctccgaggaggtggtgaagaagatgaagaactactggcggcagctgctgaacgccaagctgatcacccagcggaagttcgacaacctgaccaaggccgagcggggcggcctgtccgagctggacaaggccggcttcatcaagcggcagctggtggagacccggcagatcaccaagcacgtggcccagatcctggactcccggatgaacaccaagtacgacgagaacgacaagctgatccgggaggtgaaggtgatcaccctgaagtccaagctggtgtccgacttccggaaggacttccagttctacaaggtgcgggagatcaacaactaccaccacgcccacgacgcctacctgaacgccgtggtgggcaccgccctgatcaagaagtaccccaagctggagtccgagttcgtgtacggcgactacaaggtgtacgacgtgcggaagatgatcgccaagtccgagcaggagatcggcaaggccaccgccaagtacttcttctactccaacatcatgaacttcttcaagaccgagatcaccctggccaacggcgagatccggaagcggcccctgatcgagaccaacggcgagaccggcgagatcgtgtgggacaagggccgggacttcgccaccgtgcggaaggtgctgtccatgccccaggtgaacatcgtgaagaagaccgaggtgcagaccggcggcttctccaaggagtccatcctgcccaagcggaactccgacaagctgatcgcccggaagaaggactgggaccccaagaagtacggcggcttcgactcccccaccgtggcctactccgtgctggtggtggccaaggtggagaagggcaagtccaagaagctgaagtccgtgaaggagctgctgggcatcaccatcatggagcggtcctccttcgagaagaaccccatcgacttcctggaggccaagggctacaaggaggtgaagaaggacctgatcatcaagctgcccaagtactccctgttcgagctggagaacggccggaagcggatgctggcctccgccggcgagctgcagaagggcaacgagctggccctgccctccaagtacgtgaacttcctgtacctggcctcccactacgagaagctgaagggctcccccgaggacaacgagcagaagcagctgttcgtggagcagcacaagcactacctggacgagatcatcgagcagatctccgagttctccaagcgggtgatcctggccgacgccaacctggacaaggtgctgtccgcctacaacaagcaccgggacaagcccatccgggagcaggccgagaacatcatccacctgttcaccctgaccaacctgggcgcccccgccgccttcaagtacttcgacaccaccatcgaccggaagcggtacacctccaccaaggaggtgctggacgccaccctgatccaccagtccatcaccggcctgtacgagacccggatcgacctgtcccagctgggcggcgactccggcggctcctccggcggctccaagcggaccgccgacggctccgagttcgagtcccccaagaagaagcggaaggtgtccggcggctcctccggcggctccatggactccaccaaggagaagtgcgactcctacaaggacgacctgctgctgcggatgggcctgaacgacaacaaggccggcatggagggcctggacaaggagaagatcaacaagatcatcatggaggccaccaagggctcccggttctacggcaacgagctgaagaaggagaagcaggtgaaccagcggatcgagaacatgatgcagcagaaggcccagatcacctcccagcagctgcggaaggcccagctgcaggtggaccggttcgccatggagctggagcagtcccggaacctgtccaacaccatcgtgcacatcgacatggacgccttctacgccgccgtggagatgcgggacaaccccgagctgaaggacaagcccatcgccgtgggctccatgtccatgctgtccacctccaactaccacgcccggcggttcggcgtgcgggccgccatgcccggcttcatcgccaagcggctgtgcccccagctgatcatcgtgccccccaacttcgacaagtaccgggccgtgtccaaggaggtgaaggagatcctggccgactacgaccccaacttcatggccatgtccctggacgaggcctacctgaacatcaccaagcacctggaggagcggcagaactggcccgaggacaagcggcggtacttcatcaagatgggctcctccgtggagaacgacaaccccggcaaggaggtgaacaagctgtccgagcacgagcggtccatctcccccctgctgttcgaggagtccccctccgacgtgcagccccccggcgaccccttccaggtgaacttcgaggagcagaacaacccccagatcctgcagaactccgtggtgttcggcacctccgcccaggaggtggtgaaggagatccggttccggatcgagcagaagaccaccctgaccgcctccgccggcatcgcccccaacaccatgctggccaaggtgtgctccgacaagaacaagcccaacggccagtaccagatcctgcccaaccggcaggccgtgatggacttcatcaaggacctgcccatccggaaggtgtccggcatcggcaaggtgaccgagaagatgctgaaggccctgggcatcatcacctgcaccgagctgtaccagcagcgggccctgctgtccctgctgttctccgagacctcctggcactacttcctgcacatctccctgggcctgggctccacccacctgacccgggacggcgagcggaagtccatgtccgtggagcggaccttctccgagatcaacaaggccgaggagcagtactccctgtgccaggagctgtgctccgagctggcccaggacctgcagaaggagcggctgaagggccggaccgtgaccatcaagctgaagaacgtgaacttcgaggtgaagacccgggcctccaccgtgtcctccgtggtgtccaccgccgaggagatcttcgccatcgccaaggagctgctgaagaccgagatcgacgccgacttcccccaccccctgcggctgggcctgatgggcgtgcggatctcctccttccccaacgaggaggaccggaagcaccagcagcggtccatcatcggcttcctgcaggccggcaaccaggccctgtccgccaccgagtgcaccctggagaagaccgacaaggacaagttcgtgaagcccctggagatgtcccacaagaagtccttcttcgacaagaagcggtccgagcggaagtggtcccaccaggacaccttcaagtgcgaggccgtgaacaagcagtccttccagacctcccagcccttccaggtgctgaagaagaagatgaacgagaacctggagatctccgagaactccgacgactgccagatcctgacctgccccgtgtgcttccgggcccagggctgcatctccctggaggccctgaacaagcacgtggacgagtgcctggacggcccctccatctccgagaacttcaagatgttctcctgctcccacgtgtccgccaccaaggtgaacaagaaggagaacgtgcccgcctcctccctgtgcgagaagcaggactacgaggcccaccccaagatcaaggagatctcctccgtggactgcatcgccctggtggacaccatcgacaactcctccaaggccgagtccatcgacgccctgtccaacaagcactccaaggaggagtgctcctccctgccctccaagtccttcaacatcgagcactgccaccagaactcctcctccaccgtgtccctggagaacgaggacgtgggctccttccggcaggagtaccggcagccctacctgtgcgaggtgaagaccggccaggccctggtgtgccccgtgtgcaacgtggagcagaagacctccgacctgaccctgttcaacgtgcacgtggacgtgtgcctgaacaagtccttcatccaggagctgcggaaggacaagttcaaccccgtgaaccagcccaaggagtcctcccggtccaccggctcctcctccggcgtgcagaaggccgtgacccggaccaagcggcccggcctgatgaccaagtactccacctccaagaagatcaagcccaacaaccccaagcacaccctggacatcttcttcaagtagctagcaccagcctcaagaacacccgaatggagtctctaagctacataataccaacttacactttacaaaatgttgtcccccaaaatgtagccattcgtatctgctcctaataaaaagaaagtttcttcacattctctcgagaaaaaaaaaaaatggaaaaaaaaaaaacggaaaaaaaaaaaaggtaaaaaaaaaaaatataaaaaaaaaaaacataaaaaaaaaaaacgaaaaaaaaaaaacgtaaaaaaaaaaaactcaaaaaaaaaaaagataaaaaaaaaaaacctaaaaaaaaaaaatgtaaaaaaaaaaaagggaaaaaaaaaaaacgcaaaaaaaaaaaacacaaaaaaaaaaaatgcaaaaaaaaaaaatcgaaaaaaaaaaaatctaaaaaaaaaaaacgaaaaaaaaaaaacccaaaaaaaaaaaagacaaaaaaaaaaaatagaaaaaaaaaaagttaaaaaaaaaaaactgaaaaaaaaaaaatttaaaaaaaaaaaatctag

SEQ ID NO: 1035 - RNA, 6873 nt, synthetic construct
  misc_feature 1..6873: note = Synthetic
  source 1..6873: mol_type = other RNA
atgaagcggaccgccgacggctccgagttcgagtcccccaagaagaagcggaaggtggacaagaagtactccatcggcctggacatcggcaccaactccgtgggctgggccgtgatcaccgacgagtacaaggtgccctccaagaagttcaaggtgctgggcaacaccgaccggcactccatcaagaagaacctgatcggcgccctgctgttcgactccggcgagaccgccgaggccacccggctgaagcggaccgcccggcggcggtacacccggcggaagaaccggatctgctacctgcaggagatcttctccaacgagatggccaaggtggacgactccttcttccaccggctggaggagtccttcctggtggaggaggacaagaagcacgagcggcaccccatcttcggcaacatcgtggacgaggtggcctaccacgagaagtaccccaccatctaccacctgcggaagaagctggtggactccaccgacaaggccgacctgcggctgatctacctggccctggcccacatgatcaagttccggggccacttcctgatcgagggcgacctgaaccccgacaactccgacgtggacaagctgttcatccagctggtgcagacctacaaccagctgttcgaggagaaccccatcaacgcctccggcgtggacgccaaggccatcctgtccgcccggctgtccaagtcccggcggctggagaacctgatcgcccagctgcccggcgagaagaagaacggcctgttcggcaacctgatcgccctgtccctgggcctgacccccaacttcaagtccaacttcgacctggccgaggacgccaagctgcagctgtccaaggacacctacgacgacgacctggacaacctgctggcccagatcggcgaccagtacgccgacctgttcctggccgccaagaacctgtccgacgccatcctgctgtccgacatcctgcgggtgaacaccgagatcaccaaggcccccctgtccgcctccatgatcaagcggtacgacgagcaccaccaggacctgaccctgctgaaggccctggtgcggcagcagctgcccgagaagtacaaggagatcttcttcgaccagtccaagaacggctacgccggctacatcgacggcggcgcctcccaggaggagttctacaagttcatcaagcccatcctggagaagatggacggcaccgaggagctgctggtgaagctgaaccgggaggacctgctgcggaagcagcggaccttcgacaacggctccatcccccaccagatccacctgggcgagctgcacgccatcctgcggcggcaggaggacttctaccccttcctgaaggacaaccgggagaagatcgagaagatcctgaccttccggatcccctactacgtgggccccctggcccggggcaactcccggttcgcctggatgacccggaagtccgaggagaccatcaccccctggaacttcgaggaggtggtggacaagggcgcctccgcccagtccttcatcgagcggatgaccaacttcgacaagaacctgcccaacgagaaggtgctgcccaagcactccctgctgtacgagtacttcaccgtgtacaacgagctgaccaaggtgaagtacgtgaccgagggcatgcggaagcccgccttcctgtccggcgagcagaagaaggccatcgtggacctgctgttcaagaccaaccggaaggtgaccgtgaagcagctgaaggaggactacttcaagaagatcgagtgcttcgactccgtggagatctccggcgtggaggaccggttcaacgcctccctgggcacctaccacgacctgctgaagatcatcaaggacaaggacttcctggacaacgaggagaacgaggacatcctggaggacatcgtgctgaccctgaccctgttcgaggaccgggagatgatcgaggagcggctgaagacctacgcccacctgttcgacgacaaggtgatgaagcagctgaagcggcggcggtacaccggctggggccggctgtcccggaagctgatcaacggcatccgggacaagcagtccggcaagaccatcctggacttcctgaagtccgacggcttcgccaaccggaacttcatgcagctgatccacgacgactccctgaccttcaaggaggacatccagaaggcccaggtgtccggccagggcgactccctgcacgagcacatcgccaacctggccggctcccccgccatcaagaagggcatcctgcagaccgtgaaggtggtggacgagctggtgaaggtgatgggccggcacaagcccgagaacatcgtgatcgagatggcccgggagaaccagaccacccagaagggccagaagaactcccgggagcggatgaagcggatcgaggagggcatcaaggagctgggctcccagatcctgaaggagcaccccgtggagaacacccagctgcagaacgagaagctgtacctgtactacctgcagaacggccgggacatgtacgtggaccaggagctggacatcaaccggctgtccgactacgacgtggacgccatcgtgccccagtccttcctgaaggacgactccatcgacaacaaggtgctgacccggtccgacaagaaccggggcaagtccgacaacgtgccctccgaggaggtggtgaagaagatgaagaactactggcggcagctgctgaacgccaagctgatcacccagcggaagttcgacaacctgaccaaggccgagcggggcggcctgtccgagctggacaaggccggcttcatcaagcggcagctggtggagacccggcagatcaccaagcacgtggcccagatcctggactcccggatgaacaccaagtacgacgagaacgacaagctgatccgggaggtgaaggtgatcaccctgaagtccaagctggtgtccgacttccggaaggacttccagttctacaaggtgcgggagatcaacaactaccaccacgcccacgacgcctacctgaacgccgtggtgggcaccgccctgatcaagaagtaccccaagctggagtccgagttcgtgtacggcgactacaaggtgtacgacgtgcggaagatgatcgccaagtccgagcaggagatcggcaaggccaccgccaagtacttcttctactccaacatcatgaacttcttcaagaccgagatcaccctggccaacggcgagatccggaagcggcccctgatcgagaccaacggcgagaccggcgagatcgtgtgggacaagggccgggacttcgccaccgtgcggaaggtgctgtccatgccccaggtgaacatcgtgaagaagaccgaggtgcagaccggcggcttctccaaggagtccatcctgcccaagcggaactccgacaagctgatcgcccggaagaaggactgggaccccaagaagtacggcggcttcgactcccccaccgtggcctactccgtgctggtggtggccaaggtggagaagggcaagtccaagaagctgaagtccgtgaaggagctgctgggcatcaccatcatggagcggtcctccttcgagaagaaccccatcgacttcctggaggccaagggctacaaggaggtgaagaaggacctgatcatcaagctgcccaagtactccctgttcgagctggagaacggccggaagcggatgctggcctccgccggcgagctgcagaagggcaacgagctggccctgccctccaagtacgtgaacttcctgtacctggcctcccactacgagaagctgaagggctcccccgaggacaacgagcagaagcagctgttcgtggagcagcacaagcactacctggacgagatcatcgagcagatctccgagttctccaagcgggtgatcctggccgacgccaacctggacaaggtgctgtccgcctacaacaagcaccgggacaagcccatccgggagcaggccgagaacatcatccacctgttcaccctgaccaacctgggcgcccccgccgccttcaagtacttcgacaccaccatcgaccggaagcggtacacctccaccaaggaggtgctggacgccaccctgatccaccagtccatcaccggcctgtacgagacccggatcgacctgtcccagctgggcggcgactccggcggctcctccggcggctccaagcggaccgccgacggctccgagttcgagtcccccaagaagaagcggaaggtgtccggcggctcctccggcggctccatggactccaccaaggagaagtgcgactcctacaaggacgacctgctgctgcggatgggcctgaacgacaacaaggccggcatggagggcctggacaaggagaagatcaacaagatcatcatggaggccaccaagggctcccggttctacggcaacgagctgaagaaggagaagcaggtgaaccagcggatcgagaacatgatgcagcagaaggcccagatcacctcccagcagctgcggaaggcccagctgcaggtggaccggttcgccatggagctggagcagtcccggaacctgtccaacaccatcgtgcacatcgacatggacgccttctacgccgccgtggagatgcgggacaaccccgagctgaaggacaagcccatcgccgtgggctccatgtccatgctgtccacctccaactaccacgcccggcggttcggcgtgcgggccgccatgcccggcttcatcgccaagcggctgtgcccccagctgatcatcgtgccccccaacttcgacaagtaccgggccgtgtccaaggaggtgaaggagatcctggccgactacgaccccaacttcatggccatgtccctggacgaggcctacctgaacatcaccaagcacctggaggagcggcagaactggcccgaggacaagcggcggtacttcatcaagatgggctcctccgtggagaacgacaaccccggcaaggaggtgaacaagctgtccgagcacgagcggtccatctcccccctgctgttcgaggagtccccctccgacgtgcagccccccggcgaccccttccaggtgaacttcgaggagcagaacaacccccagatcctgcagaactccgtggtgttcggcacctccgcccaggaggtggtgaaggagatccggttccggatcgagcagaagaccaccctgaccgcctccgccggcatcgcccccaacaccatgctggccaaggtgtgctccgacaagaacaagcccaacggccagtaccagatcctgcccaaccggcaggccgtgatggacttcatcaaggacctgcccatccggaaggtgtccggcatcggcaaggtgaccgagaagatgctgaaggccctgggcatcatcacctgcaccgagctgtaccagcagcgggccctgctgtccctgctgttctccgagacctcctggcactacttcctgcacatctccctgggcctgggctccacccacctgacccgggacggcgagcggaagtccatgtccgtggagcggaccttctccgagatcaacaaggccgaggagcagtactccctgtgccaggagctgtgctccgagctggcccaggacctgcagaaggagcggctgaagggccggaccgtgaccatcaagctgaagaacgtgaacttcgaggtgaagacccgggcctccaccgtgtcctccgtggtgtccaccgccgaggagatcttcgccatcgccaaggagctgctgaagaccgagatcgacgccgacttcccccaccccctgcggctgggcctgatgggcgtgcggatctcctccttccccaacgaggaggaccggaagcaccagcagcggtccatcatcggcttcctgcaggccggcaaccaggccctgtccgccaccgagtgcaccctggagaagaccgacaaggacaagttcgtgaagcccctggagatgtcccacaagaagtccttcttcgacaagaagcggtccgagcggaagtggtcccaccaggacaccttcaagtgcgaggccgtgaacaagcagtccttccagacctcccagcccttccaggtgctgaagaagaagatgaacgagaacctggagatctccgagaactccgacgactgccagatcctgacctgccccgtgtgcttccgggcccagggctgcatctccctggaggccctgaacaagcacgtggacgagtgcctggacggcccctccatctccgagaacttcaagatgttctcctgctcccacgtgtccgccaccaaggtgaacaagaaggagaacgtgcccgcctcctccctgtgcgagaagcaggactacgaggcccaccccaagatcaaggagatctcctccgtggactgcatcgccctggtggacaccatcgacaactcctccaaggccgagtccatcgacgccctgtccaacaagcactccaaggaggagtgctcctccctgccctccaagtccttcaacatcgagcactgccaccagaactcctcctccaccgtgtccctggagaacgaggacgtgggctccttccggcaggagtaccggcagccctacctgtgcgaggtgaagaccggccaggccctggtgtgccccgtgtgcaacgtggagcagaagacctccgacctgaccctgttcaacgtgcacgtggacgtgtgcctgaacaagtccttcatccaggagctgcggaaggacaagttcaaccccgtgaaccagcccaaggagtcctcccggtccaccggctcctcctccggcgtgcagaaggccgtgacccggaccaagcggcccggcctgatgaccaagtactccacctccaagaagatcaagcccaacaaccccaagcacaccctggacatcttcttcaagtag

SEQ ID NO: 1036 - protein, 2290 aa, synthetic construct
  REGION 1..2290: note = Synthetic
MKRTADGSEFESPKKKRKVDKKYSIGLDIGTNSVGWAVITDEYKVPSKKFKVLGNTDRHSIKKNLIGALLFDSGETAEATRLKRTARRRYTRRKNRICYLQEIFSNEMAKVDDSFFHRLEESFLVEEDKKHERHPIFGNIVDEVAYHEKYPTIYHLRKKLVDSTDKADLRLIYLALAHMIKFRGHFLIEGDLNPDNSDVDKLFIQLVQTYNQLFEENPINASGVDAKAILSARLSKSRRLENLIAQLPGEKKNGLFGNLIALSLGLTPNFKSNFDLAEDAKLQLSKDTYDDDLDNLLAQIGDQYADLFLAAKNLSDAILLSDILRVNTEITKAPLSASMIKRYDEHHQDLTLLKALVRQQLPEKYKEIFFDQSKNGYAGYIDGGASQEEFYKFIKPILEKMDGTEELLVKLNREDLLRKQRTFDNGSIPHQIHLGELHAILRRQEDFYPFLKDNREKIEKILTFRIPYYVGPLARGNSRFAWMTRKSEETITPWNFEEVVDKGASAQSFIERMTNFDKNLPNEKVLPKHSLLYEYFTVYNELTKVKYVTEGMRKPAFLSGEQKKAIVDLLFKTNRKVTVKQLKEDYFKKIECFDSVEISGVEDRFNASLGTYHDLLKIIKDKDFLDNEENEDILEDIVLTLTLFEDREMIEERLKTYAHLFDDKVMKQLKRRRYTGWGRLSRKLINGIRDKQSGKTILDFLKSDGFANRNFMQLIHDDSLTFKEDIQKAQVSGQGDSLHEHIANLAGSPAIKKGILQTVKVVDELVKVMGRHKPENIVIEMARENQTTQKGQKNSRERMKRIEEGIKELGSQILKEHPVENTQLQNEKLYLYYLQNGRDMYVDQELDINRLSDYDVDAIVPQSFLKDDSIDNKVLTRSDKNRGKSDNVPSEEVVKKMKNYWRQLLNAKLITQRKFDNLTKAERGGLSELDKAGFIKRQLVETRQITKHVAQILDSRMNTKYDENDKLIREVKVITLKSKLVSDFRKDFQFYKVREINNYHHAHDAYLNAVVGTALIKKYPKLESEFVYGDYKVYDVRKMIAKSEQEIGKATAKYFFYSNIMNFFKTEITLANGEIRKRPLIETNGETGEIVWDKGRDFATVRKVLSMPQVNIVKKTEVQTGGFSKESILPKRNSDKLIARKKDWDPKKYGGFDSPTVAYSVLVVAKVEKGKSKKLKSVKELLGITIMERSSFEKNPIDFLEAKGYKEVKKDLIIKLPKYSLFELENGRKRMLASAGELQKGNELALPSKYVNFLYLASHYEKLKGSPEDNEQKQLFVEQHKHYLDEIIEQISEFSKRVILADANLDKVLSAYNKHRDKPIREQAENIIHLFTLTNLGAPAAFKYFDTTIDRKRYTSTKEVLDATLIHQSITGLYETRIDLSQLGGDSGGSSGGSKRTADGSEFESPKKKRKVSGGSSGGSMDSTKEKCDSYKDDLLLRMGLNDNKAGMEGLDKEKINKIIMEATKGSRFYGNELKKEKQVNQRIENMMQQKAQITSQQLRKAQLQVDRFAMELEQSRNLSNTIVHIDMDAFYAAVEMRDNPELKDKPIAVGSMSMLSTSNYHARRFGVRAAMPGFIAKRLCPQLIIVPPNFDKYRAVSKEVKEILADYDPNFMAMSLDEAYLNITKHLEERQNWPEDKRRYFIKMGSSVENDNPGKEVNKLSEHERSISPLLFEESPSDVQPPGDPFQVNFEEQNNPQILQNSVVFGTSAQEVVKEIRFRIEQKTTLTASAGIAPNTMLAKVCSDKNKPNGQYQILPNRQAVMDFIKDLPIRKVSGIGKVTEKMLKALGIITCTELYQQRALLSLLFSETSWHYFLHISLGLGSTHLTRDGERKSMSVERTFSEINKAEEQYSLCQELCSELAQDLQKERLKGRTVTIKLKNVNFEVKTRASTVSSVVSTAEEIFAIAKELLKTEIDADFPHPLRLGLMGVRISSFPNEEDRKHQQRSIIGFLQAGNQALSATECTLEKTDKDKFVKPLEMSHKKSFFDKKRSERKWSHQDTFKCEAVNKQSFQTSQPFQVLKKKMNENLEISENSDDCQILTCPVCFRAQGCISLEALNKHVDECLDGPSISENFKMFSCSHVSATKVNKKENVPASSLCEKQDYEAHPKIKEISSVDCIALVDTIDNSSKAESIDALSNKHSKEECSSLPSKSFNIEHCHQNSSSTVSLENEDVGSFRQEYRQPYLCEVKTGQALVCPVCNVEQKTSDLTLFNVHVDVCLNKSFIQELRKDKFNPVNQPKESSRSTGSSSGVQKAVTRTKRPGLMTKYSTSKKIKPNNPKHTLDIFFK

SEQ ID NO: 1037 - RNA, 6346 nt, synthetic construct
  misc_feature 1..6346: note = Synthetic
  source 1..6346: mol_type = other RNA
gggaagctcagaataaacgctcaactttggccggatctgccaccatgaagcggaccgccgacggctccgagttcgagtcccccaagaagaagcggaaggtggacaagaagtactccatcggcctggacatcggcaccaactccgtgggctgggccgtgatcaccgacgagtacaaggtgccctccaagaagttcaaggtgctgggcaacaccgaccggcactccatcaagaagaacctgatcggcgccctgctgttcgactccggcgagaccgccgaggccacccggctgaagcggaccgcccggcggcggtacacccggcggaagaaccggatctgctacctgcaggagatcttctccaacgagatggccaaggtggacgactccttcttccaccggctggaggagtccttcctggtggaggaggacaagaagcacgagcggcaccccatcttcggcaacatcgtggacgaggtggcctaccacgagaagtaccccaccatctaccacctgcggaagaagctggtggactccaccgacaaggccgacctgcggctgatctacctggccctggcccacatgatcaagttccggggccacttcctgatcgagggcgacctgaaccccgacaactccgacgtggacaagctgttcatccagctggtgcagacctacaaccagctgttcgaggagaaccccatcaacgcctccggcgtggacgccaaggccatcctgtccgcccggctgtccaagtcccggcggctggagaacctgatcgcccagctgcccggcgagaagaagaacggcctgttcggcaacctgatcgccctgtccctgggcctgacccccaacttcaagtccaacttcgacctggccgaggacgccaagctgcagctgtccaaggacacctacgacgacgacctggacaacctgctggcccagatcggcgaccagtacgccgacctgttcctggccgccaagaacctgtccgacgccatcctgctgtccgacatcctgcgggtgaacaccgagatcaccaaggcccccctgtccgcctccatgatcaagcggtacgacgagcaccaccaggacctgaccctgctgaaggccctggtgcggcagcagctgcccgagaagtacaaggagatcttcttcgaccagtccaagaacggctacgccggctacatcgacggcggcgcctcccaggaggagttctacaagttcatcaagcccatcctggagaagatggacggcaccgaggagctgctggtgaagctgaaccgggaggacctgctgcggaagcagcggaccttcgacaacggctccatcccccaccagatccacctgggcgagctgcacgccatcctgcggcggcaggaggacttctaccccttcctgaaggacaaccgggagaagatcgagaagatcctgaccttccggatcccctactacgtgggccccctggcccggggcaactcccggttcgcctggatgacccggaagtccgaggagaccatcaccccctggaacttcgaggaggtggtggacaagggcgcctccgcccagtccttcatcgagcggatgaccaacttcgacaagaacctgcccaacgagaaggtgctgcccaagcactccctgctgtacgagtacttcaccgtgtacaacgagctgaccaaggtgaagtacgtgaccgagggcatgcggaagcccgccttcctgtccggcgagcagaagaaggccatcgtggacctgctgttcaagaccaaccggaaggtgaccgtgaagcagctgaaggaggactacttcaagaagatcgagtgcttcgactccgtggagatctccggcgtggaggaccggttcaacgcctccctgggcacctaccacgacctgctgaagatcatcaaggacaaggacttcctggacaacgaggagaacgaggacatcctggaggacatcgtgctgaccctgaccctgttcgaggaccgggagatgatcgaggagcggctgaagacctacgcccacctgttcgacgacaaggtgatgaagcagctgaagcggcggcggtacaccggctggggccggctgtcccggaagctgatcaacggcatccgggacaagcagtccggcaagaccatcctggacttcctgaagtccgacggcttcgccaaccggaacttcatgcagctgatccacgacgactccctgaccttcaaggaggacatccagaaggcccaggtgtccggccagggcgactccctgcacgagcacatcgccaacctggccggctcccccgccatcaagaagggcatcctgcagaccgtgaaggtggtggacgagctggtgaaggtgatgggccggcacaagcccgagaacatcgtgatcgagatggcccgggagaaccagaccacccagaagggccagaagaactcccgggagcggatgaagcggatcgaggagggcatcaaggagctgggctcccagatcctgaaggagcaccccgtggagaacacccagctgcagaacgagaagctgtacctgtactacctgcagaacggccgggacatgtacgtggaccaggagctggacatcaaccggctgtccgactacgacgtggacgccatcgtgccccagtccttcctgaaggacgactccatcgacaacaaggtgctgacccggtccgacaagaaccggggcaagtccgacaacgtgccctccgaggaggtggtgaagaagatgaagaactactggcggcagctgctgaacgccaagctgatcacccagcggaagttcgacaacctgaccaaggccgagcggggcggcctgtccgagctggacaaggccggcttcatcaagcggcagctggtggagacccggcagatcaccaagcacgtggcccagatcctggactcccggatgaacaccaagtacgacgagaacgacaagctgatccgggaggtgaaggtgatcaccctgaagtccaagctggtgtccgacttccggaaggacttccagttctacaaggtgcgggagatcaacaactaccaccacgcccacgacgcctacctgaacgccgtggtgggcaccgccctgatcaagaagtaccccaagctggagtccgagttcgtgtacggcgactacaaggtgtacgacgtgcggaagatgatcgccaagtccgagcaggagatcggcaaggccaccgccaagtacttcttctactccaacatcatgaacttcttcaagaccgagatcaccctggccaacggcgagatccggaagcggcccctgatcgagaccaacggcgagaccggcgagatcgtgtgggacaagggccgggacttcgccaccgtgcggaaggtgctgtccatgccccaggtgaacatcgtgaagaagaccgaggtgcagaccggcggcttctccaaggagtccatcctgcccaagcggaactccgacaagctgatcgcccggaagaaggactgggaccccaagaagtacggcggcttcgactcccccaccgtggcctactccgtgctggtggtggccaaggtggagaagggcaagtccaagaagctgaagtccgtgaaggagctgctgggcatcaccatcatggagcggtcctccttcgagaagaaccccatcgacttcctggaggccaagggctacaaggaggtgaagaaggacctgatcatcaagctgcccaagtactccctgttcgagctggagaacggccggaagcggatgctggcctccgccggcgagctgcagaagggcaacgagctggccctgccctccaagtacgtgaacttcctgtacctggcctcccactacgagaagctgaagggctcccccgaggacaacgagcagaagcagctgttcgtggagcagcacaagcactacctggacgagatcatcgagcagatctccgagttctccaagcgggtgatcctggccgacgccaacctggacaaggtgctgtccgcctacaacaagcaccgggacaagcccatccgggagcaggccgagaacatcatccacctgttcaccctgaccaacctgggcgcccccgccgccttcaagtacttcgacaccaccatcgaccggaagcggtacacctccaccaaggaggtgctggacgccaccctgatccaccagtccatcaccggcctgtacgagacccggatcgacctgtcccagctgggcggcgactccggcggctcctccggcggctccaagcggaccgccgacggctccgagttcgagtcccccaagaagaagcggaaggtgtccggcggctcctccggcggctccatgggcctgaacgacaacaaggccggcatggagggcctggacaaggagaagatcaacaagatcatcatggaggccaccaagggctcccggttctacggcaacgagctgaagaaggagaagcaggtgaaccagcggatcgagaacatgatgcagcagaaggcccagatcacctcccagcagctgcggaaggcccagctgcaggtggaccggttcgccatggagctggagcagtcccggaacctgtccaacaccatcgtgcacatcgacatggacgccttctacgccgccgtggagatgcgggacaaccccgagctgaaggacaagcccatcgccgtgggctccatgtccatgctgtccacctccaactaccacgcccggcggttcggcgtgcgggccgccatgcccggcttcatcgccaagcggctgtgcccccagctgatcatcgtgccccccaacttcgacaagtaccgggccgtgtccaaggaggtgaaggagatcctggccgactacgaccccaacttcatggccatgtccctggacgaggcctacctgaacatcaccaagcacctggaggagcggcagaactggcccgaggacaagcggcggtacttcatcaagatgggctcctccgtggagaacgacaaccccggcaaggaggtgaacaagctgtccgagcacgagcggtccatctcccccctgctgttcgaggagtccccctccgacgtgcagccccccggcgaccccttccaggtgaacttcgaggagcagaacaacccccagatcctgcagaactccgtggtgttcggcacctccgcccaggaggtggtgaaggagatccggttccggatcgagcagaagaccaccctgaccgcctccgccggcatcgcccccaacaccatgctggccaaggtgtgctccgacaagaacaagcccaacggccagtaccagatcctgcccaaccggcaggccgtgatggacttcatcaaggacctgcccatccggaaggtgtccggcatcggcaaggtgaccgagaagatgctgaaggccctgggcatcatcacctgcaccgagctgtaccagcagcgggccctgctgtccctgctgttctccgagacctcctggcactacttcctgcacatctccctgggcctgggctccacccacctgacccgggacggcgagcggaagtccatgtccgtggagcggaccttctccgagatcaacaaggccgaggagcagtactccctgtgccaggagctgtgctccgagctggcccaggacctgcagaaggagcggctgaagggccggaccgtgaccatcaagctgaagaacgtgaacttcgaggtgaagacccgggcctccaccgtgtcctccgtggtgtccaccgccgaggagatcttcgccatcgccaaggagctgctgaagaccgagatcgacgccgacttcccccaccccctgcggctgcggctgatgggcgtgcggatctcctccttccccaacgaggaggaccggaagcaccagcagtagctagcaccagcctcaagaacacccgaatggagtctctaagctacataataccaacttacactttacaaaatgttgtcccccaaaatgtagccattcgtatctgctcctaataaaaagaaagtttcttcacattctctcgagaaaaaaaaaaaatggaaaaaaaaaaaacggaaaaaaaaaaaaggtaaaaaaaaaaaatataaaaaaaaaaaacataaaaaaaaaaaacgaaaaaaaaaaaacgtaaaaaaaaaaaactcaaaaaaaaaaaagataaaaaaaaaaaacctaaaaaaaaaaaatgtaaaaaaaaaaaagggaaaaaaaaaaaacgcaaaaaaaaaaaacacaaaaaaaaaaaatgcaaaaaaaaaaaatcgaaaaaaaaaaaatctaaaaaaaaaaaacgaaaaaaaaaaaacccaaaaaaaaaaaagacaaaaaaaaaaaatagaaaaaaaaaaagttaaaaaaaaaaaactgaaaaaaaaaaaatttaaaaaaaaaaaatctag

SEQ ID NO: 1038 - RNA, 5787 nt, synthetic construct
  misc_feature 1..5787: note = Synthetic
  source 1..5787: mol_type = other RNA
atgaagcggaccgccgacggctccgagttcgagtcccccaagaagaagcggaaggtggacaagaagtactccatcggcctggacatcggcaccaactccgtgggctgggccgtgatcaccgacgagtacaaggtgccctccaagaagttcaaggtgctgggcaacaccgaccggcactccatcaagaagaacctgatcggcgccctgctgttcgactccggcgagaccgccgaggccacccggctgaagcggaccgcccggcggcggtacacccggcggaagaaccggatctgctacctgcaggagatcttctccaacgagatggccaaggtggacgactccttcttccaccggctggaggagtccttcctggtggaggaggacaagaagcacgagcggcaccccatcttcggcaacatcgtggacgaggtggcctaccacgagaagtaccccaccatctaccacctgcggaagaagctggtggactccaccgacaaggccgacctgcggctgatctacctggccctggcccacatgatcaagttccggggccacttcctgatcgagggcgacctgaaccccgacaactccgacgtggacaagctgttcatccagctggtgcagacctacaaccagctgttcgaggagaaccccatcaacgcctccggcgtggacgccaaggccatcctgtccgcccggctgtccaagtcccggcggctggagaacctgatcgcccagctgcccggcgagaagaagaacggcctgttcggcaacctgatcgccctgtccctgggcctgacccccaacttcaagtccaacttcgacctggccgaggacgccaagctgcagctgtccaaggacacctacgacgacgacctggacaacctgctggcccagatcggcgaccagtacgccgacctgttcctggccgccaagaacctgtccgacgccatcctgctgtccgacatcctgcgggtgaacaccgagatcaccaaggcccccctgtccgcctccatgatcaagcggtacgacgagcaccaccaggacctgaccctgctgaaggccctggtgcggcagcagctgcccgagaagtacaaggagatcttcttcgaccagtccaagaacggctacgccggctacatcgacggcggcgcctcccaggaggagttctacaagttcatcaagcccatcctggagaagatggacggcaccgaggagctgctggtgaagctgaaccgggaggacctgctgcggaagcagcggaccttcgacaacggctccatcccccaccagatccacctgggcgagctgcacgccatcctgcggcggcaggaggacttctaccccttcctgaaggacaaccgggagaagatcgagaagatcctgaccttccggatcccctactacgtgggccccctggcccggggcaactcccggttcgcctggatgacccggaagtccgaggagaccatcaccccctggaacttcgaggaggtggtggacaagggcgcctccgcccagtccttcatcgagcggatgaccaacttcgacaagaacctgcccaacgagaaggtgctgcccaagcactccctgctgtacgagtacttcaccgtgtacaacgagctgaccaaggtgaagtacgtgaccgagggcatgcggaagcccgccttcctgtccggcgagcagaagaaggccatcgtggacctgctgttcaagaccaaccggaaggtgaccgtgaagcagctgaaggaggactacttcaagaagatcgagtgcttcgactccgtggagatctccggcgtggaggaccggttcaacgcctccctgggcacctaccacgacctgctgaagatcatcaaggacaaggacttcctggacaacgaggagaacgaggacatcctggaggacatcgtgctgaccctgaccctgttcgaggaccgggagatgatcgaggagcggctgaagacctacgcccacctgttcgacgacaaggtgatgaagcagctgaagcggcggcggtacaccggctggggccggctgtcccggaagctgatcaacggcatccgggacaagcagtccggcaagaccatcctggacttcctgaagtccgacggcttcgccaaccggaacttcatgcagctgatccacgacgactccctgaccttcaaggaggacatccagaaggcccaggtgtccggccagggcgactccctgcacgagcacatcgccaacctggccggctcccccgccatcaagaagggcatcctgcagaccgtgaaggtggtggacgagctggtgaaggtgatgggccggcacaagcccgagaacatcgtgatcgagatggcccgggagaaccagaccacccagaagggccagaagaactcccgggagcggatgaagcggatcgaggagggcatcaaggagctgggctcccagatcctgaaggagcaccccgtggagaacacccagctgcagaacgagaagctgtacctgtactacctgcagaacggccgggacatgtacgtggaccaggagctggacatcaaccggctgtccgactacgacgtggacgccatcgtgccccagtccttcctgaaggacgactccatcgacaacaaggtgctgacccggtccgacaagaaccggggcaagtccgacaacgtgccctccgaggaggtggtgaagaagatgaagaactactggcggcagctgctgaacgccaagctgatcacccagcggaagttcgacaacctgaccaaggccgagcggggcggcctgtccgagctggacaaggccggcttcatcaagcggcagctggtggagacccggcagatcaccaagcacgtggcccagatcctggactcccggatgaacaccaagtacgacgagaacgacaagctgatccgggaggtgaaggtgatcaccctgaagtccaagctggtgtccgacttccggaaggacttccagttctacaaggtgcgggagatcaacaactaccaccacgcccacgacgcctacctgaacgccgtggtgggcaccgccctgatcaagaagtaccccaagctggagtccgagttcgtgtacggcgactacaaggtgtacgacgtgcggaagatgatcgccaagtccgagcaggagatcggcaaggccaccgccaagtacttcttctactccaacatcatgaacttcttcaagaccgagatcaccctggccaacggcgagatccggaagcggcccctgatcgagaccaacggcgagaccggcgagatcgtgtgggacaagggccgggacttcgccaccgtgcggaaggtgctgtccatgccccaggtgaacatcgtgaagaagaccgaggtgcagaccggcggcttctccaaggagtccatcctgcccaagcggaactccgacaagctgatcgcccggaagaaggactgggaccccaagaagtacggcggcttcgactcccccaccgtggcctactccgtgctggtggtggccaaggtggagaagggcaagtccaagaagctgaagtccgtgaaggagctgctgggcatcaccatcatggagcggtcctccttcgagaagaaccccatcgacttcctggaggccaagggctacaaggaggtgaagaaggacctgatcatcaagctgcccaagtactccctgttcgagctggagaacggccggaagcggatgctggcctccgccggcgagctgcagaagggcaacgagctggccctgccctccaagtacgtgaacttcctgtacctggcctcccactacgagaagctgaagggctcccccgaggacaacgagcagaagcagctgttcgtggagcagcacaagcactacctggacgagatcatcgagcagatctccgagttctccaagcgggtgatcctggccgacgccaacctggacaaggtgctgtccgcctacaacaagcaccgggacaagcccatccgggagcaggccgagaacatcatccacctgttcaccctgaccaacctgggcgcccccgccgccttcaagtacttcgacaccaccatcgaccggaagcggtacacctccaccaaggaggtgctggacgccaccctgatccaccagtccatcaccggcctgtacgagacccggatcgacctgtcccagctgggcggcgactccggcggctcctccggcggctccaagcggaccgccgacggctccgagttcgagtcccccaagaagaagcggaaggtgtccggcggctcctccggcggctccatgggcctgaacgacaacaaggccggcatggagggcctggacaaggagaagatcaacaagatcatcatggaggccaccaagggctcccggttctacggcaacgagctgaagaaggagaagcaggtgaaccagcggatcgagaacatgatgcagcagaaggcccagatcacctcccagcagctgcggaaggcccagctgcaggtggaccggttcgccatggagctggagcagtcccggaacctgtccaacaccatcgtgcacatcgacatggacgccttctacgccgccgtggagatgcgggacaaccccgagctgaaggacaagcccatcgccgtgggctccatgtccatgctgtccacctccaactaccacgcccggcggttcggcgtgcgggccgccatgcccggcttcatcgccaagcggctgtgcccccagctgatcatcgtgccccccaacttcgacaagtaccgggccgtgtccaaggaggtgaaggagatcctggccgactacgaccccaacttcatggccatgtccctggacgaggcctacctgaacatcaccaagcacctggaggagcggcagaactggcccgaggacaagcggcggtacttcatcaagatgggctcctccgtggagaacgacaaccccggcaaggaggtgaacaagctgtccgagcacgagcggtccatctcccccctgctgttcgaggagtccccctccgacgtgcagccccccggcgaccccttccaggtgaacttcgaggagcagaacaacccccagatcctgcagaactccgtggtgttcggcacctccgcccaggaggtggtgaaggagatccggttccggatcgagcagaagaccaccctgaccgcctccgccggcatcgcccccaacaccatgctggccaaggtgtgctccgacaagaacaagcccaacggccagtaccagatcctgcccaaccggcaggccgtgatggacttcatcaaggacctgcccatccggaaggtgtccggcatcggcaaggtgaccgagaagatgctgaaggccctgggcatcatcacctgcaccgagctgtaccagcagcgggccctgctgtccctgctgttctccgagacctcctggcactacttcctgcacatctccctgggcctgggctccacccacctgacccgggacggcgagcggaagtccatgtccgtggagcggaccttctccgagatcaacaaggccgaggagcagtactccctgtgccaggagctgtgctccgagctggcccaggacctgcagaaggagcggctgaagggccggaccgtgaccatcaagctgaagaacgtgaacttcgaggtgaagacccgggcctccaccgtgtcctccgtggtgtccaccgccgaggagatcttcgccatcgccaaggagctgctgaagaccgagatcgacgccgacttcccccaccccctgcggctgcggctgatgggcgtgcggatctcctccttccccaacgaggaggaccggaagcaccagcagtag

SEQ ID NO: 1039 - protein, 1928 aa, synthetic construct
  REGION 1..1928: note = Synthetic
MKRTADGSEFESPKKKRKVDKKYSIGLDIGTNSVGWAVITDEYKVPSKKFKVLGNTDRHSIKKNLIGALLFDSGETAEATRLKRTARRRYTRRKNRICYLQEIFSNEMAKVDDSFFHRLEESFLVEEDKKHERHPIFGNIVDEVAYHEKYPTIYHLRKKLVDSTDKADLRLIYLALAHMIKFRGHFLIEGDLNPDNSDVDKLFIQLVQTYNQLFEENPINASGVDAKAILSARLSKSRRLENLIAQLPGEKKNGLFGNLIALSLGLTPNFKSNFDLAEDAKLQLSKDTYDDDLDNLLAQIGDQYADLFLAAKNLSDAILLSDILRVNTEITKAPLSASMIKRYDEHHQDLTLLKALVRQQLPEKYKEIFFDQSKNGYAGYIDGGASQEEFYKFIKPILEKMDGTEELLVKLNREDLLRKQRTFDNGSIPHQIHLGELHAILRRQEDFYPFLKDNREKIEKILTFRIPYYVGPLARGNSRFAWMTRKSEETITPWNFEEVVDKGASAQSFIERMTNFDKNLPNEKVLPKHSLLYEYFTVYNELTKVKYVTEGMRKPAFLSGEQKKAIVDLLFKTNRKVTVKQLKEDYFKKIECFDSVEISGVEDRFNASLGTYHDLLKIIKDKDFLDNEENEDILEDIVLTLTLFEDREMIEERLKTYAHLFDDKVMKQLKRRRYTGWGRLSRKLINGIRDKQSGKTILDFLKSDGFANRNFMQLIHDDSLTFKEDIQKAQVSGQGDSLHEHIANLAGSPAIKKGILQTVKVVDELVKVMGRHKPENIVIEMARENQTTQKGQKNSRERMKRIEEGIKELGSQILKEHPVENTQLQNEKLYLYYLQNGRDMYVDQELDINRLSDYDVDAIVPQSFLKDDSIDNKVLTRSDKNRGKSDNVPSEEVVKKMKNYWRQLLNAKLITQRKFDNLTKAERGGLSELDKAGFIKRQLVETRQITKHVAQILDSRMNTKYDENDKLIREVKVITLKSKLVSDFRKDFQFYKVREINNYHHAHDAYLNAVVGTALIKKYPKLESEFVYGDYKVYDVRKMIAKSEQEIGKATAKYFFYSNIMNFFKTEITLANGEIRKRPLIETNGETGEIVWDKGRDFATVRKVLSMPQVNIVKKTEVQTGGFSKESILPKRNSDKLIARKKDWDPKKYGGFDSPTVAYSVLVVAKVEKGKSKKLKSVKELLGITIMERSSFEKNPIDFLEAKGYKEVKKDLIIKLPKYSLFELENGRKRMLASAGELQKGNELALPSKYVNFLYLASHYEKLKGSPEDNEQKQLFVEQHKHYLDEIIEQISEFSKRVILADANLDKVLSAYNKHRDKPIREQAENIIHLFTLTNLGAPAAFKYFDTTIDRKRYTSTKEVLDATLIHQSITGLYETRIDLSQLGGDSGGSSGGSKRTADGSEFESPKKKRKVSGGSSGGSMGLNDNKAGMEGLDKEKINKIIMEATKGSRFYGNELKKEKQVNQRIENMMQQKAQITSQQLRKAQLQVDRFAMELEQSRNLSNTIVHIDMDAFYAAVEMRDNPELKDKPIAVGSMSMLSTSNYHARRFGVRAAMPGFIAKRLCPQLIIVPPNFDKYRAVSKEVKEILADYDPNFMAMSLDEAYLNITKHLEERQNWPEDKRRYFIKMGSSVENDNPGKEVNKLSEHERSISPLLFEESPSDVQPPGDPFQVNFEEQNNPQILQNSVVFGTSAQEVVKEIRFRIEQKTTLTASAGIAPNTMLAKVCSDKNKPNGQYQILPNRQAVMDFIKDLPIRKVSGIGKVTEKMLKALGIITCTELYQQRALLSLLFSETSWHYFLHISLGLGSTHLTRDGERKSMSVERTFSEINKAEEQYSLCQELCSELAQDLQKERLKGRTVTIKLKNVNFEVKTRASTVSSVVSTAEEIFAIAKELLKTEIDADFPHPLRLRLMGVRISSFPNEEDRKHQQ

SEQ ID NO: 1040 - RNA, 6355 nt, synthetic construct
  misc_feature 1..6355: note = Synthetic
  source 1..6355: mol_type = other RNA
gggaagctcagaataaacgctcaactttggccggatctgccaccatgggcctgaacgacaacaaggccggcatggagggcctggacaaggagaagatcaacaagatcatcatggaggccaccaagggctcccggttctacggcaacgagctgaagaaggagaagcaggtgaaccagcggatcgagaacatgatgcagcagaaggcccagatcacctcccagcagctgcggaaggcccagctgcaggtggaccggttcgccatggagctggagcagtcccggaacctgtccaacaccatcgtgcacatcgacatggacgccttctacgccgccgtggagatgcgggacaaccccgagctgaaggacaagcccatcgccgtgggctccatgtccatgctgtccacctccaactaccacgcccggcggttcggcgtgcgggccgccatgcccggcttcatcgccaagcggctgtgcccccagctgatcatcgtgccccccaacttcgacaagtaccgggccgtgtccaaggaggtgaaggagatcctggccgactacgaccccaacttcatggccatgtccctggacgaggcctacctgaacatcaccaagcacctggaggagcggcagaactggcccgaggacaagcggcggtacttcatcaagatgggctcctccgtggagaacgacaaccccggcaaggaggtgaacaagctgtccgagcacgagcggtccatctcccccctgctgttcgaggagtccccctccgacgtgcagccccccggcgaccccttccaggtgaacttcgaggagcagaacaacccccagatcctgcagaactccgtggtgttcggcacctccgcccaggaggtggtgaaggagatccggttccggatcgagcagaagaccaccctgaccgcctccgccggcatcgcccccaacaccatgctggccaaggtgtgctccgacaagaacaagcccaacggccagtaccagatcctgcccaaccggcaggccgtgatggacttcatcaaggacctgcccatccggaaggtgtccggcatcggcaaggtgaccgagaagatgctgaaggccctgggcatcatcacctgcaccgagctgtaccagcagcgggccctgctgtccctgctgttctccgagacctcctggcactacttcctgcacatctccctgggcctgggctccacccacctgacccgggacggcgagcggaagtccatgtccgtggagcggaccttctccgagatcaacaaggccgaggagcagtactccctgtgccaggagctgtgctccgagctggcccaggacctgcagaaggagcggctgaagggccggaccgtgaccatcaagctgaagaacgtgaacttcgaggtgaagacccgggcctccaccgtgtcctccgtggtgtccaccgccgaggagatcttcgccatcgccaaggagctgctgaagaccgagatcgacgccgacttcccccaccccctgcggctgcggctgatgggcgtgcggatctcctccttccccaacgaggaggaccggaagcaccagcagtccggcggctcctccggcggctccaagcggaccgccgacggctccgagttcgagtcccccaagaagaagcggaaggtgtccggcggctcctccggcggctccgacaagaagtactccatcggcctggacatcggcaccaactccgtgggctgggccgtgatcaccgacgagtacaaggtgccctccaagaagttcaaggtgctgggcaacaccgaccggcactccatcaagaagaacctgatcggcgccctgctgttcgactccggcgagaccgccgaggccacccggctgaagcggaccgcccggcggcggtacacccggcggaagaaccggatctgctacctgcaggagatcttctccaacgagatggccaaggtggacgactccttcttccaccggctggaggagtccttcctggtggaggaggacaagaagcacgagcggcaccccatcttcggcaacatcgtggacgaggtggcctaccacgagaagtaccccaccatctaccacctgcggaagaagctggtggactccaccgacaaggccgacctgcggctgatctacctggccctggcccacatgatcaagttccggggccacttcctgatcgagggcgacctgaaccccgacaactccgacgtggacaagctgttcatccagctggtgcagacctacaaccagctgttcgaggagaaccccatcaacgcctccggcgtggacgccaaggccatcctgtccgcccggctgtccaagtcccggcggctggagaacctgatcgcccagctgcccggcgagaagaagaacggcctgttcggcaacctgatcgccctgtccctgggcctgacccccaacttcaagtccaacttcgacctggccgaggacgccaagctgcagctgtccaaggacacctacgacgacgacctggacaacctgctggcccagatcggcgaccagtacgccgacctgttcctggccgccaagaacctgtccgacgccatcctgctgtccgacatcctgcgggtgaacaccgagatcaccaaggcccccctgtccgcctccatgatcaagcggtacgacgagcaccaccaggacctgaccctgctgaaggccctggtgcggcagcagctgcccgagaagtacaaggagatcttcttcgaccagtccaagaacggctacgccggctacatcgacggcggcgcctcccaggaggagttctacaagttcatcaagcccatcctggagaagatggacggcaccgaggagctgctggtgaagctgaaccgggaggacctgctgcggaagcagcggaccttcgacaacggctccatcccccaccagatccacctgggcgagctgcacgccatcctgcggcggcaggaggacttctaccccttcctgaaggacaaccgggagaagatcgagaagatcctgaccttccggatcccctactacgtgggccccctggcccggggcaactcccggttcgcctggatgacccggaagtccgaggagaccatcaccccctggaacttcgaggaggtggtggacaagggcgcctccgcccagtccttcatcgagcggatgaccaacttcgacaagaacctgcccaacgagaaggtgctgcccaagcactccctgctgtacgagtacttcaccgtgtacaacgagctgaccaaggtgaagtacgtgaccgagggcatgcggaagcccgccttcctgtccggcgagcagaagaaggccatcgtggacctgctgttcaagaccaaccggaaggtgaccgtgaagcagctgaaggaggactacttcaagaagatcgagtgcttcgactccgtggagatctccggcgtggaggaccggttcaacgcctccctgggcacctaccacgacctgctgaagatcatcaaggacaaggacttcctggacaacgaggagaacgaggacatcctggaggacatcgtgctgaccctgaccctgttcgaggaccgggagatgatcgaggagcggctgaagacctacgcccacctgttcgacgacaaggtgatgaagcagctgaagcggcggcggtacaccggctggggccggctgtcccggaagctgatcaacggcatccgggacaagcagtccggcaagaccatcctggacttcctgaagtccgacggcttcgccaaccggaacttcatgcagctgatccacgacgactccctgaccttcaaggaggacatccagaaggcccaggtgtccggccagggcgactccctgcacgagcacatcgccaacctggccggctcccccgccatcaagaagggcatcctgcagaccgtgaaggtggtggacgagctggtgaaggtgatgggccggcacaagcccgagaacatcgtgatcgagatggcccgggagaaccagaccacccagaagggccagaagaactcccgggagcggatgaagcggatcgaggagggcatcaaggagctgggctcccagatcctgaaggagcaccccgtggagaacacccagctgcagaacgagaagctgtacctgtactacctgcagaacggccgggacatgtacgtggaccaggagctggacatcaaccggctgtccgactacgacgtggacgccatcgtgccccagtccttcctgaaggacgactccatcgacaacaaggtgctgacccggtccgacaagaaccggggcaagtccgacaacgtgccctccgaggaggtggtgaagaagatgaagaactactggcggcagctgctgaacgccaagctgatcacccagcggaagttcgacaacctgaccaaggccgagcggggcggcctgtccgagctggacaaggccggcttcatcaagcggcagctggtggagacccggcagatcaccaagcacgtggcccagatcctggactcccggatgaacaccaagtacgacgagaacgacaagctgatccgggaggtgaaggtgatcaccctgaagtccaagctggtgtccgacttccggaaggacttccagttctacaaggtgcgggagatcaacaactaccaccacgcccacgacgcctacctgaacgccgtggtgggcaccgccctgatcaagaagtaccccaagctggagtccgagttcgtgtacggcgactacaaggtgtacgacgtgcggaagatgatcgccaagtccgagcaggagatcggcaaggccaccgccaagtacttcttctactccaacatcatgaacttcttcaagaccgagatcaccctggccaacggcgagatccggaagcggcccctgatcgagaccaacggcgagaccggcgagatcgtgtgggacaagggccgggacttcgccaccgtgcggaaggtgctgtccatgccccaggtgaacatcgtgaagaagaccgaggtgcagaccggcggcttctccaaggagtccatcctgcccaagcggaactccgacaagctgatcgcccggaagaaggactgggaccccaagaagtacggcggcttcgactcccccaccgtggcctactccgtgctggtggtggccaaggtggagaagggcaagtccaagaagctgaagtccgtgaaggagctgctgggcatcaccatcatggagcggtcctccttcgagaagaaccccatcgacttcctggaggccaagggctacaaggaggtgaagaaggacctgatcatcaagctgcccaagtactccctgttcgagctggagaacggccggaagcggatgctggcctccgccggcgagctgcagaagggcaacgagctggccctgccctccaagtacgtgaacttcctgtacctggcctcccactacgagaagctgaagggctcccccgaggacaacgagcagaagcagctgttcgtggagcagcacaagcactacctggacgagatcatcgagcagatctccgagttctccaagcgggtgatcctggccgacgccaacctggacaaggtgctgtccgcctacaacaagcaccgggacaagcccatccgggagcaggccgagaacatcatccacctgttcaccctgaccaacctgggcgcccccgccgccttcaagtacttcgacaccaccatcgaccggaagcggtacacctccaccaaggaggtgctggacgccaccctgatccaccagtccatcaccggcctgtacgagacccggatcgacctgtcccagctgggcggcgactccggcggctccaagcggaccgccgacggctccgagttcgagtcccccaagaagaagcggaaggtgtagctagcaccagcctcaagaacacccgaatggagtctctaagctacataataccaacttacactttacaaaatgttgtcccccaaaatgtagccattcgtatctgctcctaataaaaagaaagtttcttcacattctctcgagaaaaaaaaaaaatggaaaaaaaaaaaacggaaaaaaaaaaaaggtaaaaaaaaaaaatataaaaaaaaaaaacataaaaaaaaaaaacgaaaaaaaaaaaacgtaaaaaaaaaaaactcaaaaaaaaaaaagataaaaaaaaaaaacctaaaaaaaaaaaatgtaaaaaaaaaaaagggaaaaaaaaaaaacgcaaaaaaaaaaaacacaaaaaaaaaaaatgcaaaaaaaaaaaatcgaaaaaaaaaaaatctaaaaaaaaaaaacgaaaaaaaaaaaacccaaaaaaaaaaaagacaaaaaaaaaaaatagaaaaaaaaaaagttaaaaaaaaaaaactgaaaaaaaaaaaatttaaaaaaaaaaaatctag

SEQ ID NO: 1041 - RNA, 5796 nt, synthetic construct
  misc_feature 1..5796: note = Synthetic
  source 1..5796: mol_type = other RNA
atgggcctgaacgacaacaaggccggcatggagggcctggacaaggagaagatcaacaagatcatcatggaggccaccaagggctcccggttctacggcaacgagctgaagaaggagaagcaggtgaaccagcggatcgagaacatgatgcagcagaaggcccagatcacctcccagcagctgcggaaggcccagctgcaggtggaccggttcgccatggagctggagcagtcccggaacctgtccaacaccatcgtgcacatcgacatggacgccttctacgccgccgtggagatgcgggacaaccccgagctgaaggacaagcccatcgccgtgggctccatgtccatgctgtccacctccaactaccacgcccggcggttcggcgtgcgggccgccatgcccggcttcatcgccaagcggctgtgcccccagctgatcatcgtgccccccaacttcgacaagtaccgggccgtgtccaaggaggtgaaggagatcctggccgactacgaccccaacttcatggccatgtccctggacgaggcctacctgaacatcaccaagcacctggaggagcggcagaactggcccgaggacaagcggcggtacttcatcaagatgggctcctccgtggagaacgacaaccccggcaaggaggtgaacaagctgtccgagcacgagcggtccatctcccccctgctgttcgaggagtccccctccgacgtgcagccccccggcgaccccttccaggtgaacttcgaggagcagaacaacccccagatcctgcagaactccgtggtgttcggcacctccgcccaggaggtggtgaaggagatccggttccggatcgagcagaagaccaccctgaccgcctccgccggcatcgcccccaacaccatgctggccaaggtgtgctccgacaagaacaagcccaacggccagtaccagatcctgcccaaccggcaggccgtgatggacttcatcaaggacctgcccatccggaaggtgtccggcatcggcaaggtgaccgagaagatgctgaaggccctgggcatcatcacctgcaccgagctgtaccagcagcgggccctgctgtccctgctgttctccgagacctcctggcactacttcctgcacatctccctgggcctgggctccacccacctgacccgggacggcgagcggaagtccatgtccgtggagcggaccttctccgagatcaacaaggccgaggagcagtactccctgtgccaggagctgtgctccgagctggcccaggacctgcagaaggagcggctgaagggccggaccgtgaccatcaagctgaagaacgtgaacttcgaggtgaagacccgggcctccaccgtgtcctccgtggtgtccaccgccgaggagatcttcgccatcgccaaggagctgctgaagaccgagatcgacgccgacttcccccaccccctgcggctgcggctgatgggcgtgcggatctcctccttccccaacgaggaggaccggaagcaccagcagtccggcggctcctccggcggctccaagcggaccgccgacggctccgagttcgagtcccccaagaagaagcggaaggtgtccggcggctcctccggcggctccgacaagaagtactccatcggcctggacatcggcaccaactccgtgggctgggccgtgatcaccgacgagtacaaggtgccctccaagaagttcaaggtgctgggcaacaccgaccggcactccatcaagaagaacctgatcggcgccctgctgttcgactccggcgagaccgccgaggccacccggctgaagcggaccgcccggcggcggtacacccggcggaagaaccggatctgctacctgcaggagatcttctccaacgagatggccaaggtggacgactccttcttccaccggctggaggagtccttcctggtggaggaggacaagaagcacgagcggcaccccatcttcggcaacatcgtggacgaggtggcctaccacgagaagtaccccaccatctaccacctgcggaagaagctggtggactccaccgacaaggccgacctgcggctgatctacctggccctggcccacatgatcaagttccggggccacttcctgatcgagggcgacctgaaccccgacaactccgacgtggacaagctgttcatccagctggtgcagacctacaaccagctgttcgaggagaaccccatcaacgcctccggcgtggacgccaaggccatcctgtccgcccggctgtccaagtcccggcggctggagaacctgatcgcccagctgcccggcgagaagaagaacggcctgttcggcaacctgatcgccctgtccctgggcctgacccccaacttcaagtccaacttcgacctggccgaggacgccaagctgcagctgtccaaggacacctacgacgacgacctggacaacctgctggcccagatcggcgaccagtacgccgacctgttcctggccgccaagaacctgtccgacgccatcctgctgtccgacatcctgcgggtgaacaccgagatcaccaaggcccccctgtccgcctccatgatcaagcggtacgacgagcaccaccaggacctgaccctgctgaaggccctggtgcggcagcagctgcccgagaagtacaaggagatcttcttcgaccagtccaagaacggctacgccggctacatcgacggcggcgcctcccaggaggagttctacaagttcatcaagcccatcctggagaagatggacggcaccgaggagctgctggtgaagctgaaccgggaggacctgctgcggaagcagcggaccttcgacaacggctccatcccccaccagatccacctgggcgagctgcacgccatcctgcggcggcaggaggacttctaccccttcctgaaggacaaccgggagaagatcgagaagatcctgaccttccggatcccctactacgtgggccccctggcccggggcaactcccggttcgcctggatgacccggaagtccgaggagaccatcaccccctggaacttcgaggaggtggtggacaagggcgcctccgcccagtccttcatcgagcggatgaccaacttcgacaagaacctgcccaacgagaaggtgctgcccaagcactccctgctgtacgagtacttcaccgtgtacaacgagctgaccaaggtgaagtacgtgaccgagggcatgcggaagcccgccttcctgtccggcgagcagaagaaggccatcgtggacctgctgttcaagaccaaccggaaggtgaccgtgaagcagctgaaggaggactacttcaagaagatcgagtgcttcgactccgtggagatctccggcgtggaggaccggttcaacgcctccctgggcacctaccacgacctgctgaagatcatcaaggacaaggacttcctggacaacgaggagaacgaggacatcctggaggacatcgtgctgaccctgaccctgttcgaggaccgggagatgatcgaggagcggctgaagacctacgcccacctgttcgacgacaaggtgatgaagcagctgaagcggcggcggtacaccggctggggccggctgtcccggaagctgatcaacggcatccgggacaagcagtccggcaagaccatcctggacttcctgaagtccgacggcttcgccaaccggaacttcatgcagctgatccacgacgactccctgaccttcaaggaggacatccagaaggcccaggtgtccggccagggcgactccctgcacgagcacatcgccaacctggccggctcccccgccatcaagaagggcatcctgcagaccgtgaaggtggtggacgagctggtgaaggtgatgggccggcacaagcccgagaacatcgtgatcgagatggcccgggagaaccagaccacccagaagggccagaagaactcccgggagcggatgaagcggatcgaggagggcatcaaggagctgggctcccagatcctgaaggagcaccccgtggagaacacccagctgcagaacgagaagctgtacctgtactacctgcagaacggccgggacatgtacgtggaccaggagctggacatcaaccggctgtccgactacgacgtggacgccatcgtgccccagtccttcctgaaggacgactccatcgacaacaaggtgctgacccggtccgacaagaaccggggcaagtccgacaacgtgccctccgaggaggtggtgaagaagatgaagaactactggcggcagctgctgaacgccaagctgatcacccagcggaagttcgacaacctgaccaaggccgagcggggcggcctgtccgagctggacaaggccggcttcatcaagcggcagctggtggagacccggcagatcaccaagcacgtggcccagatcctggactcccggatgaacaccaagtacgacgagaacgacaagctgatccgggaggtgaaggtgatcaccctgaagtccaagctggtgtccgacttccggaaggacttccagttctacaaggtgcgggagatcaacaactaccaccacgcccacgacgcctacctgaacgccgtggtgggcaccgccctgatcaagaagtaccccaagctggagtccgagttcgtgtacggcgactacaaggtgtacgacgtgcggaagatgatcgccaagtccgagcaggagatcggcaaggccaccgccaagtacttcttctactccaacatcatgaacttcttcaagaccgagatcaccctggccaacggcgagatccggaagcggcccctgatcgagaccaacggcgagaccggcgagatcgtgtgggacaagggccgggacttcgccaccgtgcggaaggtgctgtccatgccccaggtgaacatcgtgaagaagaccgaggtgcagaccggcggcttctccaaggagtccatcctgcccaagcggaactccgacaagctgatcgcccggaagaaggactgggaccccaagaagtacggcggcttcgactcccccaccgtggcctactccgtgctggtggtggccaaggtggagaagggcaagtccaagaagctgaagtccgtgaaggagctgctgggcatcaccatcatggagcggtcctccttcgagaagaaccccatcgacttcctggaggccaagggctacaaggaggtgaagaaggacctgatcatcaagctgcccaagtactccctgttcgagctggagaacggccggaagcggatgctggcctccgccggcgagctgcagaagggcaacgagctggccctgccctccaagtacgtgaacttcctgtacctggcctcccactacgagaagctgaagggctcccccgaggacaacgagcagaagcagctgttcgtggagcagcacaagcactacctggacgagatcatcgagcagatctccgagttctccaagcgggtgatcctggccgacgccaacctggacaaggtgctgtccgcctacaacaagcaccgggacaagcccatccgggagcaggccgagaacatcatccacctgttcaccctgaccaacctgggcgcccccgccgccttcaagtacttcgacaccaccatcgaccggaagcggtacacctccaccaaggaggtgctggacgccaccctgatccaccagtccatcaccggcctgtacgagacccggatcgacctgtcccagctgggcggcgactccggcggctccaagcggaccgccgacggctccgagttcgagtcccccaagaagaagcggaaggtgtag

SEQ ID NO: 1042 - protein, 1931 aa, synthetic construct
  REGION 1..1931: note = Synthetic
MGLNDNKAGMEGLDKEKINKIIMEATKGSRFYGNELKKEKQVNQRIENMMQQKAQITSQQLRKAQLQVDRFAMELEQSRNLSNTIVHIDMDAFYAAVEMRDNPELKDKPIAVGSMSMLSTSNYHARRFGVRAAMPGFIAKRLCPQLIIVPPNFDKYRAVSKEVKEILADYDPNFMAMSLDEAYLNITKHLEERQNWPEDKRRYFIKMGSSVENDNPGKEVNKLSEHERSISPLLFEESPSDVQPPGDPFQVNFEEQNNPQILQNSVVFGTSAQEVVKEIRFRIEQKTTLTASAGIAPNTMLAKVCSDKNKPNGQYQILPNRQAVMDFIKDLPIRKVSGIGKVTEKMLKALGIITCTELYQQRALLSLLFSETSWHYFLHISLGLGSTHLTRDGERKSMSVERTFSEINKAEEQYSLCQELCSELAQDLQKERLKGRTVTIKLKNVNFEVKTRASTVSSVVSTAEEIFAIAKELLKTEIDADFPHPLRLRLMGVRISSFPNEEDRKHQQSGGSSGGSKRTADGSEFESPKKKRKVSGGSSGGSDKKYSIGLDIGTNSVGWAVITDEYKVPSKKFKVLGNTDRHSIKKNLIGALLFDSGETAEATRLKRTARRRYTRRKNRICYLQEIFSNEMAKVDDSFFHRLEESFLVEEDKKHERHPIFGNIVDEVAYHEKYPTIYHLRKKLVDSTDKADLRLIYLALAHMIKFRGHFLIEGDLNPDNSDVDKLFIQLVQTYNQLFEENPINASGVDAKAILSARLSKSRRLENLIAQLPGEKKNGLFGNLIALSLGLTPNFKSNFDLAEDAKLQLSKDTYDDDLDNLLAQIGDQYADLFLAAKNLSDAILLSDILRVNTEITKAPLSASMIKRYDEHHQDLTLLKALVRQQLPEKYKEIFFDQSKNGYAGYIDGGASQEEFYKFIKPILEKMDGTEELLVKLNREDLLRKQRTFDNGSIPHQIHLGELHAILRRQEDFYPFLKDNREKIEKILTFRIPYYVGPLARGNSRFAWMTRKSEETITPWNFEEVVDKGASAQSFIERMTNFDKNLPNEKVLPKHSLLYEYFTVYNELTKVKYVTEGMRKPAFLSGEQKKAIVDLLFKTNRKVTVKQLKEDYFKKIECFDSVEISGVEDRFNASLGTYHDLLKIIKDKDFLDNEENEDILEDIVLTLTLFEDREMIEERLKTYAHLFDDKVMKQLKRRRYTGWGRLSRKLINGIRDKQSGKTILDFLKSDGFANRNFMQLIHDDSLTFKEDIQKAQVSGQGDSLHEHIANLAGSPAIKKGILQTVKVVDELVKVMGRHKPENIVIEMARENQTTQKGQKNSRERMKRIEEGIKELGSQILKEHPVENTQLQNEKLYLYYLQNGRDMYVDQELDINRLSDYDVDAIVPQSFLKDDSIDNKVLTRSDKNRGKSDNVPSEEVVKKMKNYWRQLLNAKLITQRKFDNLTKAERGGLSELDKAGFIKRQLVETRQITKHVAQILDSRMNTKYDENDKLIREVKVITLKSKLVSDFRKDFQFYKVREINNYHHAHDAYLNAVVGTALIKKYPKLESEFVYGDYKVYDVRKMIAKSEQEIGKATAKYFFYSNIMNFFKTEITLANGEIRKRPLIETNGETGEIVWDKGRDFATVRKVLSMPQVNIVKKTEVQTGGFSKESILPKRNSDKLIARKKDWDPKKYGGFDSPTVAYSVLVVAKVEKGKSKKLKSVKELLGITIMERSSFEKNPIDFLEAKGYKEVKKDLIIKLPKYSLFELENGRKRMLASAGELQKGNELALPSKYVNFLYLASHYEKLKGSPEDNEQKQLFVEQHKHYLDEIIEQISEFSKRVILADANLDKVLSAYNKHRDKPIREQAENIIHLFTLTNLGAPAAFKYFDTTIDRKRYTSTKEVLDATLIHQSITGLYETRIDLSQLGGDSGGSKRTADGSEFESPKKKRKV

SEQ ID NO: 1043 - RNA, 7441 nt, synthetic construct
  misc_feature 1..7441: note = Synthetic
  source 1..7441: mol_type = other RNA
gggaagctcagaataaacgctcaactttggccggatctgccaccatggactccaccaaggagaagtgcgactcctacaaggacgacctgctgctgcggatgggcctgaacgacaacaaggccggcatggagggcctggacaaggagaagatcaacaagatcatcatggaggccaccaagggctcccggttctacggcaacgagctgaagaaggagaagcaggtgaaccagcggatcgagaacatgatgcagcagaaggcccagatcacctcccagcagctgcggaaggcccagctgcaggtggaccggttcgccatggagctggagcagtcccggaacctgtccaacaccatcgtgcacatcgacatggacgccttctacgccgccgtggagatgcgggacaaccccgagctgaaggacaagcccatcgccgtgggctccatgtccatgctgtccacctccaactaccacgcccggcggttcggcgtgcgggccgccatgcccggcttcatcgccaagcggctgtgcccccagctgatcatcgtgccccccaacttcgacaagtaccgggccgtgtccaaggaggtgaaggagatcctggccgactacgaccccaacttcatggccatgtccctggacgaggcctacctgaacatcaccaagcacctggaggagcggcagaactggcccgaggacaagcggcggtacttcatcaagatgggctcctccgtggagaacgacaaccccggcaaggaggtgaacaagctgtccgagcacgagcggtccatctcccccctgctgttcgaggagtccccctccgacgtgcagccccccggcgaccccttccaggtgaacttcgaggagcagaacaacccccagatcctgcagaactccgtggtgttcggcacctccgcccaggaggtggtgaaggagatccggttccggatcgagcagaagaccaccctgaccgcctccgccggcatcgcccccaacaccatgctggccaaggtgtgctccgacaagaacaagcccaacggccagtaccagatcctgcccaaccggcaggccgtgatggacttcatcaaggacctgcccatccggaaggtgtccggcatcggcaaggtgaccgagaagatgctgaaggccctgggcatcatcacctgcaccgagctgtaccagcagcgggccctgctgtccctgctgttctccgagacctcctggcactacttcctgcacatctccctgggcctgggctccacccacctgacccgggaccgggtgcggaagtccatgtccgtggagcggaccttctccgagatcaacaaggccgaggagcagtactccctgtgccaggagctgtgctccgagctggcccaggacctgcagaaggagcggctgaagggccggaccgtgaccatcaagctgaagaacgtgaacttcgaggtgaagacccgggcctccaccgtgtcctccgtggtgtccaccgccgaggagatcttcgccatcgccaaggagctgctgaagaccgagatcgacgccgacttcccccaccccctgcggctgcggctgatgggcgtgcggatctcctccttccccaacgaggaggaccggaagcaccagcagcggtccatcatcggcttcctgcaggccggcaaccaggccctgtccgccaccgagtgcaccctggagaagaccgacaaggacaagttcgtgaagcccctggagatgtcccacaagaagtccttcttcgacaagaagcggtccgagcggaagtggtcccaccaggacaccttcaagtgcgaggccgtgaacaagcagtccttccagacctcccagcccttccaggtgctgaagaagaagatgaacgagaacctggagatctccgagaactccgacgactgccagatcctgacctgccccgtgtgcttccgggcccagggctgcatctccctggaggccctgaacaagcacgtggacgagtgcctggacggcccctccatctccgagaacttcaagatgttctcctgctcccacgtgtccgccaccaaggtgaacaagaaggagaacgtgcccgcctcctccctgtgcgagaagcaggactacgaggcccaccccaagatcaaggagatctcctccgtggactgcatcgccctggtggacaccatcgacaactcctccaaggccgagtccatcgacgccctgtccaacaagcactccaaggaggagtgctcctccctgccctccaagtccttcaacatcgagcactgccaccagaactcctcctccaccgtgtccctggagaacgaggacgtgggctccttccggcaggagtaccggcagccctacctgtgcgaggtgaagaccggccaggccctggtgtgccccgtgtgcaacgtggagcagaagacctccgacctgaccctgttcaacgtgcacgtggacgtgtgcctgaacaagtccttcatccaggagctgcggaaggacaagttcaaccccgtgaaccagcccaaggagtcctcccggtccaccggctcctcctccggcgtgcagaaggccgtgacccggaccaagcggcccggcctgatgaccaagtactccacctccaagaagatcaagcccaacaaccccaagcacaccctggacatcttcttcaagtccggcggctcctccggcggctccaagcggaccgccgacggctccgagttcgagtcccccaagaagaagcggaaggtgtccggcggctcctccggcggctccgacaagaagtactccatcggcctggacatcggcaccaactccgtgggctgggccgtgatcaccgacgagtacaaggtgccctccaagaagttcaaggtgctgggcaacaccgaccggcactccatcaagaagaacctgatcggcgccctgctgttcgactccggcgagaccgccgaggccacccggctgaagcggaccgcccggcggcggtacacccggcggaagaaccggatctgctacctgcaggagatcttctccaacgagatggccaaggtggacgactccttcttccaccggctggaggagtccttcctggtggaggaggacaagaagcacgagcggcaccccatcttcggcaacatcgtggacgaggtggcctaccacgagaagtaccccaccatctaccacctgcggaagaagctggtggactccaccgacaaggccgacctgcggctgatctacctggccctggcccacatgatcaagttccggggccacttcctgatcgagggcgacctgaaccccgacaactccgacgtggacaagctgttcatccagctggtgcagacctacaaccagctgttcgaggagaaccccatcaacgcctccggcgtggacgccaaggccatcctgtccgcccggctgtccaagtcccggcggctggagaacctgatcgcccagctgcccggcgagaagaagaacggcctgttcggcaacctgatcgccctgtccctgggcctgacccccaacttcaagtccaacttcgacctggccgaggacgccaagctgcagctgtccaaggacacctacgacgacgacctggacaacctgctggcccagatcggcgaccagtacgccgacctgttcctggccgccaagaacctgtccgacgccatcctgctgtccgacatcctgcgggtgaacaccgagatcaccaaggcccccctgtccgcctccatgatcaagcggtacgacgagcaccaccaggacctgaccctgctgaaggccctggtgcggcagcagctgcccgagaagtacaaggagatcttcttcgaccagtccaagaacggctacgccggctacatcgacggcggcgcctcccaggaggagttctacaagttcatcaagcccatcctggagaagatggacggcaccgaggagctgctggtgaagctgaaccgggaggacctgctgcggaagcagcggaccttcgacaacggctccatcccccaccagatccacctgggcgagctgcacgccatcctgcggcggcaggaggacttctaccccttcctgaaggacaaccgggagaagatcgagaagatcctgaccttccggatcccctactacgtgggccccctggcccggggcaactcccggttcgcctggatgacccggaagtccgaggagaccatcaccccctggaacttcgaggaggtggtggacaagggcgcctccgcccagtccttcatcgagcggatgaccaacttcgacaagaacctgcccaacgagaaggtgctgcccaagcactccctgctgtacgagtacttcaccgtgtacaacgagctgaccaaggtgaagtacgtgaccgagggcatgcggaagcccgccttcctgtccggcgagcagaagaaggccatcgtggacctgctgttcaagaccaaccggaaggtgaccgtgaagcagctgaaggaggactacttcaagaagatcgagtgcttcgactccgtggagatctccggcgtggaggaccggttcaacgcctccctgggcacctaccacgacctgctgaagatcatcaaggacaaggacttcctggacaacgaggagaacgaggacatcctggaggacatcgtgctgaccctgaccctgttcgaggaccgggagatgatcgaggagcggctgaagacctacgcccacctgttcgacgacaaggtgatgaagcagctgaagcggcggcggtacaccggctggggccggctgtcccggaagctgatcaacggcatccgggacaagcagtccggcaagaccatcctggacttcctgaagtccgacggcttcgccaaccggaacttcatgcagctgatccacgacgactccctgaccttcaaggaggacatccagaaggcccaggtgtccggccagggcgactccctgcacgagcacatcgccaacctggccggctcccccgccatcaagaagggcatcctgcagaccgtgaaggtggtggacgagctggtgaaggtgatgggccggcacaagcccgagaacatcgtgatcgagatggcccgggagaaccagaccacccagaagggccagaagaactcccgggagcggatgaagcggatcgaggagggcatcaaggagctgggctcccagatcctgaaggagcaccccgtggagaacacccagctgcagaacgagaagctgtacctgtactacctgcagaacggccgggacatgtacgtggaccaggagctggacatcaaccggctgtccgactacgacgtggacgccatcgtgccccagtccttcctgaaggacgactccatcgacaacaaggtgctgacccggtccgacaagaaccggggcaagtccgacaacgtgccctccgaggaggtggtgaagaagatgaagaactactggcggcagctgctgaacgccaagctgatcacccagcggaagttcgacaacctgaccaaggccgagcggggcggcctgtccgagctggacaaggccggcttcatcaagcggcagctggtggagacccggcagatcaccaagcacgtggcccagatcctggactcccggatgaacaccaagtacgacgagaacgacaagctgatccgggaggtgaaggtgatcaccctgaagtccaagctggtgtccgacttccggaaggacttccagttctacaaggtgcgggagatcaacaactaccaccacgcccacgacgcctacctgaacgccgtggtgggcaccgccctgatcaagaagtaccccaagctggagtccgagttcgtgtacggcgactacaaggtgtacgacgtgcggaagatgatcgccaagtccgagcaggagatcggcaaggccaccgccaagtacttcttctactccaacatcatgaacttcttcaagaccgagatcaccctggccaacggcgagatccggaagcggcccctgatcgagaccaacggcgagaccggcgagatcgtgtgggacaagggccgggacttcgccaccgtgcggaaggtgctgtccatgccccaggtgaacatcgtgaagaagaccgaggtgcagaccggcggcttctccaaggagtccatcctgcccaagcggaactccgacaagctgatcgcccggaagaaggactgggaccccaagaagtacggcggcttcgactcccccaccgtggcctactccgtgctggtggtggccaaggtggagaagggcaagtccaagaagctgaagtccgtgaaggagctgctgggcatcaccatcatggagcggtcctccttcgagaagaaccccatcgacttcctggaggccaagggctacaaggaggtgaagaaggacctgatcatcaagctgcccaagtactccctgttcgagctggagaacggccggaagcggatgctggcctccgccggcgagctgcagaagggcaacgagctggccctgccctccaagtacgtgaacttcctgtacctggcctcccactacgagaagctgaagggctcccccgaggacaacgagcagaagcagctgttcgtggagcagcacaagcactacctggacgagatcatcgagcagatctccgagttctccaagcgggtgatcctggccgacgccaacctggacaaggtgctgtccgcctacaacaagcaccgggacaagcccatccgggagcaggccgagaacatcatccacctgttcaccctgaccaacctgggcgcccccgccgccttcaagtacttcgacaccaccatcgaccggaagcggtacacctccaccaaggaggtgctggacgccaccctgatccaccagtccatcaccggcctgtacgagacccggatcgacctgtcccagctgggcggcgactccggcggctccaagcggaccgccgacggctccgagttcgagtcccccaagaagaagcggaaggtgtagctagcaccagcctcaagaacacccgaatggagtctctaagctacataataccaacttacactttacaaaatgttgtcccccaaaatgtagccattcgtatctgctcctaataaaaagaaagtttcttcacattctctcgagaaaaaaaaaaaatggaaaaaaaaaaaacggaaaaaaaaaaaaggtaaaaaaaaaaaatataaaaaaaaaaaacataaaaaaaaaaaacgaaaaaaaaaaaacgtaaaaaaaaaaaactcaaaaaaaaaaaagataaaaaaaaaaaacctaaaaaaaaaaaatgtaaaaaaaaaaaagggaaaaaaaaaaaacgcaaaaaaaaaaaacacaaaaaaaaaaaatgcaaaaaaaaaaaatcgaaaaaaaaaaaatctaaaaaaaaaaaacgaaaaaaaaaaaacccaaaaaaaaaaaagacaaaaaaaaaaaatagaaaaaaaaaaagttaaaaaaaaaaaactgaaaaaaaaaaaatttaaaaaaaaaaaatctag

SEQ ID NO: 1044 - RNA, 6882 nt, synthetic construct
  misc_feature 1..6882: note = Synthetic
  source 1..6882: mol_type = other RNA
atggactccaccaaggagaagtgcgactcctacaaggacgacctgctgctgcggatgggcctgaacgacaacaaggccggcatggagggcctggacaaggagaagatcaacaagatcatcatggaggccaccaagggctcccggttctacggcaacgagctgaagaaggagaagcaggtgaaccagcggatcgagaacatgatgcagcagaaggcccagatcacctcccagcagctgcggaaggcccagctgcaggtggaccggttcgccatggagctggagcagtcccggaacctgtccaacaccatcgtgcacatcgacatggacgccttctacgccgccgtggagatgcgggacaaccccgagctgaaggacaagcccatcgccgtgggctccatgtccatgctgtccacctccaactaccacgcccggcggttcggcgtgcgggccgccatgcccggcttcatcgccaagcggctgtgcccccagctgatcatcgtgccccccaacttcgacaagtaccgggccgtgtccaaggaggtgaaggagatcctggccgactacgaccccaacttcatggccatgtccctggacgaggcctacctgaacatcaccaagcacctggaggagcggcagaactggcccgaggacaagcggcggtacttcatcaagatgggctcctccgtggagaacgacaaccccggcaaggaggtgaacaagctgtccgagcacgagcggtccatctcccccctgctgttcgaggagtccccctccgacgtgcagccccccggcgaccccttccaggtgaacttcgaggagcagaacaacccccagatcctgcagaactccgtggtgttcggcacctccgcccaggaggtggtgaaggagatccggttccggatcgagcagaagaccaccctgaccgcctccgccggcatcgcccccaacaccatgctggccaaggtgtgctccgacaagaacaagcccaacggccagtaccagatcctgcccaaccggcaggccgtgatggacttcatcaaggacctgcccatccggaaggtgtccggcatcggcaaggtgaccgagaagatgctgaaggccctgggcatcatcacctgcaccgagctgtaccagcagcgggccctgctgtccctgctgttctccgagacctcctggcactacttcctgcacatctccctgggcctgggctccacccacctgacccgggaccgggtgcggaagtccatgtccgtggagcggaccttctccgagatcaacaaggccgaggagcagtactccctgtgccaggagctgtgctccgagctggcccaggacctgcagaaggagcggctgaagggccggaccgtgaccatcaagctgaagaacgtgaacttcgaggtgaagacccgggcctccaccgtgtcctccgtggtgtccaccgccgaggagatcttcgccatcgccaaggagctgctgaagaccgagatcgacgccgacttcccccaccccctgcggctgcggctgatgggcgtgcggatctcctccttccccaacgaggaggaccggaagcaccagcagcggtccatcatcggcttcctgcaggccggcaaccaggccctgtccgccaccgagtgcaccctggagaagaccgacaaggacaagttcgtgaagcccctggagatgtcccacaagaagtccttcttcgacaagaagcggtccgagcggaagtggtcccaccaggacaccttcaagtgcgaggccgtgaacaagcagtccttccagacctcccagcccttccaggtgctgaagaagaagatgaacgagaacctggagatctccgagaactccgacgactgccagatcctgacctgccccgtgtgcttccgggcccagggctgcatctccctggaggccctgaacaagcacgtggacgagtgcctggacggcccctccatctccgagaacttcaagatgttctcctgctcccacgtgtccgccaccaaggtgaacaagaaggagaacgtgcccgcctcctccctgtgcgagaagcaggactacgaggcccaccccaagatcaaggagatctcctccgtggactgcatcgccctggtggacaccatcgacaactcctccaaggccgagtccatcgacgccctgtccaacaagcactccaaggaggagtgctcctccctgccctccaagtccttcaacatcgagcactgccaccagaactcctcctccaccgtgtccctggagaacgaggacgtgggctccttccggcaggagtaccggcagccctacctgtgcgaggtgaagaccggccaggccctggtgtgccccgtgtgcaacgtggagcagaagacctccgacctgaccctgttcaacgtgcacgtggacgtgtgcctgaacaagtccttcatccaggagctgcggaaggacaagttcaaccccgtgaaccagcccaaggagtcctcccggtccaccggctcctcctccggcgtgcagaaggccgtgacccggaccaagcggcccggcctgatgaccaagtactccacctccaagaagatcaagcccaacaaccccaagcacaccctggacatcttcttcaagtccggcggctcctccggcggctccaagcggaccgccgacggctccgagttcgagtcccccaagaagaagcggaaggtgtccggcggctcctccggcggctccgacaagaagtactccatcggcctggacatcggcaccaactccgtgggctgggccgtgatcaccgacgagtacaaggtgccctccaagaagttcaaggtgctgggcaacaccgaccggcactccatcaagaagaacctgatcggcgccctgctgttcgactccggcgagaccgccgaggccacccggctgaagcggaccgcccggcggcggtacacccggcggaagaaccggatctgctacctgcaggagatcttctccaacgagatggccaaggtggacgactccttcttccaccggctggaggagtccttcctggtggaggaggacaagaagcacgagcggcaccccatcttcggcaacatcgtggacgaggtggcctaccacgagaagtaccccaccatctaccacctgcggaagaagctggtggactccaccgacaaggccgacctgcggctgatctacctggccctggcccacatgatcaagttccggggccacttcctgatcgagggcgacctgaaccccgacaactccgacgtggacaagctgttcatccagctggtgcagacctacaaccagctgttcgaggagaaccccatcaacgcctccggcgtggacgccaaggccatcctgtccgcccggctgtccaagtcccggcggctggagaacctgatcgcccagctgcccggcgagaagaagaacggcctgttcggcaacctgatcgccctgtccctgggcctgacccccaacttcaagtccaacttcgacctggccgaggacgccaagctgcagctgtccaaggacacctacgacgacgacctggacaacctgctggcccagatcggcgaccagtacgccgacctgttcctggccgccaagaacctgtccgacgccatcctgctgtccgacatcctgcgggtgaacaccgagatcaccaaggcccccctgtccgcctccatgatcaagcggtacgacgagcaccaccaggacctgaccctgctgaaggccctggtgcggcagcagctgcccgagaagtacaaggagatcttcttcgaccagtccaagaacggctacgccggctacatcgacggcggcgcctcccaggaggagttctacaagttcatcaagcccatcctggagaagatggacggcaccgaggagctgctggtgaagctgaaccgggaggacctgctgcggaagcagcggaccttcgacaacggctccatcccccaccagatccacctgggcgagctgcacgccatcctgcggcggcaggaggacttctaccccttcctgaaggacaaccgggagaagatcgagaagatcctgaccttccggatcccctactacgtgggccccctggcccggggcaactcccggttcgcctggatgacccggaagtccgaggagaccatcaccccctggaacttcgaggaggtggtggacaagggcgcctccgcccagtccttcatcgagcggatgaccaacttcgacaagaacctgcccaacgagaaggtgctgcccaagcactccctgctgtacgagtacttcaccgtgtacaacgagctgaccaaggtgaagtacgtgaccgagggcatgcggaagcccgccttcctgtccggcgagcagaagaaggccatcgtggacctgctgttcaagaccaaccggaaggtgaccgtgaagcagctgaaggaggactacttcaagaagatcgagtgcttcgactccgtggagatctccggcgtggaggaccggttcaacgcctccctgggcacctaccacgacctgctgaagatcatcaaggacaaggacttcctggacaacgaggagaacgaggacatcctggaggacatcgtgctgaccctgaccctgttcgaggaccgggagatgatcgaggagcggctgaagacctacgcccacctgttcgacgacaaggtgatgaagcagctgaagcggcggcggtacaccggctggggccggctgtcccggaagctgatcaacggcatccgggacaagcagtccggcaagaccatcctggacttcctgaagtccgacggcttcgccaaccggaacttcatgcagctgatccacgacgactccctgaccttcaaggaggacatccagaaggcccaggtgtccggccagggcgactccctgcacgagcacatcgccaacctggccggctcccccgccatcaagaagggcatcctgcagaccgtgaaggtggtggacgagctggtgaaggtgatgggccggcacaagcccgagaacatcgtgatcgagatggcccgggagaaccagaccacccagaagggccagaagaactcccgggagcggatgaagcggatcgaggagggcatcaaggagctgggctcccagatcctgaaggagcaccccgtggagaacacccagctgcagaacgagaagctgtacctgtactacctgcagaacggccgggacatgtacgtggaccaggagctggacatcaaccggctgtccgactacgacgtggacgccatcgtgccccagtccttcctgaaggacgactccatcgacaacaaggtgctgacccggtccgacaagaaccggggcaagtccgacaacgtgccctccgaggaggtggtgaagaagatgaagaactactggcggcagctgctgaacgccaagctgatcacccagcggaagttcgacaacctgaccaaggccgagcggggcggcctgtccgagctggacaaggccggcttcatcaagcggcagctggtggagacccggcagatcaccaagcacgtggcccagatcctggactcccggatgaacaccaagtacgacgagaacgacaagctgatccgggaggtgaaggtgatcaccctgaagtccaagctggtgtccgacttccggaaggacttccagttctacaaggtgcgggagatcaacaactaccaccacgcccacgacgcctacctgaacgccgtggtgggcaccgccctgatcaagaagtaccccaagctggagtccgagttcgtgtacggcgactacaaggtgtacgacgtgcggaagatgatcgccaagtccgagcaggagatcggcaaggccaccgccaagtacttcttctactccaacatcatgaacttcttcaagaccgagatcaccctggccaacggcgagatccggaagcggcccctgatcgagaccaacggcgagaccggcgagatcgtgtgggacaagggccgggacttcgccaccgtgcggaaggtgctgtccatgccccaggtgaacatcgtgaagaagaccgaggtgcagaccggcggcttctccaaggagtccatcctgcccaagcggaactccgacaagctgatcgcccggaagaaggactgggaccccaagaagtacggcggcttcgactcccccaccgtggcctactccgtgctggtggtggccaaggtggagaagggcaagtccaagaagctgaagtccgtgaaggagctgctgggcatcaccatcatggagcggtcctccttcgagaagaaccccatcgacttcctggaggccaagggctacaaggaggtgaagaaggacctgatcatcaagctgcccaagtactccctgttcgagctggagaacggccggaagcggatgctggcctccgccggcgagctgcagaagggcaacgagctggccctgccctccaagtacgtgaacttcctgtacctggcctcccactacgagaagctgaagggctcccccgaggacaacgagcagaagcagctgttcgtggagcagcacaagcactacctggacgagatcatcgagcagatctccgagttctccaagcgggtgatcctggccgacgccaacctggacaaggtgctgtccgcctacaacaagcaccgggacaagcccatccgggagcaggccgagaacatcatccacctgttcaccctgaccaacctgggcgcccccgccgccttcaagtacttcgacaccaccatcgaccggaagcggtacacctccaccaaggaggtgctggacgccaccctgatccaccagtccatcaccggcctgtacgagacccggatcgacctgtcccagctgggcggcgactccggcggctccaagcggaccgccgacggctccgagttcgagtcccccaagaagaagcggaaggtgtag

SEQ ID NO: 1045 - protein, 2293 aa, synthetic construct
  REGION 1..2293: note = Synthetic
MDSTKEKCDSYKDDLLLRMGLNDNKAGMEGLDKEKINKIIMEATKGSRFYGNELKKEKQVNQRIENMMQQKAQITSQQLRKAQLQVDRFAMELEQSRNLSNTIVHIDMDAFYAAVEMRDNPELKDKPIAVGSMSMLSTSNYHARRFGVRAAMPGFIAKRLCPQLIIVPPNFDKYRAVSKEVKEILADYDPNFMAMSLDEAYLNITKHLEERQNWPEDKRRYFIKMGSSVENDNPGKEVNKLSEHERSISPLLFEESPSDVQPPGDPFQVNFEEQNNPQILQNSVVFGTSAQEVVKEIRFRIEQKTTLTASAGIAPNTMLAKVCSDKNKPNGQYQILPNRQAVMDFIKDLPIRKVSGIGKVTEKMLKALGIITCTELYQQRALLSLLFSETSWHYFLHISLGLGSTHLTRDRVRKSMSVERTFSEINKAEEQYSLCQELCSELAQDLQKERLKGRTVTIKLKNVNFEVKTRASTVSSVVSTAEEIFAIAKELLKTEIDADFPHPLRLRLMGVRISSFPNEEDRKHQQRSIIGFLQAGNQALSATECTLEKTDKDKFVKPLEMSHKKSFFDKKRSERKWSHQDTFKCEAVNKQSFQTSQPFQVLKKKMNENLEISENSDDCQILTCPVCFRAQGCISLEALNKHVDECLDGPSISENFKMFSCSHVSATKVNKKENVPASSLCEKQDYEAHPKIKEISSVDCIALVDTIDNSSKAESIDALSNKHSKEECSSLPSKSFNIEHCHQNSSSTVSLENEDVGSFRQEYRQPYLCEVKTGQALVCPVCNVEQKTSDLTLFNVHVDVCLNKSFIQELRKDKFNPVNQPKESSRSTGSSSGVQKAVTRTKRPGLMTKYSTSKKIKPNNPKHTLDIFFKSGGSSGGSKRTADGSEFESPKKKRKVSGGSSGGSDKKYSIGLDIGTNSVGWAVITDEYKVPSKKFKVLGNTDRHSIKKNLIGALLFDSGETAEATRLKRTARRRYTRRKNRICYLQEIFSNEMAKVDDSFFHRLEESFLVEEDKKHERHPIFGNIVDEVAYHEKYPTIYHLRKKLVDSTDKADLRLIYLALAHMIKFRGHFLIEGDLNPDNSDVDKLFIQLVQTYNQLFEENPINASGVDAKAILSARLSKSRRLENLIAQLPGEKKNGLFGNLIALSLGLTPNFKSNFDLAEDAKLQLSKDTYDDDLDNLLAQIGDQYADLFLAAKNLSDAILLSDILRVNTEITKAPLSASMIKRYDEHHQDLTLLKALVRQQLPEKYKEIFFDQSKNGYAGYIDGGASQEEFYKFIKPILEKMDGTEELLVKLNREDLLRKQRTFDNGSIPHQIHLGELHAILRRQEDFYPFLKDNREKIEKILTFRIPYYVGPLARGNSRFAWMTRKSEETITPWNFEEVVDKGASAQSFIERMTNFDKNLPNEKVLPKHSLLYEYFTVYNELTKVKYVTEGMRKPAFLSGEQKKAIVDLLFKTNRKVTVKQLKEDYFKKIECFDSVEISGVEDRFNASLGTYHDLLKIIKDKDFLDNEENEDILEDIVLTLTLFEDREMIEERLKTYAHLFDDKVMKQLKRRRYTGWGRLSRKLINGIRDKQSGKTILDFLKSDGFANRNFMQLIHDDSLTFKEDIQKAQVSGQGDSLHEHIANLAGSPAIKKGILQTVKVVDELVKVMGRHKPENIVIEMARENQTTQKGQKNSRERMKRIEEGIKELGSQILKEHPVENTQLQNEKLYLYYLQNGRDMYVDQELDINRLSDYDVDAIVPQSFLKDDSIDNKVLTRSDKNRGKSDNVPSEEVVKKMKNYWRQLLNAKLITQRKFDNLTKAERGGLSELDKAGFIKRQLVETRQITKHVAQILDSRMNTKYDENDKLIREVKVITLKSKLVSDFRKDFQFYKVREINNYHHAHDAYLNAVVGTALIKKYPKLESEFVYGDYKVYDVRKMIAKSEQEIGKATAKYFFYSNIMNFFKTEITLANGEIRKRPLIETNGETGEIVWDKGRDFATVRKVLSMPQVNIVKKTEVQTGGFSKESILPKRNSDKLIARKKDWDPKKYGGFDSPTVAYSVLVVAKVEKGKSKKLKSVKELLGITIMERSSFEKNPIDFLEAKGYKEVKKDLIIKLPKYSLFELENGRKRMLASAGELQKGNELALPSKYVNFLYLASHYEKLKGSPEDNEQKQLFVEQHKHYLDEIIEQISEFSKRVILADANLDKVLSAYNKHRDKPIREQAENIIHLFTLTNLGAPAAFKYFDTTIDRKRYTSTKEVLDATLIHQSITGLYETRIDLSQLGGDSGGSKRTADGSEFESPKKKRKV

SEQ ID NO: 1046 - RNA, 6346 nt, synthetic construct
  misc_feature 1..6346: note = Synthetic
  source 1..6346: mol_type = other RNA
gggaagctcagaataaacgctcaactttggccggatctgccaccatgaagcggaccgccgacggctccgagttcgagtcccccaagaagaagcggaaggtggacaagaagtactccatcggcctggacatcggcaccaactccgtgggctgggccgtgatcaccgacgagtacaaggtgccctccaagaagttcaaggtgctgggcaacaccgaccggcactccatcaagaagaacctgatcggcgccctgctgttcgactccggcgagaccgccgaggccacccggctgaagcggaccgcccggcggcggtacacccggcggaagaaccggatctgctacctgcaggagatcttctccaacgagatggccaaggtggacgactccttcttccaccggctggaggagtccttcctggtggaggaggacaagaagcacgagcggcaccccatcttcggcaacatcgtggacgaggtggcctaccacgagaagtaccccaccatctaccacctgcggaagaagctggtggactccaccgacaaggccgacctgcggctgatctacctggccctggcccacatgatcaagttccggggccacttcctgatcgagggcgacctgaaccccgacaactccgacgtggacaagctgttcatccagctggtgcagacctacaaccagctgttcgaggagaaccccatcaacgcctccggcgtggacgccaaggccatcctgtccgcccggctgtccaagtcccggcggctggagaacctgatcgcccagctgcccggcgagaagaagaacggcctgttcggcaacctgatcgccctgtccctgggcctgacccccaacttcaagtccaacttcgacctggccgaggacgccaagctgcagctgtccaaggacacctacgacgacgacctggacaacctgctggcccagatcggcgaccagtacgccgacctgttcctggccgccaagaacctgtccgacgccatcctgctgtccgacatcctgcgggtgaacaccgagatcaccaaggcccccctgtccgcctccatgatcaagcggtacgacgagcaccaccaggacctgaccctgctgaaggccctggtgcggcagcagctgcccgagaagtacaaggagatcttcttcgaccagtccaagaacggctacgccggctacatcgacggcggcgcctcccaggaggagttctacaagttcatcaagcccatcctggagaagatggacggcaccgaggagctgctggtgaagctgaaccgggaggacctgctgcggaagcagcggaccttcgacaacggctccatcccccaccagatccacctgggcgagctgcacgccatcctgcggcggcaggaggacttctaccccttcctgaaggacaaccgggagaagatcgagaagatcctgaccttccggatcccctactacgtgggccccctggcccggggcaactcccggttcgcctggatgacccggaagtccgaggagaccatcaccccctggaacttcgaggaggtggtggacaagggcgcctccgcccagtccttcatcgagcggatgaccaacttcgacaagaacctgcccaacgagaaggtgctgcccaagcactccctgctgtacgagtacttcaccgtgtacaacgagctgaccaaggtgaagtacgtgaccgagggcatgcggaagcccgccttcctgtccggcgagcagaagaaggccatcgtggacctgctgttcaagaccaaccggaaggtgaccgtgaagcagctgaaggaggactacttcaagaagatcgagtgcttcgactccgtggagatctccggcgtggaggaccggttcaacgcctccctgggcacctaccacgacctgctgaagatcatcaaggacaaggacttcctggacaacgaggagaacgaggacatcctggaggacatcgtgctgaccctgaccctgttcgaggaccgggagatgatcgaggagcggctgaagacctacgcccacctgttcgacgacaaggtgatgaagcagctgaagcggcggcggtacaccggctggggccggctgtcccggaagctgatcaacggcatccgggacaagcagtccggcaagaccatcctggacttcctgaagtccgacggcttcgccaaccggaacttcatgcagctgatccacgacgactccctgaccttcaaggaggacatccagaaggcccaggtgtccggccagggcgactccctgcacgagcacatcgccaacctggccggctcccccgccatcaagaagggcatcctgcagaccgtgaaggtggtggacgagctggtgaaggtgatgggccggcacaagcccgagaacatcgtgatcgagatggcccgggagaaccagaccacccagaagggccagaagaactcccgggagcggatgaagcggatcgaggagggcatcaaggagctgggctcccagatcctgaaggagcaccccgtggagaacacccagctgcagaacgagaagctgtacctgtactacctgcagaacggccgggacatgtacgtggaccaggagctggacatcaaccggctgtccgactacgacgtggacgccatcgtgccccagtccttcctgaaggacgactccatcgacaacaaggtgctgacccggtccgacaagaaccggggcaagtccgacaacgtgccctccgaggaggtggtgaagaagatgaagaactactggcggcagctgctgaacgccaagctgatcacccagcggaagttcgacaacctgaccaaggccgagcggggcggcctgtccgagctggacaaggccggcttcatcaagcggcagctggtggagacccggcagatcaccaagcacgtggcccagatcctggactcccggatgaacaccaagtacgacgagaacgacaagctgatccgggaggtgaaggtgatcaccctgaagtccaagctggtgtccgacttccggaaggacttccagttctacaaggtgcgggagatcaacaactaccaccacgcccacgacgcctacctgaacgccgtggtgggcaccgccctgatcaagaagtaccccaagctggagtccgagttcgtgtacggcgactacaaggtgtacgacgtgcggaagatgatcgccaagtccgagcaggagatcggcaaggccaccgccaagtacttcttctactccaacatcatgaacttcttcaagaccgagatcaccctggccaacggcgagatccggaagcggcccctgatcgagaccaacggcgagaccggcgagatcgtgtgggacaagggccgggacttcgccaccgtgcggaaggtgctgtccatgccccaggtgaacatcgtgaagaagaccgaggtgcagaccggcggcttctccaaggagtccatcctgcccaagcggaactccgacaagctgatcgcccggaagaaggactgggaccccaagaagtacggcggcttcgactcccccaccgtggcctactccgtgctggtggtggccaaggtggagaagggcaagtccaagaagctgaagtccgtgaaggagctgctgggcatcaccatcatggagcggtcctccttcgagaagaaccccatcgacttcctggaggccaagggctacaaggaggtgaagaaggacctgatcatcaagctgcccaagtactccctgttcgagctggagaacggccggaagcggatgctggcctccgccggcgagctgcagaagggcaacgagctggccctgccctccaagtacgtgaacttcctgtacctggcctcccactacgagaagctgaagggctcccccgaggacaacgagcagaagcagctgttcgtggagcagcacaagcactacctggacgagatcatcgagcagatctccgagttctccaagcgggtgatcctggccgacgccaacctggacaaggtgctgtccgcctacaacaagcaccgggacaagcccatccgggagcaggccgagaacatcatccacctgttcaccctgaccaacctgggcgcccccgccgccttcaagtacttcgacaccaccatcgaccggaagcggtacacctccaccaaggaggtgctggacgccaccctgatccaccagtccatcaccggcctgtacgagacccggatcgacctgtcccagctgggcggcgactccggcggctcctccggcggctccaagcggaccgccgacggctccgagttcgagtcccccaagaagaagcggaaggtgtccggcggctcctccggcggctccatgggcctgaacgacaacaaggccggcatggagggcctggacaaggagaagatcaacaagatcatcatggaggccaccaagggctcccggttctacggcaacgagctgaagaaggagaagcaggtgaaccagcggatcgagaacatgatgcagcagaaggcccagatcacctcccagcagctgcggaaggcccagctgcaggtggaccggttcgccatggagctggagcagtcccggaacctgtccaacaccatcgtgcacatcgacatggacgccttctacgccgccgtggagatgcgggacaaccccgagctgaaggacaagcccatcgccgtgggctccatgtccatgctgtccacctccaactaccacgcccggcggttcggcgtgcgggccgccatgcccggcttcatcgccaagcggctgtgcccccagctgatcatcgtgccccccaacttcgacaagtaccgggccgtgtccaaggaggtgaaggagatcctggccgactacgaccccaacttcatggccatgtccctggacgaggcctacctgaacatcaccaagcacctggaggagcggcagaactggcccgaggacaagcggcggtacttcatcaagatgggctcctccgtggagaacgacaaccccggcaaggaggtgaacaagctgtccgagcacgagcggtccatctcccccctgctgttcgaggagtccccctccgacgtgcagccccccggcgaccccttccaggtgaacttcgaggagcagaacaacccccagatcctgcagaactccgtggtgttcggcacctccgcccaggaggtggtgaaggagatccggttccggatcgagcagaagaccaccctgaccgcctccgccggcatcgcccccaacaccatgctggccaaggtgtgctccgacaagaacaagcccaacggccagtaccagatcctgcccaaccggcaggccgtgatggacttcatcaaggacctgcccatccggaaggtgtccggcatcggcaaggtgaccgagaagatgctgaaggccctgggcatcatcacctgcaccgagctgtaccagcagcgggccctgctgtccctgctgttctccgagacctcctggcactacttcctgcacatctccctgggcctgggctccacccacctgacccgggaccgggtgcggaagtccatgtccgtggagcggaccttctccgagatcaacaaggccgaggagcagtactccctgtgccaggagctgtgctccgagctggcccaggacctgcagaaggagcggctgaagggccggaccgtgaccatcaagctgaagaacgtgaacttcgaggtgaagacccgggcctccaccgtgtcctccgtggtgtccaccgccgaggagatcttcgccatcgccaaggagctgctgaagaccgagatcgacgccgacttcccccaccccctgcggctgcggctgatgggcgtgcggatctcctccttccccaacgaggaggaccggaagcaccagcagtagctagcaccagcctcaagaacacccgaatggagtctctaagctacataataccaacttacactttacaaaatgttgtcccccaaaatgtagccattcgtatctgctcctaataaaaagaaagtttcttcacattctctcgagaaaaaaaaaaaatggaaaaaaaaaaaacggaaaaaaaaaaaaggtaaaaaaaaaaaatataaaaaaaaaaaacataaaaaaaaaaaacgaaaaaaaaaaaacgtaaaaaaaaaaaactcaaaaaaaaaaaagataaaaaaaaaaaacctaaaaaaaaaaaatgtaaaaaaaaaaaagggaaaaaaaaaaaacgcaaaaaaaaaaaacacaaaaaaaaaaaatgcaaaaaaaaaaaatcgaaaaaaaaaaaatctaaaaaaaaaaaacgaaaaaaaaaaaacccaaaaaaaaaaaagacaaaaaaaaaaaatagaaaaaaaaaaagttaaaaaaaaaaaactgaaaaaaaaaaaatttaaaaaaaaaaaatctag

SEQ ID NO: 1047 - RNA, 5787 nt, synthetic construct
  misc_feature 1..5787: note = Synthetic
  source 1..5787: mol_type = other RNA
atgaagcggaccgccgacggctccgagttcgagtcccccaagaagaagcggaaggtggacaagaagtactccatcggcctggacatcggcaccaactccgtgggctgggccgtgatcaccgacgagtacaaggtgccctccaagaagttcaaggtgctgggcaacaccgaccggcactccatcaagaagaacctgatcggcgccctgctgttcgactccggcgagaccgccgaggccacccggctgaagcggaccgcccggcggcggtacacccggcggaagaaccggatctgctacctgcaggagatcttctccaacgagatggccaaggtggacgactccttcttccaccggctggaggagtccttcctggtggaggaggacaagaagcacgagcggcaccccatcttcggcaacatcgtggacgaggtggcctaccacgagaagtaccccaccatctaccacctgcggaagaagctggtggactccaccgacaaggccgacctgcggctgatctacctggccctggcccacatgatcaagttccggggccacttcctgatcgagggcgacctgaaccccgacaactccgacgtggacaagctgttcatccagctggtgcagacctacaaccagctgttcgaggagaaccccatcaacgcctccggcgtggacgccaaggccatcctgtccgcccggctgtccaagtcccggcggctggagaacctgatcgcccagctgcccggcgagaagaagaacggcctgttcggcaacctgatcgccctgtccctgggcctgacccccaacttcaagtccaacttcgacctggccgaggacgccaagctgcagctgtccaaggacacctacgacgacgacctggacaacctgctggcccagatcggcgaccagtacgccgacctgttcctggccgccaagaacctgtccgacgccatcctgctgtccgacatcctgcgggtgaacaccgagatcaccaaggcccccctgtccgcctccatgatcaagcggtacgacgagcaccaccaggacctgaccctgctgaaggccctggtgcggcagcagctgcccgagaagtacaaggagatcttcttcgaccagtccaagaacggctacgccggctacatcgacggcggcgcctcccaggaggagttctacaagttcatcaagcccatcctggagaagatggacggcaccgaggagctgctggtgaagctgaaccgggaggacctgctgcggaagcagcggaccttcgacaacggctccatcccccaccagatccacctgggcgagctgcacgccatcctgcggcggcaggaggacttctaccccttcctgaaggacaaccgggagaagatcgagaagatcctgaccttccggatcccctactacgtgggccccctggcccggggcaactcccggttcgcctggatgacccggaagtccgaggagaccatcaccccctggaacttcgaggaggtggtggacaagggcgcctccgcccagtccttcatcgagcggatgaccaacttcgacaagaacctgcccaacgagaaggtgctgcccaagcactccctgctgtacgagtacttcaccgtgtacaacgagctgaccaaggtgaagtacgtgaccgagggcatgcggaagcccgccttcctgtccggcgagcagaagaaggccatcgtggacctgctgttcaagaccaaccggaaggtgaccgtgaagcagctgaaggaggactacttcaagaagatcgagtgcttcgactccgtggagatctccggcgtggaggaccggttcaacgcctccctgggcacctaccacgacctgctgaagatcatcaaggacaaggacttcctggacaacgaggagaacgaggacatcctggaggacatcgtgctgaccctgaccctgttcgaggaccgggagatgatcgaggagcggctgaagacctacgcccacctgttcgacgacaaggtgatgaagcagctgaagcggcggcggtacaccggctggggccggctgtcccggaagctgatcaacggcatccgggacaagcagtccggcaagaccatcctggacttcctgaagtccgacggcttcgccaaccggaacttcatgcagctgatccacgacgactccctgaccttcaaggaggacatccagaaggcccaggtgtccggccagggcgactccctgcacgagcacatcgccaacctggccggctcccccgccatcaagaagggcatcctgcagaccgtgaaggtggtggacgagctggtgaaggtgatgggccggcacaagcccgagaacatcgtgatcgagatggcccgggagaaccagaccacccagaagggccagaagaactcccgggagcggatgaagcggatcgaggagggcatcaaggagctgggctcccagatcctgaaggagcaccccgtggagaacacccagctgcagaacgagaagctgtacctgtactacctgcagaacggccgggacatgtacgtggaccaggagctggacatcaaccggctgtccgactacgacgtggacgccatcgtgccccagtccttcctgaaggacgactccatcgacaacaaggtgctgacccggtccgacaagaaccggggcaagtccgacaacgtgccctccgaggaggtggtgaagaagatgaagaactactggcggcagctgctgaacgccaagctgatcacccagcggaagttcgacaacctgaccaaggccgagcggggcggcctgtccgagctggacaaggccggcttcatcaagcggcagctggtggagacccggcagatcaccaagcacgtggcccagatcctggactcccggatgaacaccaagtacgacgagaacgacaagctgatccgggaggtgaaggtgatcaccctgaagtccaagctggtgtccgacttccggaaggacttccagttctacaaggtgcgggagatcaacaactaccaccacgcccacgacgcctacctgaacgccgtggtgggcaccgccctgatcaagaagtaccccaagctggagtccgagttcgtgtacggcgactacaaggtgtacgacgtgcggaagatgatcgccaagtccgagcaggagatcggcaaggccaccgccaagtacttcttctactccaacatcatgaacttcttcaagaccgagatcaccctggccaacggcgagatccggaagcggcccctgatcgagaccaacggcgagaccggcgagatcgtgtgggacaagggccgggacttcgccaccgtgcggaaggtgctgtccatgccccaggtgaacatcgtgaagaagaccgaggtgcagaccggcggcttctccaaggagtccatcctgcccaagcggaactccgacaagctgatcgcccggaagaaggactgggaccccaagaagtacggcggcttcgactcccccaccgtggcctactccgtgctggtggtggccaaggtggagaagggcaagtccaagaagctgaagtccgtgaaggagctgctgggcatcaccatcatggagcggtcctccttcgagaagaaccccatcgacttcctggaggccaagggctacaaggaggtgaagaaggacctgatcatcaagctgcccaagtactccctgttcgagctggagaacggccggaagcggatgctggcctccgccggcgagctgcagaagggcaacgagctggccctgccctccaagtacgtgaacttcctgtacctggcctcccactacgagaagctgaagggctcccccgaggacaacgagcagaagcagctgttcgtggagcagcacaagcactacctggacgagatcatcgagcagatctccgagttctccaagcgggtgatcctggccgacgccaacctggacaaggtgctgtccgcctacaacaagcaccgggacaagcccatccgggagcaggccgagaacatcatccacctgttcaccctgaccaacctgggcgcccccgccgccttcaagtacttcgacaccaccatcgaccggaagcggtacacctccaccaaggaggtgctggacgccaccctgatccaccagtccatcaccggcctgtacgagacccggatcgacctgtcccagctgggcggcgactccggcggctcctccggcggctccaagcggaccgccgacggctccgagttcgagtcccccaagaagaagcggaaggtgtccggcggctcctccggcggctccatgggcctgaacgacaacaaggccggcatggagggcctggacaaggagaagatcaacaagatcatcatggaggccaccaagggctcccggttctacggcaacgagctgaagaaggagaagcaggtgaaccagcggatcgagaacatgatgcagcagaaggcccagatcacctcccagcagctgcggaaggcccagctgcaggtggaccggttcgccatggagctggagcagtcccggaacctgtccaacaccatcgtgcacatcgacatggacgccttctacgccgccgtggagatgcgggacaaccccgagctgaaggacaagcccatcgccgtgggctccatgtccatgctgtccacctccaactaccacgcccggcggttcggcgtgcgggccgccatgcccggcttcatcgccaagcggctgtgcccccagctgatcatcgtgccccccaacttcgacaagtaccgggccgtgtccaaggaggtgaaggagatcctggccgactacgaccccaacttcatggccatgtccctggacgaggcctacctgaacatcaccaagcacctggaggagcggcagaactggcccgaggacaagcggcggtacttcatcaagatgggctcctccgtggagaacgacaaccccggcaaggaggtgaacaagctgtccgagcacgagcggtccatctcccccctgctgttcgaggagtccccctccgacgtgcagccccccggcgaccccttccaggtgaacttcgaggagcagaacaacccccagatcctgcagaactccgtggtgttcggcacctccgcccaggaggtggtgaaggagatccggttccggatcgagcagaagaccaccctgaccgcctccgccggcatcgcccccaacaccatgctggccaaggtgtgctccgacaagaacaagcccaacggccagtaccagatcctgcccaaccggcaggccgtgatggacttcatcaaggacctgcccatccggaaggtgtccggcatcggcaaggtgaccgagaagatgctgaaggccctgggcatcatcacctgcaccgagctgtaccagcagcgggccctgctgtccctgctgttctccgagacctcctggcactacttcctgcacatctccctgggcctgggctccacccacctgacccgggaccgggtgcggaagtccatgtccgtggagcggaccttctccgagatcaacaaggccgaggagcagtactccctgtgccaggagctgtgctccgagctggcccaggacctgcagaaggagcggctgaagggccggaccgtgaccatcaagctgaagaacgtgaacttcgaggtgaagacccgggcctccaccgtgtcctccgtggtgtccaccgccgaggagatcttcgccatcgccaaggagctgctgaagaccgagatcgacgccgacttcccccaccccctgcggctgcggctgatgggcgtgcggatctcctccttccccaacgaggaggaccggaagcaccagcagtag

SEQ ID NO: 1048 - protein, 1928 aa, synthetic construct
  REGION 1..1928: note = Synthetic
MKRTADGSEFESPKKKRKVDKKYSIGLDIGTNSVGWAVITDEYKVPSKKFKVLGNTDRHSIKKNLIGALLFDSGETAEATRLKRTARRRYTRRKNRICYLQEIFSNEMAKVDDSFFHRLEESFLVEEDKKHERHPIFGNIVDEVAYHEKYPTIYHLRKKLVDSTDKADLRLIYLALAHMIKFRGHFLIEGDLNPDNSDVDKLFIQLVQTYNQLFEENPINASGVDAKAILSARLSKSRRLENLIAQLPGEKKNGLFGNLIALSLGLTPNFKSNFDLAEDAKLQLSKDTYDDDLDNLLAQIGDQYADLFLAAKNLSDAILLSDILRVNTEITKAPLSASMIKRYDEHHQDLTLLKALVRQQLPEKYKEIFFDQSKNGYAGYIDGGASQEEFYKFIKPILEKMDGTEELLVKLNREDLLRKQRTFDNGSIPHQIHLGELHAILRRQEDFYPFLKDNREKIEKILTFRIPYYVGPLARGNSRFAWMTRKSEETITPWNFEEVVDKGASAQSFIERMTNFDKNLPNEKVLPKHSLLYEYFTVYNELTKVKYVTEGMRKPAFLSGEQKKAIVDLLFKTNRKVTVKQLKEDYFKKIECFDSVEISGVEDRFNASLGTYHDLLKIIKDKDFLDNEENEDILEDIVLTLTLFEDREMIEERLKTYAHLFDDKVMKQLKRRRYTGWGRLSRKLINGIRDKQSGKTILDFLKSDGFANRNFMQLIHDDSLTFKEDIQKAQVSGQGDSLHEHIANLAGSPAIKKGILQTVKVVDELVKVMGRHKPENIVIEMARENQTTQKGQKNSRERMKRIEEGIKELGSQILKEHPVENTQLQNEKLYLYYLQNGRDMYVDQELDINRLSDYDVDAIVPQSFLKDDSIDNKVLTRSDKNRGKSDNVPSEEVVKKMKNYWRQLLNAKLITQRKFDNLTKAERGGLSELDKAGFIKRQLVETRQITKHVAQILDSRMNTKYDENDKLIREVKVITLKSKLVSDFRKDFQFYKVREINNYHHAHDAYLNAVVGTALIKKYPKLESEFVYGDYKVYDVRKMIAKSEQEIGKATAKYFFYSNIMNFFKTEITLANGEIRKRPLIETNGETGEIVWDKGRDFATVRKVLSMPQVNIVKKTEVQTGGFSKESILPKRNSDKLIARKKDWDPKKYGGFDSPTVAYSVLVVAKVEKGKSKKLKSVKELLGITIMERSSFEKNPIDFLEAKGYKEVKKDLIIKLPKYSLFELENGRKRMLASAGELQKGNELALPSKYVNFLYLASHYEKLKGSPEDNEQKQLFVEQHKHYLDEIIEQISEFSKRVILADANLDKVLSAYNKHRDKPIREQAENIIHLFTLTNLGAPAAFKYFDTTIDRKRYTSTKEVLDATLIHQSITGLYETRIDLSQLGGDSGGSSGGSKRTADGSEFESPKKKRKVSGGSSGGSMGLNDNKAGMEGLDKEKINKIIMEATKGSRFYGNELKKEKQVNQRIENMMQQKAQITSQQLRKAQLQVDRFAMELEQSRNLSNTIVHIDMDAFYAAVEMRDNPELKDKPIAVGSMSMLSTSNYHARRFGVRAAMPGFIAKRLCPQLIIVPPNFDKYRAVSKEVKEILADYDPNFMAMSLDEAYLNITKHLEERQNWPEDKRRYFIKMGSSVENDNPGKEVNKLSEHERSISPLLFEESPSDVQPPGDPFQVNFEEQNNPQILQNSVVFGTSAQEVVKEIRFRIEQKTTLTASAGIAPNTMLAKVCSDKNKPNGQYQILPNRQAVMDFIKDLPIRKVSGIGKVTEKMLKALGIITCTELYQQRALLSLLFSETSWHYFLHISLGLGSTHLTRDRVRKSMSVERTFSEINKAEEQYSLCQELCSELAQDLQKERLKGRTVTIKLKNVNFEVKTRASTVSSVVSTAEEIFAIAKELLKTEIDADFPHPLRLRLMGVRISSFPNEEDRKHQQ

SEQ ID NO: 1049 - RNA, 8033 nt, synthetic construct
  misc_feature 1..8033: note = Synthetic
  source 1..8033: mol_type = other RNA
gggaagctcagaataaacgctcaactttggccggatctgccaccatgcccaagaagaagcggaaggtggacaagaagtactccatcggcctggacatcggcaccaactccgtgggctgggccgtgatcaccgacgagtacaaggtgccctccaagaagttcaaggtgctgggcaacaccgaccggcactccatcaagaagaacctgatcggcgccctgctgttcgactccggcgagaccgccgaggccacccggctgaagcggaccgcccggcggcggtacacccggcggaagaaccggatctgctacctgcaggagatcttctccaacgagatggccaaggtggacgactccttcttccaccggctggaggagtccttcctggtggaggaggacaagaagcacgagcggcaccccatcttcggcaacatcgtggacgaggtggcctaccacgagaagtaccccaccatctaccacctgcggaagaagctggtggactccaccgacaaggccgacctgcggctgatctacctggccctggcccacatgatcaagttccggggccacttcctgatcgagggcgacctgaaccccgacaactccgacgtggacaagctgttcatccagctggtgcagacctacaaccagctgttcgaggagaaccccatcaacgcctccggcgtggacgccaaggccatcctgtccgcccggctgtccaagtcccggcggctggagaacctgatcgcccagctgcccggcgagaagaagaacggcctgttcggcaacctgatcgccctgtccctgggcctgacccccaacttcaagtccaacttcgacctggccgaggacgccaagctgcagctgtccaaggacacctacgacgacgacctggacaacctgctggcccagatcggcgaccagtacgccgacctgttcctggccgccaagaacctgtccgacgccatcctgctgtccgacatcctgcgggtgaacaccgagatcaccaaggcccccctgtccgcctccatgatcaagcggtacgacgagcaccaccaggacctgaccctgctgaaggccctggtgcggcagcagctgcccgagaagtacaaggagatcttcttcgaccagtccaagaacggctacgccggctacatcgacggcggcgcctcccaggaggagttctacaagttcatcaagcccatcctggagaagatggacggcaccgaggagctgctggtgaagctgaaccgggaggacctgctgcggaagcagcggaccttcgacaacggctccatcccccaccagatccacctgggcgagctgcacgccatcctgcggcggcaggaggacttctaccccttcctgaaggacaaccgggagaagatcgagaagatcctgaccttccggatcccctactacgtgggccccctggcccggggcaactcccggttcgcctggatgacccggaagtccgaggagaccatcaccccctggaacttcgaggaggtggtggacaagggcgcctccgcccagtccttcatcgagcggatgaccaacttcgacaagaacctgcccaacgagaaggtgctgcccaagcactccctgctgtacgagtacttcaccgtgtacaacgagctgaccaaggtgaagtacgtgaccgagggcatgcggaagcccgccttcctgtccggcgagcagaagaaggccatcgtggacctgctgttcaagaccaaccggaaggtgaccgtgaagcagctgaaggaggactacttcaagaagatcgagtgcttcgactccgtggagatctccggcgtggaggaccggttcaacgcctccctgggcacctaccacgacctgctgaagatcatcaaggacaaggacttcctggacaacgaggagaacgaggacatcctggaggacatcgtgctgaccctgaccctgttcgaggaccgggagatgatcgaggagcggctgaagacctacgcccacctgttcgacgacaaggtgatgaagcagctgaagcggcggcggtacaccggctggggccggctgtcccggaagctgatcaacggcatccgggacaagcagtccggcaagaccatcctggacttcctgaagtccgacggcttcgccaaccggaacttcatgcagctgatccacgacgactccctgaccttcaaggaggacatccagaaggcccaggtgtccggccagggcgactccctgcacgagcacatcgccaacctggccggctcccccgccatcaagaagggcatcctgcagaccgtgaaggtggtggacgagctggtgaaggtgatgggccggcacaagcccgagaacatcgtgatcgagatggcccgggagaaccagaccacccagaagggccagaagaactcccgggagcggatgaagcggatcgaggagggcatcaaggagctgggctcccagatcctgaaggagcaccccgtggagaacacccagctgcagaacgagaagctgtacctgtactacctgcagaacggccgggacatgtacgtggaccaggagctggacatcaaccggctgtccgactacgacgtggacgccatcgtgccccagtccttcctgaaggacgactccatcgacaacaaggtgctgacccggtccgacaagaaccggggcaagtccgacaacgtgccctccgaggaggtggtgaagaagatgaagaactactggcggcagctgctgaacgccaagctgatcacccagcggaagttcgacaacctgaccaaggccgagcggggcggcctgtccgagctggacaaggccggcttcatcaagcggcagctggtggagacccggcagatcaccaagcacgtggcccagatcctggactcccggatgaacaccaagtacgacgagaacgacaagctgatccgggaggtgaaggtgatcaccctgaagtccaagctggtgtccgacttccggaaggacttccagttctacaaggtgcgggagatcaacaactaccaccacgcccacgacgcctacctgaacgccgtggtgggcaccgccctgatcaagaagtaccccaagctggagtccgagttcgtgtacggcgactacaaggtgtacgacgtgcggaagatgatcgccaagtccgagcaggagatcggcaaggccaccgccaagtacttcttctactccaacatcatgaacttcttcaagaccgagatcaccctggccaacggcgagatccggaagcggcccctgatcgagaccaacggcgagaccggcgagatcgtgtgggacaagggccgggacttcgccaccgtgcggaaggtgctgtccatgccccaggtgaacatcgtgaagaagaccgaggtgcagaccggcggcttctccaaggagtccatcctgcccaagcggaactccgacaagctgatcgcccggaagaaggactgggaccccaagaagtacggcggcttcgactcccccaccgtggcctactccgtgctggtggtggccaaggtggagaagggcaagtccaagaagctgaagtccgtgaaggagctgctgggcatcaccatcatggagcggtcctccttcgagaagaaccccatcgacttcctggaggccaagggctacaaggaggtgaagaaggacctgatcatcaagctgcccaagtactccctgttcgagctggagaacggccggaagcggatgctggcctccgccggcgagctgcagaagggcaacgagctggccctgccctccaagtacgtgaacttcctgtacctggcctcccactacgagaagctgaagggctcccccgaggacaacgagcagaagcagctgttcgtggagcagcacaagcactacctggacgagatcatcgagcagatctccgagttctccaagcgggtgatcctggccgacgccaacctggacaaggtgctgtccgcctacaacaagcaccgggacaagcccatccgggagcaggccgagaacatcatccacctgttcaccctgaccaacctgggcgcccccgccgccttcaagtacttcgacaccaccatcgaccggaagcggtacacctccaccaaggaggtgctggacgccaccctgatccaccagtccatcaccggcctgtacgagacccggatcgacctgtcccagctgggcggcgactccggcggctcctccggcggctccaagcggaccgccgacggctccgagttcgagtcccccaagaagaagcggaaggtgtccggcggctcctccggcggctccgcctccaacttcacccagttcgtgctggtggacaacggcggcaccggcgacgtgaccgtggccccctccaacttcgccaacggcgtggccgagtggatctcctccaactcccggtcccaggcctacaaggtgacctgctccgtgcggcagtcctccgcccagaaccggaagtacaccatcaaggtggaggtgcccaaggtggccacccagaccgtgggcggcgtggagctgcccgtggccgcctggcggtcctacctgaacatggagctgaccatccccatcttcgccaccaactccgactgcgagctgatcgtgaaggccatgcagggcctgctgaaggacggcaaccccatcccctccgccatcgccgccaactccggcatctacggcgcccccgagtccgccaccgagtccggcggcacctccaccgagtccgagggctccgccggcacctccaccgagtccgagggctccgccggctccgccggctccacctccggctccggctcctccatggactccaccaaggagaagtgcgactcctacaaggacgacctgctgctgcggatgggcctgaacgacaacaaggccggcatggagggcctggacaaggagaagatcaacaagatcatcatggaggccaccaagggctcccggttctacggcaacgagctgaagaaggagaagcaggtgaaccagcggatcgagaacatgatgcagcagaaggcccagatcacctcccagcagctgcggaaggcccagctgcaggtggaccggttcgccatggagctggagcagtcccggaacctgtccaacaccatcgtgcacatcgacatggacgccttctacgccgccgtggagatgcgggacaaccccgagctgaaggacaagcccatcgccgtgggctccatgtccatgctgtccacctccaactaccacgcccggcggttcggcgtgcgggccgccatgcccggcttcatcgccaagcggctgtgcccccagctgatcatcgtgccccccaacttcgacaagtaccgggccgtgtccaaggaggtgaaggagatcctggccgactacgaccccaacttcatggccatgtccctggacgaggcctacctgaacatcaccaagcacctggaggagcggcagaactggcccgaggacaagcggcggtacttcatcaagatgggctcctccgtggagaacgacaaccccggcaaggaggtgaacaagctgtccgagcacgagcggtccatctcccccctgctgttcgaggagtccccctccgacgtgcagccccccggcgaccccttccaggtgaacttcgaggagcagaacaacccccagatcctgcagaactccgtggtgttcggcacctccgcccaggaggtggtgaaggagatccggttccggatcgagcagaagaccaccctgaccgcctccgccggcatcgcccccaacaccatgctggccaaggtgtgctccgacaagaacaagcccaacggccagtaccagatcctgcccaaccggcaggccgtgatggacttcatcaaggacctgcccatccggaaggtgtccggcatcggcaaggtgaccgagaagatgctgaaggccctgggcatcatcacctgcaccgagctgtaccagcagcgggccctgctgtccctgctgttctccgagacctcctggcactacttcctgcacatctccctgggcctgggctccacccacctgacccgggacggcgagcggaagtccatgtccgtggagcggaccttctccgagatcaacaaggccgaggagcagtactccctgtgccaggagctgtgctccgagctggcccaggacctgcagaaggagcggctgaagggccggaccgtgaccatcaagctgaagaacgtgaacttcgaggtgaagacccgggcctccaccgtgtcctccgtggtgtccaccgccgaggagatcttcgccatcgccaaggagctgctgaagaccgagatcgacgccgacttcccccaccccctgcggctgcggctgatgggcgtgcggatctcctccttccccaacgaggaggaccggaagcaccagcagcggtccatcatcggcttcctgcaggccggcaaccaggccctgtccgccaccgagtgcaccctggagaagaccgacaaggacaagttcgtgaagcccctggagatgtcccacaagaagtccttcttcgacaagaagcggtccgagcggaagtggtcccaccaggacaccttcaagtgcgaggccgtgaacaagcagtccttccagacctcccagcccttccaggtgctgaagaagaagatgaacgagaacctggagatctccgagaactccgacgactgccagatcctgacctgccccgtgtgcttccgggcccagggctgcatctccctggaggccctgaacaagcacgtggacgagtgcctggacggcccctccatctccgagaacttcaagatgttctcctgctcccacgtgtccgccaccaaggtgaacaagaaggagaacgtgcccgcctcctccctgtgcgagaagcaggactacgaggcccaccccaagatcaaggagatctcctccgtggactgcatcgccctggtggacaccatcgacaactcctccaaggccgagtccatcgacgccctgtccaacaagcactccaaggaggagtgctcctccctgccctccaagtccttcaacatcgagcactgccaccagaactcctcctccaccgtgtccctggagaacgaggacgtgggctccttccggcaggagtaccggcagccctacctgtgcgaggtgaagaccggccaggccctggtgtgccccgtgtgcaacgtggagcagaagacctccgacctgaccctgttcaacgtgcacgtggacgtgtgcctgaacaagtccttcatccaggagctgcggaaggacaagttcaaccccgtgaaccagcccaaggagtcctcccggtccaccggctcctcctccggcgtgcagaaggccgtgacccggaccaagcggcccggcctgatgaccaagtactccacctccaagaagatcaagcccaacaaccccaagcacaccctggacatcttcttcaagtccggcggctccaagcggaccgccgacggctccgagttcgagcccaagaagaagcggaaggtgtccgagtccgccacccccgagtccgtgtccggctggcggctgttcaagaagatctcctagctagcaccagcctcaagaacacccgaatggagtctctaagctacataataccaacttacactttacaaaatgttgtcccccaaaatgtagccattcgtatctgctcctaataaaaagaaagtttcttcacattctctcgagaaaaaaaaaaaatggaaaaaaaaaaaacggaaaaaaaaaaaaggtaaaaaaaaaaaatataaaaaaaaaaaacataaaaaaaaaaaacgaaaaaaaaaaaacgtaaaaaaaaaaaactcaaaaaaaaaaaagataaaaaaaaaaaacctaaaaaaaaaaaatgtaaaaaaaaaaaagggaaaaaaaaaaaacgcaaaaaaaaaaaacacaaaaaaaaaaaatgcaaaaaaaaaaaatcgaaaaaaaaaaaatctaaaaaaaaaaaacgaaaaaaaaaaaacccaaaaaaaaaaaagacaaaaaaaaaaaatagaaaaaaaaaaaagttaaaaaaaaaaaactgaaaaaaaaaaaatttaaaaaaaaaaaatctag

SEQ ID NO: 1050 - RNA, 7473 nt, synthetic construct
  misc_feature 1..7473: note = Synthetic
  source 1..7473: mol_type = other RNA
atgcccaagaagaagcggaaggtggacaagaagtactccatcggcctggacatcggcaccaactccgtgggctgggccgtgatcaccgacgagtacaaggtgccctccaagaagttcaaggtgctgggcaacaccgaccggcactccatcaagaagaacctgatcggcgccctgctgttcgactccggcgagaccgccgaggccacccggctgaagcggaccgcccggcggcggtacacccggcggaagaaccggatctgctacctgcaggagatcttctccaacgagatggccaaggtggacgactccttcttccaccggctggaggagtccttcctggtggaggaggacaagaagcacgagcggcaccccatcttcggcaacatcgtggacgaggtggcctaccacgagaagtaccccaccatctaccacctgcggaagaagctggtggactccaccgacaaggccgacctgcggctgatctacctggccctggcccacatgatcaagttccggggccacttcctgatcgagggcgacctgaaccccgacaactccgacgtggacaagctgttcatccagctggtgcagacctacaaccagctgttcgaggagaaccccatcaacgcctccggcgtggacgccaaggccatcctgtccgcccggctgtccaagtcccggcggctggagaacctgatcgcccagctgcccggcgagaagaagaacggcctgttcggcaacctgatcgccctgtccctgggcctgacccccaacttcaagtccaacttcgacctggccgaggacgccaagctgcagctgtccaaggacacctacgacgacgacctggacaacctgctggcccagatcggcgaccagtacgccgacctgttcctggccgccaagaacctgtccgacgccatcctgctgtccgacatcctgcgggtgaacaccgagatcaccaaggcccccctgtccgcctccatgatcaagcggtacgacgagcaccaccaggacctgaccctgctgaaggccctggtgcggcagcagctgcccgagaagtacaaggagatcttcttcgaccagtccaagaacggctacgccggctacatcgacggcggcgcctcccaggaggagttctacaagttcatcaagcccatcctggagaagatggacggcaccgaggagctgctggtgaagctgaaccgggaggacctgctgcggaagcagcggaccttcgacaacggctccatcccccaccagatccacctgggcgagctgcacgccatcctgcggcggcaggaggacttctaccccttcctgaaggacaaccgggagaagatcgagaagatcctgaccttccggatcccctactacgtgggccccctggcccggggcaactcccggttcgcctggatgacccggaagtccgaggagaccatcaccccctggaacttcgaggaggtggtggacaagggcgcctccgcccagtccttcatcgagcggatgaccaacttcgacaagaacctgcccaacgagaaggtgctgcccaagcactccctgctgtacgagtacttcaccgtgtacaacgagctgaccaaggtgaagtacgtgaccgagggcatgcggaagcccgccttcctgtccggcgagcagaagaaggccatcgtggacctgctgttcaagaccaaccggaaggtgaccgtgaagcagctgaaggaggactacttcaagaagatcgagtgcttcgactccgtggagatctccggcgtggaggaccggttcaacgcctccctgggcacctaccacgacctgctgaagatcatcaaggacaaggacttcctggacaacgaggagaacgaggacatcctggaggacatcgtgctgaccctgaccctgttcgaggaccgggagatgatcgaggagcggctgaagacctacgcccacctgttcgacgacaaggtgatgaagcagctgaagcggcggcggtacaccggctggggccggctgtcccggaagctgatcaacggcatccgggacaagcagtccggcaagaccatcctggacttcctgaagtccgacggcttcgccaaccggaacttcatgcagctgatccacgacgactccctgaccttcaaggaggacatccagaaggcccaggtgtccggccagggcgactccctgcacgagcacatcgccaacctggccggctcccccgccatcaagaagggcatcctgcagaccgtgaaggtggtggacgagctggtgaaggtgatgggccggcacaagcccgagaacatcgtgatcgagatggcccgggagaaccagaccacccagaagggccagaagaactcccgggagcggatgaagcggatcgaggagggcatcaaggagctgggctcccagatcctgaaggagcaccccgtggagaacacccagctgcagaacgagaagctgtacctgtactacctgcagaacggccgggacatgtacgtggaccaggagctggacatcaaccggctgtccgactacgacgtggacgccatcgtgccccagtccttcctgaaggacgactccatcgacaacaaggtgctgacccggtccgacaagaaccggggcaagtccgacaacgtgccctccgaggaggtggtgaagaagatgaagaactactggcggcagctgctgaacgccaagctgatcacccagcggaagttcgacaacctgaccaaggccgagcggggcggcctgtccgagctggacaaggccggcttcatcaagcggcagctggtggagacccggcagatcaccaagcacgtggcccagatcctggactcccggatgaacaccaagtacgacgagaacgacaagctgatccgggaggtgaaggtgatcaccctgaagtccaagctggtgtccgacttccggaaggacttccagttctacaaggtgcgggagatcaacaactaccaccacgcccacgacgcctacctgaacgccgtggtgggcaccgccctgatcaagaagtaccccaagctggagtccgagttcgtgtacggcgactacaaggtgtacgacgtgcggaagatgatcgccaagtccgagcaggagatcggcaaggccaccgccaagtacttcttctactccaacatcatgaacttcttcaagaccgagatcaccctggccaacggcgagatccggaagcggcccctgatcgagaccaacggcgagaccggcgagatcgtgtgggacaagggccgggacttcgccaccgtgcggaaggtgctgtccatgccccaggtgaacatcgtgaagaagaccgaggtgcagaccggcggcttctccaaggagtccatcctgcccaagcggaactccgacaagctgatcgcccggaagaaggactgggaccccaagaagtacggcggcttcgactcccccaccgtggcctactccgtgctggtggtggccaaggtggagaagggcaagtccaagaagctgaagtccgtgaaggagctgctgggcatcaccatcatggagcggtcctccttcgagaagaaccccatcgacttcctggaggccaagggctacaaggaggtgaagaaggacctgatcatcaagctgcccaagtactccctgttcgagctggagaacggccggaagcggatgctggcctccgccggcgagctgcagaagggcaacgagctggccctgccctccaagtacgtgaacttcctgtacctggcctcccactacgagaagctgaagggctcccccgaggacaacgagcagaagcagctgttcgtggagcagcacaagcactacctggacgagatcatcgagcagatctccgagttctccaagcgggtgatcctggccgacgccaacctggacaaggtgctgtccgcctacaacaagcaccgggacaagcccatccgggagcaggccgagaacatcatccacctgttcaccctgaccaacctgggcgcccccgccgccttcaagtacttcgacaccaccatcgaccggaagcggtacacctccaccaaggaggtgctggacgccaccctgatccaccagtccatcaccggcctgtacgagacccggatcgacctgtcccagctgggcggcgactccggcggctcctccggcggctccaagcggaccgccgacggctccgagttcgagtcccccaagaagaagcggaaggtgtccggcggctcctccggcggctccgcctccaacttcacccagttcgtgctggtggacaacggcggcaccggcgacgtgaccgtggccccctccaacttcgccaacggcgtggccgagtggatctcctccaactcccggtcccaggcctacaaggtgacctgctccgtgcggcagtcctccgcccagaaccggaagtacaccatcaaggtggaggtgcccaaggtggccacccagaccgtgggcggcgtggagctgcccgtggccgcctggcggtcctacctgaacatggagctgaccatccccatcttcgccaccaactccgactgcgagctgatcgtgaaggccatgcagggcctgctgaaggacggcaaccccatcccctccgccatcgccgccaactccggcatctacggcgcccccgagtccgccaccgagtccggcggcacctccaccgagtccgagggctccgccggcacctccaccgagtccgagggctccgccggctccgccggctccacctccggctccggctcctccatggactccaccaaggagaagtgcgactcctacaaggacgacctgctgctgcggatgggcctgaacgacaacaaggccggcatggagggcctggacaaggagaagatcaacaagatcatcatggaggccaccaagggctcccggttctacggcaacgagctgaagaaggagaagcaggtgaaccagcggatcgagaacatgatgcagcagaaggcccagatcacctcccagcagctgcggaaggcccagctgcaggtggaccggttcgccatggagctggagcagtcccggaacctgtccaacaccatcgtgcacatcgacatggacgccttctacgccgccgtggagatgcgggacaaccccgagctgaaggacaagcccatcgccgtgggctccatgtccatgctgtccacctccaactaccacgcccggcggttcggcgtgcgggccgccatgcccggcttcatcgccaagcggctgtgcccccagctgatcatcgtgccccccaacttcgacaagtaccgggccgtgtccaaggaggtgaaggagatcctggccgactacgaccccaacttcatggccatgtccctggacgaggcctacctgaacatcaccaagcacctggaggagcggcagaactggcccgaggacaagcggcggtacttcatcaagatgggctcctccgtggagaacgacaaccccggcaaggaggtgaacaagctgtccgagcacgagcggtccatctcccccctgctgttcgaggagtccccctccgacgtgcagccccccggcgaccccttccaggtgaacttcgaggagcagaacaacccccagatcctgcagaactccgtggtgttcggcacctccgcccaggaggtggtgaaggagatccggttccggatcgagcagaagaccaccctgaccgcctccgccggcatcgcccccaacaccatgctggccaaggtgtgctccgacaagaacaagcccaacggccagtaccagatcctgcccaaccggcaggccgtgatggacttcatcaaggacctgcccatccggaaggtgtccggcatcggcaaggtgaccgagaagatgctgaaggccctgggcatcatcacctgcaccgagctgtaccagcagcgggccctgctgtccctgctgttctccgagacctcctggcactacttcctgcacatctccctgggcctgggctccacccacctgacccgggacggcgagcggaagtccatgtccgtggagcggaccttctccgagatcaacaaggccgaggagcagtactccctgtgccaggagctgtgctccgagctggcccaggacctgcagaaggagcggctgaagggccggaccgtgaccatcaagctgaagaacgtgaacttcgaggtgaagacccgggcctccaccgtgtcctccgtggtgtccaccgccgaggagatcttcgccatcgccaaggagctgctgaagaccgagatcgacgccgacttcccccaccccctgcggctgcggctgatgggcgtgcggatctcctccttccccaacgaggaggaccggaagcaccagcagcggtccatcatcggcttcctgcaggccggcaaccaggccctgtccgccaccgagtgcaccctggagaagaccgacaaggacaagttcgtgaagcccctggagatgtcccacaagaagtccttcttcgacaagaagcggtccgagcggaagtggtcccaccaggacaccttcaagtgcgaggccgtgaacaagcagtccttccagacctcccagcccttccaggtgctgaagaagaagatgaacgagaacctggagatctccgagaactccgacgactgccagatcctgacctgccccgtgtgcttccgggcccagggctgcatctccctggaggccctgaacaagcacgtggacgagtgcctggacggcccctccatctccgagaacttcaagatgttctcctgctcccacgtgtccgccaccaaggtgaacaagaaggagaacgtgcccgcctcctccctgtgcgagaagcaggactacgaggcccaccccaagatcaaggagatctcctccgtggactgcatcgccctggtggacaccatcgacaactcctccaaggccgagtccatcgacgccctgtccaacaagcactccaaggaggagtgctcctccctgccctccaagtccttcaacatcgagcactgccaccagaactcctcctccaccgtgtccctggagaacgaggacgtgggctccttccggcaggagtaccggcagccctacctgtgcgaggtgaagaccggccaggccctggtgtgccccgtgtgcaacgtggagcagaagacctccgacctgaccctgttcaacgtgcacgtggacgtgtgcctgaacaagtccttcatccaggagctgcggaaggacaagttcaaccccgtgaaccagcccaaggagtcctcccggtccaccggctcctcctccggcgtgcagaaggccgtgacccggaccaagcggcccggcctgatgaccaagtactccacctccaagaagatcaagcccaacaaccccaagcacaccctggacatcttcttcaagtccggcggctccaagcggaccgccgacggctccgagttcgagcccaagaagaagcggaaggtgtccgagtccgccacccccgagtccgtgtccggctggcggctgttcaagaagatctcctag

SEQ ID NO: 1051 - protein, 2490 aa, synthetic construct
  REGION 1..2490: note = Synthetic
MPKKKRKVDKKYSIGLDIGTNSVGWAVITDEYKVPSKKFKVLGNTDRHSIKKNLIGALLFDSGETAEATRLKRTARRRYTRRKNRICYLQEIFSNEMAKVDDSFFHRLEESFLVEEDKKHERHPIFGNIVDEVAYHEKYPTIYHLRKKLVDSTDKADLRLIYLALAHMIKFRGHFLIEGDLNPDNSDVDKLFIQLVQTYNQLFEENPINASGVDAKAILSARLSKSRRLENLIAQLPGEKKNGLFGNLIALSLGLTPNFKSNFDLAEDAKLQLSKDTYDDDLDNLLAQIGDQYADLFLAAKNLSDAILLSDILRVNTEITKAPLSASMIKRYDEHHQDLTLLKALVRQQLPEKYKEIFFDQSKNGYAGYIDGGASQEEFYKFIKPILEKMDGTEELLVKLNREDLLRKQRTFDNGSIPHQIHLGELHAILRRQEDFYPFLKDNREKIEKILTFRIPYYVGPLARGNSRFAWMTRKSEETITPWNFEEVVDKGASAQSFIERMTNFDKNLPNEKVLPKHSLLYEYFTVYNELTKVKYVTEGMRKPAFLSGEQKKAIVDLLFKTNRKVTVKQLKEDYFKKIECFDSVEISGVEDRFNASLGTYHDLLKIIKDKDFLDNEENEDILEDIVLTLTLFEDREMIEERLKTYAHLFDDKVMKQLKRRRYTGWGRLSRKLINGIRDKQSGKTILDFLKSDGFANRNFMQLIHDDSLTFKEDIQKAQVSGQGDSLHEHIANLAGSPAIKKGILQTVKVVDELVKVMGRHKPENIVIEMARENQTTQKGQKNSRERMKRIEEGIKELGSQILKEHPVENTQLQNEKLYLYYLQNGRDMYVDQELDINRLSDYDVDAIVPQSFLKDDSIDNKVLTRSDKNRGKSDNVPSEEVVKKMKNYWRQLLNAKLITQRKFDNLTKAERGGLSELDKAGFIKRQLVETRQITKHVAQILDSRMNTKYDENDKLIREVKVITLKSKLVSDFRKDFQFYKVREINNYHHAHDAYLNAVVGTALIKKYPKLESEFVYGDYKVYDVRKMIAKSEQEIGKATAKYFFYSNIMNFFKTEITLANGEIRKRPLIETNGETGEIVWDKGRDFATVRKVLSMPQVNIVKKTEVQTGGFSKESILPKRNSDKLIARKKDWDPKKYGGFDSPTVAYSVLVVAKVEKGKSKKLKSVKELLGITIMERSSFEKNPIDFLEAKGYKEVKKDLIIKLPKYSLFELENGRKRMLASAGELQKGNELALPSKYVNFLYLASHYEKLKGSPEDNEQKQLFVEQHKHYLDEIIEQISEFSKRVILADANLDKVLSAYNKHRDKPIREQAENIIHLFTLTNLGAPAAFKYFDTTIDRKRYTSTKEVLDATLIHQSITGLYETRIDLSQLGGDSGGSSGGSKRTADGSEFESPKKKRKVSGGSSGGSASNFTQFVLVDNGGTGDVTVAPSNFANGVAEWISSNSRSQAYKVTCSVRQSSAQNRKYTIKVEVPKVATQTVGGVELPVAAWRSYLNMELTIPIFATNSDCELIVKAMQGLLKDGNPIPSAIAANSGIYGAPESATESGGTSTESEGSAGTSTESEGSAGSAGSTSGSGSSMDSTKEKCDSYKDDLLLRMGLNDNKAGMEGLDKEKINKIIMEATKGSRFYGNELKKEKQVNQRIENMMQQKAQITSQQLRKAQLQVDRFAMELEQSRNLSNTIVHIDMDAFYAAVEMRDNPELKDKPIAVGSMSMLSTSNYHARRFGVRAAMPGFIAKRLCPQLIIVPPNFDKYRAVSKEVKEILADYDPNFMAMSLDEAYLNITKHLEERQNWPEDKRRYFIKMGSSVENDNPGKEVNKLSEHERSISPLLFEESPSDVQPPGDPFQVNFEEQNNPQILQNSVVFGTSAQEVVKEIRFRIEQKTTLTASAGIAPNTMLAKVCSDKNKPNGQYQILPNRQAVMDFIKDLPIRKVSGIGKVTEKMLKALGIITCTELYQQRALLSLLFSETSWHYFLHISLGLGSTHLTRDGERKSMSVERTFSEINKAEEQYSLCQELCSELAQDLQKERLKGRTVTIKLKNVNFEVKTRASTVSSVVSTAEEIFAIAKELLKTEIDADFPHPLRLRLMGVRISSFPNEEDRKHQQRSIIGFLQAGNQALSATECTLEKTDKDKFVKPLEMSHKKSFFDKKRSERKWSHQDTFKCEAVNKQSFQTSQPFQVLKKKMNENLEISENSDDCQILTCPVCFRAQGCISLEALNKHVDECLDGPSISENFKMFSCSHVSATKVNKKENVPASSLCEKQDYEAHPKIKEISSVDCIALVDTIDNSSKAESIDALSNKHSKEECSSLPSKSFNIEHCHQNSSSTVSLENEDVGSFRQEYRQPYLCEVKTGQALVCPVCNVEQKTSDLTLFNVHVDVCLNKSFIQELRKDKFNPVNQPKESSRSTGSSSGVQKAVTRTKRPGLMTKYSTSKKIKPNNPKHTLDIFFKSGGSKRTADGSEFEPKKKRKVSESATPESVSGWRLFKKIS

SEQ ID NO: 1052 - RNA, 7413 nt, synthetic construct
  misc_feature 1..7413: note = Synthetic
  source 1..7413: mol_type = other RNA
atgcccaagaagaagcggaaggtggacaagaagtactccatcggcctggacatcggcaccaactccgtgggctgggccgtgatcaccgacgagtacaaggtgccctccaagaagttcaaggtgctgggcaacaccgaccggcactccatcaagaagaacctgatcggcgccctgctgttcgactccggcgagaccgccgaggccacccggctgaagcggaccgcccggcggcggtacacccggcggaagaaccggatctgctacctgcaggagatcttctccaacgagatggccaaggtggacgactccttcttccaccggctggaggagtccttcctggtggaggaggacaagaagcacgagcggcaccccatcttcggcaacatcgtggacgaggtggcctaccacgagaagtaccccaccatctaccacctgcggaagaagctggtggactccaccgacaaggccgacctgcggctgatctacctggccctggcccacatgatcaagttccggggccacttcctgatcgagggcgacctgaaccccgacaactccgacgtggacaagctgttcatccagctggtgcagacctacaaccagctgttcgaggagaaccccatcaacgcctccggcgtggacgccaaggccatcctgtccgcccggctgtccaagtcccggcggctggagaacctgatcgcccagctgcccggcgagaagaagaacggcctgttcggcaacctgatcgccctgtccctgggcctgacccccaacttcaagtccaacttcgacctggccgaggacgccaagctgcagctgtccaaggacacctacgacgacgacctggacaacctgctggcccagatcggcgaccagtacgccgacctgttcctggccgccaagaacctgtccgacgccatcctgctgtccgacatcctgcgggtgaacaccgagatcaccaaggcccccctgtccgcctccatgatcaagcggtacgacgagcaccaccaggacctgaccctgctgaaggccctggtgcggcagcagctgcccgagaagtacaaggagatcttcttcgaccagtccaagaacggctacgccggctacatcgacggcggcgcctcccaggaggagttctacaagttcatcaagcccatcctggagaagatggacggcaccgaggagctgctggtgaagctgaaccgggaggacctgctgcggaagcagcggaccttcgacaacggctccatcccccaccagatccacctgggcgagctgcacgccatcctgcggcggcaggaggacttctaccccttcctgaaggacaaccgggagaagatcgagaagatcctgaccttccggatcccctactacgtgggccccctggcccggggcaactcccggttcgcctggatgacccggaagtccgaggagaccatcaccccctggaacttcgaggaggtggtggacaagggcgcctccgcccagtccttcatcgagcggatgaccaacttcgacaagaacctgcccaacgagaaggtgctgcccaagcactccctgctgtacgagtacttcaccgtgtacaacgagctgaccaaggtgaagtacgtgaccgagggcatgcggaagcccgccttcctgtccggcgagcagaagaaggccatcgtggacctgctgttcaagaccaaccggaaggtgaccgtgaagcagctgaaggaggactacttcaagaagatcgagtgcttcgactccgtggagatctccggcgtggaggaccggttcaacgcctccctgggcacctaccacgacctgctgaagatcatcaaggacaaggacttcctggacaacgaggagaacgaggacatcctggaggacatcgtgctgaccctgaccctgttcgaggaccgggagatgatcgaggagcggctgaagacctacgcccacctgttcgacgacaaggtgatgaagcagctgaagcggcggcggtacaccggctggggccggctgtcccggaagctgatcaacggcatccgggacaagcagtccggcaagaccatcctggacttcctgaagtccgacggcttcgccaaccggaacttcatgcagctgatccacgacgactccctgaccttcaaggaggacatccagaaggcccaggtgtccggccagggcgactccctgcacgagcacatcgccaacctggccggctcccccgccatcaagaagggcatcctgcagaccgtgaaggtggtggacgagctggtgaaggtgatgggccggcacaagcccgagaacatcgtgatcgagatggcccgggagaaccagaccacccagaagggccagaagaactcccgggagcggatgaagcggatcgaggagggcatcaaggagctgggctcccagatcctgaaggagcaccccgtggagaacacccagctgcagaacgagaagctgtacctgtactacctgcagaacggccgggacatgtacgtggaccaggagctggacatcaaccggctgtccgactacgacgtggacgccatcgtgccccagtccttcctgaaggacgactccatcgacaacaaggtgctgacccggtccgacaagaaccggggcaagtccgacaacgtgccctccgaggaggtggtgaagaagatgaagaactactggcggcagctgctgaacgccaagctgatcacccagcggaagttcgacaacctgaccaaggccgagcggggcggcctgtccgagctggacaaggccggcttcatcaagcggcagctggtggagacccggcagatcaccaagcacgtggcccagatcctggactcccggatgaacaccaagtacgacgagaacgacaagctgatccgggaggtgaaggtgatcaccctgaagtccaagctggtgtccgacttccggaaggacttccagttctacaaggtgcgggagatcaacaactaccaccacgcccacgacgcctacctgaacgccgtggtgggcaccgccctgatcaagaagtaccccaagctggagtccgagttcgtgtacggcgactacaaggtgtacgacgtgcggaagatgatcgccaagtccgagcaggagatcggcaaggccaccgccaagtacttcttctactccaacatcatgaacttcttcaagaccgagatcaccctggccaacggcgagatccggaagcggcccctgatcgagaccaacggcgagaccggcgagatcgtgtgggacaagggccgggacttcgccaccgtgcggaaggtgctgtccatgccccaggtgaacatcgtgaagaagaccgaggtgcagaccggcggcttctccaaggagtccatcctgcccaagcggaactccgacaagctgatcgcccggaagaaggactgggaccccaagaagtacggcggcttcgactcccccaccgtggcctactccgtgctggtggtggccaaggtggagaagggcaagtccaagaagctgaagtccgtgaaggagctgctgggcatcaccatcatggagcggtcctccttcgagaagaaccccatcgacttcctggaggccaagggctacaaggaggtgaagaaggacctgatcatcaagctgcccaagtactccctgttcgagctggagaacggccggaagcggatgctggcctccgccggcgagctgcagaagggcaacgagctggccctgccctccaagtacgtgaacttcctgtacctggcctcccactacgagaagctgaagggctcccccgaggacaacgagcagaagcagctgttcgtggagcagcacaagcactacctggacgagatcatcgagcagatctccgagttctccaagcgggtgatcctggccgacgccaacctggacaaggtgctgtccgcctacaacaagcaccgggacaagcccatccgggagcaggccgagaacatcatccacctgttcaccctgaccaacctgggcgcccccgccgccttcaagtacttcgacaccaccatcgaccggaagcggtacacctccaccaaggaggtgctggacgccaccctgatccaccagtccatcaccggcctgtacgagacccggatcgacctgtcccagctgggcggcgactccggcggctcctccggcggctccaagcggaccgccgacggctccgagttcgagtcccccaagaagaagcggaaggtgtccggcggctcctccggcggctccgcctccaacttcacccagttcgtgctggtggacaacggcggcaccggcgacgtgaccgtggccccctccaacttcgccaacggcgtggccgagtggatctcctccaactcccggtcccaggcctacaaggtgacctgctccgtgcggcagtcctccgcccagaaccggaagtacaccatcaaggtggaggtgcccaaggtggccacccagaccgtgggcggcgtggagctgcccgtggccgcctggcggtcctacctgaacatggagctgaccatccccatcttcgccaccaactccgactgcgagctgatcgtgaaggccatgcagggcctgctgaaggacggcaaccccatcccctccgccatcgccgccaactccggcatctacggcgcccccgagtccgccaccgagtccggcggcacctccaccgagtccgagggctccgccggcacctccaccgagtccgagggctccgccggctccgccggctccacctccggctccggctcctccatggactccaccaaggagaagtgcgactcctacaaggacgacctgctgctgcggatgggcctgaacgacaacaaggccggcatggagggcctggacaaggagaagatcaacaagatcatcatggaggccaccaagggctcccggttctacggcaacgagctgaagaaggagaagcaggtgaaccagcggatcgagaacatgatgcagcagaaggcccagatcacctcccagcagctgcggaaggcccagctgcaggtggaccggttcgccatggagctggagcagtcccggaacctgtccaacaccatcgtgcacatcgacatggacgccttctacgccgccgtggagatgcgggacaaccccgagctgaaggacaagcccatcgccgtgggctccatgtccatgctgtccacctccaactaccacgcccggcggttcggcgtgcgggccgccatgcccggcttcatcgccaagcggctgtgcccccagctgatcatcgtgccccccaacttcgacaagtaccgggccgtgtccaaggaggtgaaggagatcctggccgactacgaccccaacttcatggccatgtccctggacgaggcctacctgaacatcaccaagcacctggaggagcggcagaactggcccgaggacaagcggcggtacttcatcaagatgggctcctccgtggagaacgacaaccccggcaaggaggtgaacaagctgtccgagcacgagcggtccatctcccccctgctgttcgaggagtccccctccgacgtgcagccccccggcgaccccttccaggtgaacttcgaggagcagaacaacccccagatcctgcagaactccgtggtgttcggcacctccgcccaggaggtggtgaaggagatccggttccggatcgagcagaagaccaccctgaccgcctccgccggcatcgcccccaacaccatgctggccaaggtgtgctccgacaagaacaagcccaacggccagtaccagatcctgcccaaccggcaggccgtgatggacttcatcaaggacctgcccatccggaaggtgtccggcatcggcaaggtgaccgagaagatgctgaaggccctgggcatcatcacctgcaccgagctgtaccagcagcgggccctgctgtccctgctgttctccgagacctcctggcactacttcctgcacatctccctgggcctgggctccacccacctgacccgggacggcgagcggaagtccatgtccgtggagcggaccttctccgagatcaacaaggccgaggagcagtactccctgtgccaggagctgtgctccgagctggcccaggacctgcagaaggagcggctgaagggccggaccgtgaccatcaagctgaagaacgtgaacttcgaggtgaagacccgggcctccaccgtgtcctccgtggtgtccaccgccgaggagatcttcgccatcgccaaggagctgctgaagaccgagatcgacgccgacttcccccaccccctgcggctgcggctgatgggcgtgcggatctcctccttccccaacgaggaggaccggaagcaccagcagcggtccatcatcggcttcctgcaggccggcaaccaggccctgtccgccaccgagtgcaccctggagaagaccgacaaggacaagttcgtgaagcccctggagatgtcccacaagaagtccttcttcgacaagaagcggtccgagcggaagtggtcccaccaggacaccttcaagtgcgaggccgtgaacaagcagtccttccagacctcccagcccttccaggtgctgaagaagaagatgaacgagaacctggagatctccgagaactccgacgactgccagatcctgacctgccccgtgtgcttccgggcccagggctgcatctccctggaggccctgaacaagcacgtggacgagtgcctggacggcccctccatctccgagaacttcaagatgttctcctgctcccacgtgtccgccaccaaggtgaacaagaaggagaacgtgcccgcctcctccctgtgcgagaagcaggactacgaggcccaccccaagatcaaggagatctcctccgtggactgcatcgccctggtggacaccatcgacaactcctccaaggccgagtccatcgacgccctgtccaacaagcactccaaggaggagtgctcctccctgccctccaagtccttcaacatcgagcactgccaccagaactcctcctccaccgtgtccctggagaacgaggacgtgggctccttccggcaggagtaccggcagccctacctgtgcgaggtgaagaccggccaggccctggtgtgccccgtgtgcaacgtggagcagaagacctccgacctgaccctgttcaacgtgcacgtggacgtgtgcctgaacaagtccttcatccaggagctgcggaaggacaagttcaaccccgtgaaccagcccaaggagtcctcccggtccaccggctcctcctccggcgtgcagaaggccgtgacccggaccaagcggcccggcctgatgaccaagtactccacctccaagaagatcaagcccaacaaccccaagcacaccctggacatcttcttcaagtccggcggctccaagcggaccgccgacggctccgagttcgagcccaagaagaagcggaaggtg

SEQ ID NO: 1053 - protein, 2471 aa, synthetic construct
  REGION 1..2471: note = Synthetic
MPKKKRKVDKKYSIGLDIGTNSVGWAVITDEYKVPSKKFKVLGNTDRHSIKKNLIGALLFDSGETAEATRLKRTARRRYTRRKNRICYLQEIFSNEMAKVDDSFFHRLEESFLVEEDKKHERHPIFGNIVDEVAYHEKYPTIYHLRKKLVDSTDKADLRLIYLALAHMIKFRGHFLIEGDLNPDNSDVDKLFIQLVQTYNQLFEENPINASGVDAKAILSARLSKSRRLENLIAQLPGEKKNGLFGNLIALSLGLTPNFKSNFDLAEDAKLQLSKDTYDDDLDNLLAQIGDQYADLFLAAKNLSDAILLSDILRVNTEITKAPLSASMIKRYDEHHQDLTLLKALVRQQLPEKYKEIFFDQSKNGYAGYIDGGASQEEFYKFIKPILEKMDGTEELLVKLNREDLLRKQRTFDNGSIPHQIHLGELHAILRRQEDFYPFLKDNREKIEKILTFRIPYYVGPLARGNSRFAWMTRKSEETITPWNFEEVVDKGASAQSFIERMTNFDKNLPNEKVLPKHSLLYEYFTVYNELTKVKYVTEGMRKPAFLSGEQKKAIVDLLFKTNRKVTVKQLKEDYFKKIECFDSVEISGVEDRFNASLGTYHDLLKIIKDKDFLDNEENEDILEDIVLTLTLFEDREMIEERLKTYAHLFDDKVMKQLKRRRYTGWGRLSRKLINGIRDKQSGKTILDFLKSDGFANRNFMQLIHDDSLTFKEDIQKAQVSGQGDSLHEHIANLAGSPAIKKGILQTVKVVDELVKVMGRHKPENIVIEMARENQTTQKGQKNSRERMKRIEEGIKELGSQILKEHPVENTQLQNEKLYLYYLQNGRDMYVDQELDINRLSDYDVDAIVPQSFLKDDSIDNKVLTRSDKNRGKSDNVPSEEVVKKMKNYWRQLLNAKLITQRKFDNLTKAERGGLSELDKAGFIKRQLVETRQITKHVAQILDSRMNTKYDENDKLIREVKVITLKSKLVSDFRKDFQFYKVREINNYHHAHDAYLNAVVGTALIKKYPKLESEFVYGDYKVYDVRKMIAKSEQEIGKATAKYFFYSNIMNFFKTEITLANGEIRKRPLIETNGETGEIVWDKGRDFATVRKVLSMPQVNIVKKTEVQTGGFSKESILPKRNSDKLIARKKDWDPKKYGGFDSPTVAYSVLVVAKVEKGKSKKLKSVKELLGITIMERSSFEKNPIDFLEAKGYKEVKKDLIIKLPKYSLFELENGRKRMLASAGELQKGNELALPSKYVNFLYLASHYEKLKGSPEDNEQKQLFVEQHKHYLDEIIEQISEFSKRVILADANLDKVLSAYNKHRDKPIREQAENIIHLFTLTNLGAPAAFKYFDTTIDRKRYTSTKEVLDATLIHQSITGLYETRIDLSQLGGDSGGSSGGSKRTADGSEFESPKKKRKVSGGSSGGSASNFTQFVLVDNGGTGDVTVAPSNFANGVAEWISSNSRSQAYKVTCSVRQSSAQNRKYTIKVEVPKVATQTVGGVELPVAAWRSYLNMELTIPIFATNSDCELIVKAMQGLLKDGNPIPSAIAANSGIYGAPESATESGGTSTESEGSAGTSTESEGSAGSAGSTSGSGSSMDSTKEKCDSYKDDLLLRMGLNDNKAGMEGLDKEKINKIIMEATKGSRFYGNELKKEKQVNQRIENMMQQKAQITSQQLRKAQLQVDRFAMELEQSRNLSNTIVHIDMDAFYAAVEMRDNPELKDKPIAVGSMSMLSTSNYHARRFGVRAAMPGFIAKRLCPQLIIVPPNFDKYRAVSKEVKEILADYDPNFMAMSLDEAYLNITKHLEERQNWPEDKRRYFIKMGSSVENDNPGKEVNKLSEHERSISPLLFEESPSDVQPPGDPFQVNFEEQNNPQILQNSVVFGTSAQEVVKEIRFRIEQKTTLTASAGIAPNTMLAKVCSDKNKPNGQYQILPNRQAVMDFIKDLPIRKVSGIGKVTEKMLKALGIITCTELYQQRALLSLLFSETSWHYFLHISLGLGSTHLTRDGERKSMSVERTFSEINKAEEQYSLCQELCSELAQDLQKERLKGRTVTIKLKNVNFEVKTRASTVSSVVSTAEEIFAIAKELLKTEIDADFPHPLRLRLMGVRISSFPNEEDRKHQQRSIIGFLQAGNQALSATECTLEKTDKDKFVKPLEMSHKKSFFDKKRSERKWSHQDTFKCEAVNKQSFQTSQPFQVLKKKMNENLEISENSDDCQILTCPVCFRAQGCISLEALNKHVDECLDGPSISENFKMFSCSHVSATKVNKKENVPASSLCEKQDYEAHPKIKEISSVDCIALVDTIDNSSKAESIDALSNKHSKEECSSLPSKSFNIEHCHQNSSSTVSLENEDVGSFRQEYRQPYLCEVKTGQALVCPVCNVEQKTSDLTLFNVHVDVCLNKSFIQELRKDKFNPVNQPKESSRSTGSSSGVQKAVTRTKRPGLMTKYSTSKKIKPNNPKHTLDIFFKSGGSKRTADGSEFEPKKKRKV

SEQ ID NO: 1054 - RNA, 7957 nt, synthetic construct
  misc_feature 1..7957: note = Synthetic
  source 1..7957: mol_type = other RNA
gggaagctcagaataaacgctcaactttggccggatctgccaccatggcctccaacttcacccagttcgtgctggtggacaacggcggcaccggcgacgtgaccgtggccccctccaacttcgccaacggcgtggccgagtggatctcctccaactcccggtcccaggcctacaaggtgacctgctccgtgcggcagtcctccgcccagaaccggaagtacaccatcaaggtggaggtgcccaaggtggccacccagaccgtgggcggcgtggagctgcccgtggccgcctggcggtcctacctgaacatggagctgaccatccccatcttcgccaccaactccgactgcgagctgatcgtgaaggccatgcagggcctgctgaaggacggcaaccccatcccctccgccatcgccgccaactccggcatctacggcgcccccgagtccgccaccgagtccggcggcacctccaccgagtccgagggctccgccggcacctccaccgagtccgagggctccgccggctccgccggctccacctccggctccggctcctccatggactccaccaaggagaagtgcgactcctacaaggacgacctgctgctgcggatgggcctgaacgacaacaaggccggcatggagggcctggacaaggagaagatcaacaagatcatcatggaggccaccaagggctcccggttctacggcaacgagctgaagaaggagaagcaggtgaaccagcggatcgagaacatgatgcagcagaaggcccagatcacctcccagcagctgcggaaggcccagctgcaggtggaccggttcgccatggagctggagcagtcccggaacctgtccaacaccatcgtgcacatcgacatggacgccttctacgccgccgtggagatgcgggacaaccccgagctgaaggacaagcccatcgccgtgggctccatgtccatgctgtccacctccaactaccacgcccggcggttcggcgtgcgggccgccatgcccggcttcatcgccaagcggctgtgcccccagctgatcatcgtgccccccaacttcgacaagtaccgggccgtgtccaaggaggtgaaggagatcctggccgactacgaccccaacttcatggccatgtccctggacgaggcctacctgaacatcaccaagcacctggaggagcggcagaactggcccgaggacaagcggcggtacttcatcaagatgggctcctccgtggagaacgacaaccccggcaaggaggtgaacaagctgtccgagcacgagcggtccatctcccccctgctgttcgaggagtccccctccgacgtgcagccccccggcgaccccttccaggtgaacttcgaggagcagaacaacccccagatcctgcagaactccgtggtgttcggcacctccgcccaggaggtggtgaaggagatccggttccggatcgagcagaagaccaccctgaccgcctccgccggcatcgcccccaacaccatgctggccaaggtgtgctccgacaagaacaagcccaacggccagtaccagatcctgcccaaccggcaggccgtgatggacttcatcaaggacctgcccatccggaaggtgtccggcatcggcaaggtgaccgagaagatgctgaaggccctgggcatcatcacctgcaccgagctgtaccagcagcgggccctgctgtccctgctgttctccgagacctcctggcactacttcctgcacatctccctgggcctgggctccacccacctgacccgggaccgggtgcggaagtccatgtccgtggagcggaccttctccgagatcaacaaggccgaggagcagtactccctgtgccaggagctgtgctccgagctggcccaggacctgcagaaggagcggctgaagggccggaccgtgaccatcaagctgaagaacgtgaacttcgaggtgaagacccgggcctccaccgtgtcctccgtggtgtccaccgccgaggagatcttcgccatcgccaaggagctgctgaagaccgagatcgacgccgacttcccccaccccctgcggctgcggctgatgggcgtgcggatctcctccttccccaacgaggaggaccggaagcaccagcagcggtccatcatcggcttcctgcaggccggcaaccaggccctgtccgccaccgagtgcaccctggagaagaccgacaaggacaagttcgtgaagcccctggagatgtcccacaagaagtccttcttcgacaagaagcggtccgagcggaagtggtcccaccaggacaccttcaagtgcgaggccgtgaacaagcagtccttccagacctcccagcccttccaggtgctgaagaagaagatgaacgagaacctggagatctccgagaactccgacgactgccagatcctgacctgccccgtgtgcttccgggcccagggctgcatctccctggaggccctgaacaagcacgtggacgagtgcctggacggcccctccatctccgagaacttcaagatgttctcctgctcccacgtgtccgccaccaaggtgaacaagaaggagaacgtgcccgcctcctccctgtgcgagaagcaggactacgaggcccaccccaagatcaaggagatctcctccgtggactgcatcgccctggtggacaccatcgacaactcctccaaggccgagtccatcgacgccctgtccaacaagcactccaaggaggagtgctcctccctgccctccaagtccttcaacatcgagcactgccaccagaactcctcctccaccgtgtccctggagaacgaggacgtgggctccttccggcaggagtaccggcagccctacctgtgcgaggtgaagaccggccaggccctggtgtgccccgtgtgcaacgtggagcagaagacctccgacctgaccctgttcaacgtgcacgtggacgtgtgcctgaacaagtccttcatccaggagctgcggaaggacaagttcaaccccgtgaaccagcccaaggagtcctcccggtccaccggctcctcctccggcgtgcagaaggccgtgacccggaccaagcggcccggcctgatgaccaagtactccacctccaagaagatcaagcccaacaaccccaagcacaccctggacatcttcttcaagtccggcggctcctccggcggctccaagcggaccgccgacggctccgagttcgagtcccccaagaagaagcggaaggtgtccggcggctcctccggcggctccgacaagaagtactccatcggcctggacatcggcaccaactccgtgggctgggccgtgatcaccgacgagtacaaggtgccctccaagaagttcaaggtgctgggcaacaccgaccggcactccatcaagaagaacctgatcggcgccctgctgttcgactccggcgagaccgccgaggccacccggctgaagcggaccgcccggcggcggtacacccggcggaagaaccggatctgctacctgcaggagatcttctccaacgagatggccaaggtggacgactccttcttccaccggctggaggagtccttcctggtggaggaggacaagaagcacgagcggcaccccatcttcggcaacatcgtggacgaggtggcctaccacgagaagtaccccaccatctaccacctgcggaagaagctggtggactccaccgacaaggccgacctgcggctgatctacctggccctggcccacatgatcaagttccggggccacttcctgatcgagggcgacctgaaccccgacaactccgacgtggacaagctgttcatccagctggtgcagacctacaaccagctgttcgaggagaaccccatcaacgcctccggcgtggacgccaaggccatcctgtccgcccggctgtccaagtcccggcggctggagaacctgatcgcccagctgcccggcgagaagaagaacggcctgttcggcaacctgatcgccctgtccctgggcctgacccccaacttcaagtccaacttcgacctggccgaggacgccaagctgcagctgtccaaggacacctacgacgacgacctggacaacctgctggcccagatcggcgaccagtacgccgacctgttcctggccgccaagaacctgtccgacgccatcctgctgtccgacatcctgcgggtgaacaccgagatcaccaaggcccccctgtccgcctccatgatcaagcggtacgacgagcaccaccaggacctgaccctgctgaaggccctggtgcggcagcagctgcccgagaagtacaaggagatcttcttcgaccagtccaagaacggctacgccggctacatcgacggcggcgcctcccaggaggagttctacaagttcatcaagcccatcctggagaagatggacggcaccgaggagctgctggtgaagctgaaccgggaggacctgctgcggaagcagcggaccttcgacaacggctccatcccccaccagatccacctgggcgagctgcacgccatcctgcggcggcaggaggacttctaccccttcctgaaggacaaccgggagaagatcgagaagatcctgaccttccggatcccctactacgtgggccccctggcccggggcaactcccggttcgcctggatgacccggaagtccgaggagaccatcaccccctggaacttcgaggaggtggtggacaagggcgcctccgcccagtccttcatcgagcggatgaccaacttcgacaagaacctgcccaacgagaaggtgctgcccaagcactccctgctgtacgagtacttcaccgtgtacaacgagctgaccaaggtgaagtacgtgaccgagggcatgcggaagcccgccttcctgtccggcgagcagaagaaggccatcgtggacctgctgttcaagaccaaccggaaggtgaccgtgaagcagctgaaggaggactacttcaagaagatcgagtgcttcgactccgtggagatctccggcgtggaggaccggttcaacgcctccctgggcacctaccacgacctgctgaagatcatcaaggacaaggacttcctggacaacgaggagaacgaggacatcctggaggacatcgtgctgaccctgaccctgttcgaggaccgggagatgatcgaggagcggctgaagacctacgcccacctgttcgacgacaaggtgatgaagcagctgaagcggcggcggtacaccggctggggccggctgtcccggaagctgatcaacggcatccgggacaagcagtccggcaagaccatcctggacttcctgaagtccgacggcttcgccaaccggaacttcatgcagctgatccacgacgactccctgaccttcaaggaggacatccagaaggcccaggtgtccggccagggcgactccctgcacgagcacatcgccaacctggccggctcccccgccatcaagaagggcatcctgcagaccgtgaaggtggtggacgagctggtgaaggtgatgggccggcacaagcccgagaacatcgtgatcgagatggcccgggagaaccagaccacccagaagggccagaagaactcccgggagcggatgaagcggatcgaggagggcatcaaggagctgggctcccagatcctgaaggagcaccccgtggagaacacccagctgcagaacgagaagctgtacctgtactacctgcagaacggccgggacatgtacgtggaccaggagctggacatcaaccggctgtccgactacgacgtggacgccatcgtgccccagtccttcctgaaggacgactccatcgacaacaaggtgctgacccggtccgacaagaaccggggcaagtccgacaacgtgccctccgaggaggtggtgaagaagatgaagaactactggcggcagctgctgaacgccaagctgatcacccagcggaagttcgacaacctgaccaaggccgagcggggcggcctgtccgagctggacaaggccggcttcatcaagcggcagctggtggagacccggcagatcaccaagcacgtggcccagatcctggactcccggatgaacaccaagtacgacgagaacgacaagctgatccgggaggtgaaggtgatcaccctgaagtccaagctggtgtccgacttccggaaggacttccagttctacaaggtgcgggagatcaacaactaccaccacgcccacgacgcctacctgaacgccgtggtgggcaccgccctgatcaagaagtaccccaagctggagtccgagttcgtgtacggcgactacaaggtgtacgacgtgcggaagatgatcgccaagtccgagcaggagatcggcaaggccaccgccaagtacttcttctactccaacatcatgaacttcttcaagaccgagatcaccctggccaacggcgagatccggaagcggcccctgatcgagaccaacggcgagaccggcgagatcgtgtgggacaagggccgggacttcgccaccgtgcggaaggtgctgtccatgccccaggtgaacatcgtgaagaagaccgaggtgcagaccggcggcttctccaaggagtccatcctgcccaagcggaactccgacaagctgatcgcccggaagaaggactgggaccccaagaagtacggcggcttcgactcccccaccgtggcctactccgtgctggtggtggccaaggtggagaagggcaagtccaagaagctgaagtccgtgaaggagctgctgggcatcaccatcatggagcggtcctccttcgagaagaaccccatcgacttcctggaggccaagggctacaaggaggtgaagaaggacctgatcatcaagctgcccaagtactccctgttcgagctggagaacggccggaagcggatgctggcctccgccggcgagctgcagaagggcaacgagctggccctgccctccaagtacgtgaacttcctgtacctggcctcccactacgagaagctgaagggctcccccgaggacaacgagcagaagcagctgttcgtggagcagcacaagcactacctggacgagatcatcgagcagatctccgagttctccaagcgggtgatcctggccgacgccaacctggacaaggtgctgtccgcctacaacaagcaccgggacaagcccatccgggagcaggccgagaacatcatccacctgttcaccctgaccaacctgggcgcccccgccgccttcaagtacttcgacaccaccatcgaccggaagcggtacacctccaccaaggaggtgctggacgccaccctgatccaccagtccatcaccggcctgtacgagacccggatcgacctgtcccagctgggcggcgactccggcggctccaagcggaccgccgacggctccgagttcgagtcccccaagaagaagcggaaggtgtagctagcaccagcctcaagaacacccgaatggagtctctaagctacataataccaacttacactttacaaaatgttgtcccccaaaatgtagccattcgtatctgctcctaataaaaagaaagtttcttcacattctctcgagaaaaaaaaaaaatggaaaaaaaaaaaacggaaaaaaaaaaaaggtaaaaaaaaaaaatataaaaaaaaaaaacataaaaaaaaaaaacgaaaaaaaaaaaacgtaaaaaaaaaaaactcaaaaaaaaaaaagataaaaaaaaaaaacctaaaaaaaaaaaatgtaaaaaaaaaaaagggaaaaaaaaaaaacgcaaaaaaaaaaaacacaaaaaaaaaaaatgcaaaaaaaaaaaatcgaaaaaaaaaaaatctaaaaaaaaaaaacgaaaaaaaaaaaacccaaaaaaaaaaaagacaaaaaaaaaaaatagaaaaaaaaaaagttaaaaaaaaaaaactgaaaaaaaaaaaatttaaaaaaaaaaaatctag

SEQ ID NO: 1055 - RNA, 6882 nt, synthetic construct; identical to SEQ ID NO: 1044
  misc_feature 1..6882: note = Synthetic
  source 1..6882: mol_type = other RNA

SEQ ID NO: 1056 - protein, 2293 aa, synthetic construct; identical to SEQ ID NO: 1045
  REGION 1..2293: note = Synthetic

SEQ ID NO: 1057 - RNA, 7954 nt, synthetic construct
  misc_feature 1..7954: note = Synthetic
  source 1..7954: mol_type = other RNA
gggaagctcagaataaacgctcaactttggccggatctgccaccatggcctccaacttcacccagttcgtgctggtggacaacggcggcaccggcgacgtgaccgtggccccctccaacttcgccaacggcgtggccgagtggatctcctccaactcccggtcccaggcctacaaggtgacctgctccgtgcggcagtcctccgcccagaaccggaagtacaccatcaaggtggaggtgcccaaggtggccacccagaccgtgggcggcgtggagctgcccgtggccgcctggcggtcctacctgaacatggagctgaccatccccatcttcgccaccaactccgactgcgagctgatcgtgaaggccatgcagggcctgctgaaggacggcaaccccatcccctccgccatcgccgccaactccggcatctacggcgcccccgagtccgccaccgagtccggcggcacctccaccgagtccgagggctccgccggcacctccaccgagtccgagggctccgccggctccgccggctccacctccggctccggctcctccgactccaccaaggagaagtgcgactcctacaaggacgacctgctgctgcggatgggcctgaacgacaacaaggccggcatggagggcctggacaaggagaagatcaacaagatcatcatggaggccaccaagggctcccggttctacggcaacgagctgaagaaggagaagcaggtgaaccagcggatcgagaacatgatgcagcagaaggcccagatcacctcccagcagctgcggaaggcccagctgcaggtggaccggttcgccatggagctggagcagtcccggaacctgtccaacaccatcgtgcacatcgacatggacgccttctacgccgccgtggagatgcgggacaaccccgagctgaaggacaagcccatcgccgtgggctccatgtccatgctgtccacctccaactaccacgcccggcggttcggcgtgcgggccgccatgcccggcttcatcgccaagcggctgtgcccccagctgatcatcgtgccccccaacttcgacaagtaccgggccgtgtccaaggaggtgaaggagatcctggccgactacgaccccaacttcatggccatgtccctggacgaggcctacctgaacatcaccaagcacctggaggagcggcagaactggcccgaggacaagcggcggtacttcatcaagatgggctcctccgtggagaacgacaaccccggcaaggaggtgaacaagctgtccgagcacgagcggtccatctcccccctgctgttcgaggagtccccctccgacgtgcagccccccggcgaccccttccaggtgaacttcgaggagcagaacaacccccagatcctgcagaactccgtggtgttcggcacctccgcccaggaggtggtgaaggagatccggttccggatcgagcagaagaccaccctgaccgcctccgccggcatcgcccccaacaccatgctggccaaggtgtgctccgacaagaacaagcccaacggccagtaccagatcctgcccaaccggcaggccgtgatggacttcatcaaggacctgcccatccggaaggtgtccggcatcggcaaggtgaccgagaagatgctgaaggccctgggcatcatcacctgcaccgagctgtaccagcagcgggccctgctgtccctgctgttctccgagacctcctggcactacttcctgcacatctccctgggcctgggctccacccacctgacccgggacggcgagcggaagtccatgtccgtggagcggaccttctccgagatcaacaaggccgaggagcagtactccctgtgccaggagctgtgctccgagctggcccaggacctgcagaaggagcggctgaagggccggaccgtgaccatcaagctgaagaacgtgaacttcgaggtgaagacccgggcctccaccgtgtcctccgtggtgtccaccgccgaggagatcttcgccatcgccaaggagctgctgaagaccgagatcgacgccgacttcccccaccccctgcggctgcggctgatgggcgtgcggatctcctccttccccaacgaggaggaccggaagcaccagcagcggtccatcatcggcttcctgcaggccggcaaccaggccctgtccgccaccgagtgcaccctggagaagaccgacaaggacaagttcgtgaagcccctggagatgtcccacaagaagtccttcttcgacaagaagcggtccgagcggaagtggtcccaccaggacaccttcaagtgcgaggccgtgaacaagcagtccttccagacctcccagcccttccaggtgctgaagaagaagatgaacgagaacctggagatctccgagaactccgacgactgccagatcctgacctgccccgtgtgcttccgggcccagggctgcatctccctggaggccctgaacaagcacgtggacgagtgcctggacggcccctccatctccgagaacttcaagatgttctcctgctcccacgtgtccgccaccaaggtgaacaagaaggagaacgtgcccgcctcctccctgtgcgagaagcaggactacgaggcccaccccaagatcaaggagatctcctccgtggactgcatcgccctggtggacaccatcgacaactcctccaaggccgagtccatcgacgccctgtccaacaagcactccaaggaggagtgctcctccctgccctccaagtccttcaacatcgagcactgccaccagaactcctcctccaccgtgtccctggagaacgaggacgtgggctccttccggcaggagtaccggcagccctacctgtgcgaggtgaagaccggccaggccctggtgtgccccgtgtgcaacgtggagcagaagacctccgacctgaccctgttcaacgtgcacgtggacgtgtgcctgaacaagtccttcatccaggagctgcggaaggacaagttcaaccccgtgaaccagcccaaggagtcctcccggtccaccggctcctcctccggcgtgcagaaggccgtgacccggaccaagcggcccggcctgatgaccaagtactccacctccaagaagatcaagcccaacaaccccaagcacaccctggacatcttcttcaagtccggcggctcctccggcggctccaagcggaccgccgacggctccgagttcgagtcccccaagaagaagcggaaggtgtccggcggctcctccggcggctccgacaagaagtactccatcggcctggacatcggcaccaactccgtgggctgggccgtgatcaccgacgagtacaaggtgccctccaagaagttcaaggtgctgggcaacaccgaccggcactccatcaagaagaacctgatcggcgccctgctgttcgactccggcgagaccgccgaggccacccggctgaagcggaccgcccggcggcggtacacccggcggaagaaccggatctgctacctgcaggagatcttctccaacgagatggccaaggtggacgactccttcttccaccggctggaggagtccttcctggtggaggaggacaagaagcacgagcggcaccccatcttcggcaacatcgtggacgaggtggcctaccacgagaagtaccccaccatctaccacctgcggaagaagctggtggactccaccgacaaggccgacctgcggctgatctacctggccctggcccacatgatcaagttccggggccacttcctgatcgagggcgacctgaaccccgacaactccgacgtggacaagctgttcatccagctggtgcagacctacaaccagctgttcgaggagaaccccatcaacgcctccggcgtggacgccaaggccatcctgtccgcccggctgtccaagtcccggcggctggagaacctgatcgcccagctgcccggcgagaagaagaacggcctgttcggcaacctgatcgccctgtccctgggcctgacccccaacttcaagtccaacttcgacctggccgaggacgccaagctgcagctgtccaaggacacctacgacgacgacctggacaacctgctggcccagatcggcgaccagtacgccgacctgttcctggccgccaagaacctgtccgacgccatcctgctgtccgacatcctgcgggtgaacaccgagatcaccaaggcccccctgtccgcctccatgatcaagcggtacgacgagcaccaccaggacctgaccctgctgaaggccctggtgcggcagcagctgcccgagaagtacaaggagatcttcttcgaccagtccaagaacggctacgccggctacatcgacggcggcgcctcccaggaggagttctacaagttcatcaagcccatcctggagaagatggacggcaccgaggagctgctggtgaagctgaaccgggaggacctgctgcggaagcagcggaccttcgacaacggctccatcccccaccagatccacctgggcgagctgcacgccatcctgcggcggcaggaggacttctaccccttcctgaaggacaaccgggagaagatcgagaagatcctgaccttccggatcccctactacgtgggccccctggcccggggcaactcccggttcgcctggatgacccggaagtccgaggagaccatcaccccctggaacttcgaggaggtggtggacaagggcgcctccgcccagtccttcatcgagcggatgaccaacttcgacaagaacctgcccaacgagaaggtgctgcccaagcactccctgctgtacgagtacttcaccgtgtacaacgagctgaccaaggtgaagtacgtgaccgagggcatgcggaagcccgccttcctgtccggcgagcagaagaaggccatcgtggacctgctgttcaagaccaaccggaaggtgaccgtgaagcagctgaaggaggactacttcaagaagatcgagtgcttcgactccgtggagatctccggcgtggaggaccggttcaacgcctccctgggcacctaccacgacctgctgaagatcatcaaggacaaggacttcctggacaacgaggagaacgaggacatcctggaggacatcgtgctgaccctgaccctgttcgaggaccgggagatgatcgaggagcggctgaagacctacgcccacctgttcgacgacaaggtgatgaagcagctgaagcggcggcggtacaccggctggggccggctgtcccggaagctgatcaacggcatccgggacaagcagtccggcaagaccatcctggacttcctgaagtccgacggcttcgccaaccggaacttcatgcagctgatccacgacgactccctgaccttcaaggaggacatccagaaggcccaggtgtccggccagggcgactccctgcacgagcacatcgccaacctggccggctcccccgccatcaagaagggcatcctgcagaccgtgaaggtggtggacgagctggtgaaggtgatgggccggcacaagcccgagaacatcgtgatcgagatggcccgggagaaccagaccacccagaagggccagaagaactcccgggagcggatgaagcggatcgaggagggcatcaaggagctgggctcccagatcctgaaggagcaccccgtggagaacacccagctgcagaacgagaagctgtacctgtactacctgcagaacggccgggacatgtacgtggaccaggagctggacatcaaccggctgtccgactacgacgtggacgccatcgtgccccagtccttcctgaaggacgactccatcgacaacaaggtgctgacccggtccgacaagaaccggggcaagtccgacaacgtgccctccgaggaggtggtgaagaagatgaagaactactggcggcagctgctgaacgccaagctgatcacccagcggaagttcgacaacctgaccaaggccgagcggggcggcctgtccgagctggacaaggccggcttcatcaagcggcagctggtggagacccggcagatcaccaagcacgtggcccagatcctggactcccggatgaacaccaagtacgacgagaacgacaagctgatccgggaggtgaaggtgatcaccctgaagtccaagctggtgtccgacttccggaaggacttccagttctacaaggtgcgggagatcaacaactaccaccacgcccacgacgcctacctgaacgccgtggtgggcaccgccctgatcaagaagtaccccaagctggagtccgagttcgtgtacggcgactacaaggtgtacgacgtgcggaagatgatcgccaagtccgagcaggagatcggcaaggccaccgccaagtacttcttctactccaacatcatgaacttcttcaagaccgagatcaccctggccaacggcgagatccggaagcggcccctgatcgagaccaacggcgagaccggcgagatcgtgtgggacaagggccgggacttcgccaccgtgcggaaggtgctgtccatgccccaggtgaacatcgtgaagaagaccgaggtgcagaccggcggcttctccaaggagtccatcctgcccaagcggaactccgacaagctgatcgcccggaagaaggactgggaccccaagaagtacggcggcttcgactcccccaccgtggcctactccgtgctggtggtggccaaggtggagaagggcaagtccaagaagctgaagtccgtgaaggagctgctgggcatcaccatcatggagcggtcctccttcgagaagaaccccatcgacttcctggaggccaagggctacaaggaggtgaagaaggacctgatcatcaagctgcccaagtactccctgttcgagctggagaacggccggaagcggatgctggcctccgccggcgagctgcagaagggcaacgagctggccctgccctccaagtacgtgaacttcctgtacctggcctcccactacgagaagctgaagggctcccccgaggacaacgagcagaagcagctgttcgtggagcagcacaagcactacctggacgagatcatcgagcagatctccgagttctccaagcgggtgatcctggccgacgccaacctggacaaggtgctgtccgcctacaacaagcaccgggacaagcccatccgggagcaggccgagaacatcatccacctgttcaccctgaccaacctgggcgcccccgccgccttcaagtacttcgacaccaccatcgaccggaagcggtacacctccaccaaggaggtgctggacgccaccctgatccaccagtccatcaccggcctgtacgagacccggatcgacctgtcccagctgggcggcgactccggcggctccaagcggaccgccgacggctccgagttcgagtcccccaagaagaagcggaaggtgtagctagcaccagcctcaagaacacccgaatggagtctctaagctacataataccaacttacactttacaaaatgttgtcccccaaaatgtagccattcgtatctgctcctaataaaaagaaagtttcttcacattctctcgagaaaaaaaaaaaatggaaaaaaaaaaaacggaaaaaaaaaaaaggtaaaaaaaaaaaatataaaaaaaaaaaacataaaaaaaaaaaacgaaaaaaaaaaaacgtaaaaaaaaaaaactcaaaaaaaaaaaagataaaaaaaaaaaacctaaaaaaaaaaaatgtaaaaaaaaaaaagggaaaaaaaaaaaacgcaaaaaaaaaaaacacaaaaaaaaaaaatgcaaaaaaaaaaaatcgaaaaaaaaaaaatctaaaaaaaaaaaacgaaaaaaaaaaaacccaaaaaaaaaaaagacaaaaaaaaaaaatagaaaaaaaaaaagttaaaaaaaaaaaactgaaaaaaaaaaaatttaaaaaaaaaaaatctag

SEQ ID NO: 1058 - RNA, 7395 nt, synthetic construct
  misc_feature 1..7395: note = Synthetic
  source 1..7395: mol_type = other RNA
atggcctccaacttcacccagttcgtgctggtggacaacggcggcaccggcgacgtgaccgtggccccctccaacttcgccaacggcgtggccgagtggatctcctccaactcccggtcccaggcctacaaggtgacctgctccgtgcggcagtcctccgcccagaaccggaagtacaccatcaaggtggaggtgcccaaggtggccacccagaccgtgggcggcgtggagctgcccgtggccgcctggcggtcctacctgaacatggagctgaccatccccatcttcgccaccaactccgactgcgagctgatcgtgaaggccatgcagggcctgctgaaggacggcaaccccatcccctccgccatcgccgccaactccggcatctacggcgcccccgagtccgccaccgagtccggcggcacctccaccgagtccgagggctccgccggcacctccaccgagtccgagggctccgccggctccgccggctccacctccggctccggctcctccgactccaccaaggagaagtgcgactcctacaaggacgacctgctgctgcggatgggcctgaacgacaacaaggccggcatggagggcctggacaaggagaagatcaacaagatcatcatggaggccaccaagggctcccggttctacggcaacgagctgaagaaggagaagcaggtgaaccagcggatcgagaacatgatgcagcagaaggcccagatcacctcccagcagctgcggaaggcccagctgcaggtggaccggttcgccatggagctggagcagtcccggaacctgtccaacaccatcgtgcacatcgacatggacgccttctacgccgccgtggagatgcgggacaaccccgagctgaaggacaagcccatcgccgtgggctccatgtccatgctgtccacctccaactaccacgcccggcggttcggcgtgcgggccgccatgcccggcttcatcgccaagcggctgtgcccccagctgatcatcgtgccccccaacttcgacaagtaccgggccgtgtccaaggaggtgaaggagatcctggccgactacgaccccaacttcatggccatgtccctggacgaggcctacctgaacatcaccaagcacctggaggagcggcagaactggcccgaggacaagcggcggtacttcatcaagatgggctcctccgtggagaacgacaaccccggcaaggaggtgaacaagctgtccgagcacgagcggtccatctcccccctgctgttcgaggagtccccctccgacgtgcagccccccggcgaccccttccaggtgaacttcgaggagcagaacaacccccagatcctgcagaactccgtggtgttcggcacctccgcccaggaggtggtgaaggagatccggttccggatcgagcagaagaccaccctgaccgcctccgccggcatcgcccccaacaccatgctggccaaggtgtgctccgacaagaacaagcccaacggccagtaccagatcctgcccaaccggcaggccgtgatggacttcatcaaggacctgcccatccggaaggtgtccggcatcggcaaggtgaccgagaagatgctgaaggccctgggcatcatcacctgcaccgagctgtaccagcagcgggccctgctgtccctgctgttctccgagacctcctggcactacttcctgcacatctccctgggcctgggctccacccacctgacccgggacggcgagcggaagtccatgtccgtggagcggaccttctccgagatcaacaaggccgaggagcagtactccctgtgccaggagctgtgctccgagctggcccaggacctgcagaaggagcggctgaagggccggaccgtgaccatcaagctgaagaacgtgaacttcgaggtgaagacccgggcctccaccgtgtcctccgtggtgtccaccgccgaggagatcttcgccatcgccaaggagctgctgaagaccgagatcgacgccgacttcccccaccccctgcggctgcggctgatgggcgtgcggatctcctccttccccaacgaggaggaccggaagcaccagcagcggtccatcatcggcttcctgcaggccggcaaccaggccctgtccgccaccgagtgcaccctggagaagaccgacaaggacaagttcgtgaagcccctggagatgtcccacaagaagtccttcttcgacaagaagcggtccgagcggaagtggtcccaccaggacaccttcaagtgcgaggccgtgaacaagcagtccttccagacctcccagcccttccaggtgctgaagaagaagatgaacgagaacctggagatctccgagaactccgacgactgccagatcctgacctgccccgtgtgcttccgggcccagggctgcatctccctggaggccctgaacaagcacgtggacgagtgcctggacggcccctccatctccgagaacttcaagatgttctcctgctcccacgtgtccgccaccaaggtgaacaagaaggagaacgtgcccgcctcctccctgtgcgagaagcaggactacgaggcccaccccaagatcaaggagatctcctccgtggactgcatcgccctggtggacaccatcgacaactcctccaaggccgagtccatcgacgccctgtccaacaagcactccaaggaggagtgctcctccctgccctccaagtccttcaacatcgagcactgccaccagaactcctcctccaccgtgtccctggagaacgaggacgtgggctccttccggcaggagtaccggcagccctacctgtgcgaggtgaagaccggccaggccctggtgtgccccgtgtgcaacgtggagcagaagacctccgacctgaccctgttcaacgtgcacgtggacgtgtgcctgaacaagtccttcatccaggagctgcggaaggacaagttcaaccccgtgaaccagcccaaggagtcctcccggtccaccggctcctcctccggcgtgcagaaggccgtgacccggaccaagcggcccggcctgatgaccaagtactccacctccaagaagatcaagcccaacaaccccaagcacaccctggacatcttcttcaagtccggcggctcctccggcggctccaagcggaccgccgacggctccgagttcgagtcccccaagaagaagcggaaggtgtccggcggctcctccggcggctccgacaagaagtactccatcggcctggacatcggcaccaactccgtgggctgggccgtgatcaccgacgagtacaaggtgccctccaagaagttcaaggtgctgggcaacaccgaccggcactccatcaagaagaacctgatcggcgccctgctgttcgactccggcgagaccgccgaggccacccggctgaagcggaccgcccggcggcggtacacccggcggaagaaccggatctgctacctgcaggagatcttctccaacgagatggccaaggtggacgactccttcttccaccggctggaggagtccttcctggtggaggaggacaagaagcacgagcggcaccccatcttcggcaacatcgtggacgaggtggcctaccacgagaagtaccccaccatctaccacctgcggaagaagctggtggactccaccgacaaggccgacctgcggctgatctacctggccctggcccacatgatcaagttccggggccacttcctgatcgagggcgacctgaaccccgacaactccgacgtggacaagctgttcatccagctggtgcagacctacaaccagctgttcgaggagaaccccatcaacgcctccggcgtggacgccaaggccatcctgtccgcccggctgtccaagtcccggcggctggagaacctgatcgcccagctgcccggcgagaagaagaacggcctgttcggcaacctgatcgccctgtccctgggcctgacccccaacttcaagtccaacttcgacctggccgaggacgccaagctgcagctgtccaaggacacctacgacgacgacctggacaacctgctggcccagatcggcgaccagtacgccgacctgttcctggccgccaagaacctgtccgacgccatcctgctgtccgacatcctgcgggtgaacaccgagatcaccaaggcccccctgtccgcctccatgatcaagcggtacgacgagcaccaccaggacctgaccctgctgaaggccctggtgcggcagcagctgcccgagaagtacaaggagatcttcttcgaccagtccaagaacggctacgccggctacatcgacggcggcgcctcccaggaggagttctacaagttcatcaagcccatcctggagaagatggacggcaccgaggagctgctggtgaagctgaaccgggaggacctgctgcggaagcagcggaccttcgacaacggctccatcccccaccagatccacctgggcgagctgcacgccatcctgcggcggcaggaggacttctaccccttcctgaaggacaaccgggagaagatcgagaagatcctgaccttccggatcccctactacgtgggccccctggcccggggcaactcccggttcgcctggatgacccggaagtccgaggagaccatcaccccctggaacttcgaggaggtggtggacaagggcgcctccgcccagtccttcatcgagcggatgaccaacttcgacaagaacctgcccaacgagaaggtgctgcccaagcactccctgctgtacgagtacttcaccgtgtacaacgagctgaccaaggtgaagtacgtgaccgagggcatgcggaagcccgccttcctgtccggcgagcagaagaaggccatcgtggacctgctgttcaagaccaaccggaaggtgaccgtgaagcagctgaaggaggactacttcaagaagatcgagtgcttcgactccgtggagatctccggcgtggaggaccggttcaacgcctccctgggcacctaccacgacctgctgaagatcatcaaggacaaggacttcctggacaacgaggagaacgaggacatcctggaggacatcgtgctgaccctgaccctgttcgaggaccgggagatgatcgaggagcggctgaagacctacgcccacctgttcgacgacaaggtgatgaagcagctgaagcggcggcggtacaccggctggggccggctgtcccggaagctgatcaacggcatccgggacaagcagtccggcaagaccatcctggacttcctgaagtccgacggcttcgccaaccggaacttcatgcagctgatccacgacgactccctgaccttcaaggaggacatccagaaggcccaggtgtccggccagggcgactccctgcacgagcacatcgccaacctggccggctcccccgccatcaagaagggcatcctgcagaccgtgaaggtggtggacgagctggtgaaggtgatgggccggcacaagcccgagaacatcgtgatcgagatggcccgggagaaccagaccacccagaagggccagaagaactcccgggagcggatgaagcggatcgaggagggcatcaaggagctgggctcccagatcctgaaggagcaccccgtggagaacacccagctgcagaacgagaagctgtacctgtactacctgcagaacggccgggacatgtacgtggaccaggagctggacatcaaccggctgtccgactacgacgtggacgccatcgtgccccagtccttcctgaaggacgactccatcgacaacaaggtgctgacccggtccgacaagaaccggggcaagtccgacaacgtgccctccgaggaggtggtgaagaagatgaagaactactggcggcagctgctgaacgccaagctgatcacccagcggaagttcgacaacctgaccaaggccgagcggggcggcctgtccgagctggacaaggccggcttcatcaagcggcagctggtggagacccggcagatcaccaagcacgtggcccagatcctggactcccggatgaacaccaagtacgacgagaacgacaagctgatccgggaggtgaaggtgatcaccctgaagtccaagctggtgtccgacttccggaaggacttccagttctacaaggtgcgggagatcaacaactaccaccacgcccacgacgcctacctgaacgccgtggtgggcaccgccctgatcaagaagtaccccaagctggagtccgagttcgtgtacggcgactacaaggtgtacgacgtgcggaagatgatcgccaagtccgagcaggagatcggcaaggccaccgccaagtacttcttctactccaacatcatgaacttcttcaagaccgagatcaccctggccaacggcgagatccggaagcggcccctgatcgagaccaacggcgagaccggcgagatcgtgtgggacaagggccgggacttcgccaccgtgcggaaggtgctgtccatgccccaggtgaacatcgtgaagaagaccgaggtgcagaccggcggcttctccaaggagtccatcctgcccaagcggaactccgacaagctgatcgcccggaagaaggactgggaccccaagaagtacggcggcttcgactcccccaccgtggcctactccgtgctggtggtggccaaggtggagaagggcaagtccaagaagctgaagtccgtgaaggagctgctgggcatcaccatcatggagcggtcctccttcgagaagaaccccatcgacttcctggaggccaagggctacaaggaggtgaagaaggacctgatcatcaagctgcccaagtactccctgttcgagctggagaacggccggaagcggatgctggcctccgccggcgagctgcagaagggcaacgagctggccctgccctccaagtacgtgaacttcctgtacctggcctcccactacgagaagctgaagggctcccccgaggacaacgagcagaagcagctgttcgtggagcagcacaagcactacctggacgagatcatcgagcagatctccgagttctccaagcgggtgatcctggccgacgccaacctggacaaggtgctgtccgcctacaacaagcaccgggacaagcccatccgggagcaggccgagaacatcatccacctgttcaccctgaccaacctgggcgcccccgccgccttcaagtacttcgacaccaccatcgaccggaagcggtacacctccaccaaggaggtgctggacgccaccctgatccaccagtccatcaccggcctgtacgagacccggatcgacctgtcccagctgggcggcgactccggcggctccaagcggaccgccgacggctccgagttcgagtcccccaagaagaagcggaaggtgtag

SEQ ID NO: 1059 - protein, 2464 aa, synthetic construct
  REGION 1..2464: note = Synthetic
MASNFTQFVLVDNGGTGDVTVAPSNFANGVAEWISSNSRSQAYKVTCSVRQSSAQNRKYTIKVEVPKVATQTVGGVELPVAAWRSYLNMELTIPIFATNSDCELIVKAMQGLLKDGNPIPSAIAANSGIYGAPESATESGGTSTESEGSAGTSTESEGSAGSAGSTSGSGSSDSTKEKCDSYKDDLLLRMGLNDNKAGMEGLDKEKINKIIMEATKGSRFYGNELKKEKQVNQRIENMMQQKAQITSQQLRKAQLQVDRFAMELEQSRNLSNTIVHIDMDAFYAAVEMRDNPELKDKPIAVGSMSMLSTSNYHARRFGVRAAMPGFIAKRLCPQLIIVPPNFDKYRAVSKEVKEILADYDPNFMAMSLDEAYLNITKHLEERQNWPEDKRRYFIKMGSSVENDNPGKEVNKLSEHERSISPLLFEESPSDVQPPGDPFQVNFEEQNNPQILQNSVVFGTSAQEVVKEIRFRIEQKTTLTASAGIAPNTMLAKVCSDKNKPNGQYQILPNRQAVMDFIKDLPIRKVSGIGKVTEKMLKALGIITCTELYQQRALLSLLFSETSWHYFLHISLGLGSTHLTRDGERKSMSVERTFSEINKAEEQYSLCQELCSELAQDLQKERLKGRTVTIKLKNVNFEVKTRASTVSSVVSTAEEIFAIAKELLKTEIDADFPHPLRLRLMGVRISSFPNEEDRKHQQRSIIGFLQAGNQALSATECTLEKTDKDKFVKPLEMSHKKSFFDKKRSERKWSHQDTFKCEAVNKQSFQTSQPFQVLKKKMNENLEISENSDDCQILTCPVCFRAQGCISLEALNKHVDECLDGPSISENFKMFSCSHVSATKVNKKENVPASSLCEKQDYEAHPKIKEISSVDCIALVDTIDNSSKAESIDALSNKHSKEECSSLPSKSFNIEHCHQNSSSTVSLENEDVGSFRQEYRQPYLCEVKTGQALVCPVCNVEQKTSDLTLFNVHVDVCLNKSFIQELRKDKFNPVNQPKESSRSTGSSSGVQKAVTRTKRPGLMTKYSTSKKIKPNNPKHTLDIFFKSGGSSGGSKRTADGSEFESPKKKRKVSGGSSGGSDKKYSIGLDIGTNSVGWAVITDEYKVPSKKFKVLGNTDRHSIKKNLIGALLFDSGETAEATRLKRTARRRYTRRKNRICYLQEIFSNEMAKVDDSFFHRLEESFLVEEDKKHERHPIFGNIVDEVAYHEKYPTIYHLRKKLVDSTDKADLRLIYLALAHMIKFRGHFLIEGDLNPDNSDVDKLFIQLVQTYNQLFEENPINASGVDAKAILSARLSKSRRLENLIAQLPGEKKNGLFGNLIALSLGLTPNFKSNFDLAEDAKLQLSKDTYDDDLDNLLAQIGDQYADLFLAAKNLSDAILLSDILRVNTEITKAPLSASMIKRYDEHHQDLTLLKALVRQQLPEKYKEIFFDQSKNGYAGYIDGGASQEEFYKFIKPILEKMDGTEELLVKLNREDLLRKQRTFDNGSIPHQIHLGELHAILRRQEDFYPFLKDNREKIEKILTFRIPYYVGPLARGNSRFAWMTRKSEETITPWNFEEVVDKGASAQSFIERMTNFDKNLPNEKVLPKHSLLYEYFTVYNELTKVKYVTEGMRKPAFLSGEQKKAIVDLLFKTNRKVTVKQLKEDYFKKIECFDSVEISGVEDRFNASLGTYHDLLKIIKDKDFLDNEENEDILEDIVLTLTLFEDREMIEERLKTYAHLFDDKVMKQLKRRRYTGWGRLSRKLINGIRDKQSGKTILDFLKSDGFANRNFMQLIHDDSLTFKEDIQKAQVSGQGDSLHEHIANLAGSPAIKKGILQTVKVVDELVKVMGRHKPENIVIEMARENQTTQKGQKNSRERMKRIEEGIKELGSQILKEHPVENTQLQNEKLYLYYLQNGRDMYVDQELDINRLSDYDVDAIVPQSFLKDDSIDNKVLTRSDKNRGKSDNVPSEEVVKKMKNYWRQLLNAKLITQRKFDNLTKAERGGLSELDKAGFIKRQLVETRQITKHVAQILDSRMNTKYDENDKLIREVKVITLKSKLVSDFRKDFQFYKVREINNYHHAHDAYLNAVVGTALIKKYPKLESEFVYGDYKVYDVRKMIAKSEQEIGKATAKYFFYSNIMNFFKTEITLANGEIRKRPLIETNGETGEIVWDKGRDFATVRKVLSMPQVNIVKKTEVQTGGFSKESILPKRNSDKLIARKKDWDPKKYGGFDSPTVAYSVLVVAKVEKGKSKKLKSVKELLGITIMERSSFEKNPIDFLEAKGYKEVKKDLIIKLPKYSLFELENGRKRMLASAGELQKGNELALPSKYVNFLYLASHYEKLKGSPEDNEQKQLFVEQHKHYLDEIIEQISEFSKRVILADANLDKVLSAYNKHRDKPIREQAENIIHLFTLTNLGAPAAFKYFDTTIDRKRYTSTKEVLDATLIHQSITGLYETRIDLSQLGGDSGGSKRTADGSEFESPKKKRKV

SEQ ID NO: 1060 - RNA, 3809 nt, synthetic construct
  misc_feature 1..3809: note = Synthetic
  source 1..3809: mol_type = other RNA
gggaagctcagaataaacgctcaactttggccggatctgccaccatggcctccaacttcacccagttcgtgctggtggacaacggcggcaccggcgacgtgaccgtggccccctccaacttcgccaacggcgtggccgagtggatctcctccaactcccggtcccaggcctacaaggtgacctgctccgtgcggcagtcctccgcccagaaccggaagtacaccatcaaggtggaggtgcccaaggtggccacccagaccgtgggcggcgtggagctgcccgtggccgcctggcggtcctacctgaacatggagctgaccatccccatcttcgccaccaactccgactgcgagctgatcgtgaaggccatgcagggcctgctgaaggacggcaaccccatcccctccgccatcgccgccaactccggcatctacggcgcccccgagtccgccaccgagtccggcggcacctccaccgagtccgagggctccgccggcacctccaccgagtccgagggctccgccggctccgccggctccacctccggctccggctcctccatggactccaccaaggagaagtgcgactcctacaaggacgacctgctgctgcggatgggcctgaacgacaacaaggccggcatggagggcctggacaaggagaagatcaacaagatcatcatggaggccaccaagggctcccggttctacggcaacgagctgaagaaggagaagcaggtgaaccagcggatcgagaacatgatgcagcagaaggcccagatcacctcccagcagctgcggaaggcccagctgcaggtggaccggttcgccatggagctggagcagtcccggaacctgtccaacaccatcgtgcacatcgacatggacgccttctacgccgccgtggagatgcgggacaaccccgagctgaaggacaagcccatcgccgtgggctccatgtccatgctgtccacctccaactaccacgcccggcggttcggcgtgcgggccgccatgcccggcttcatcgccaagcggctgtgcccccagctgatcatcgtgccccccaacttcgacaagtaccgggccgtgtccaaggaggtgaaggagatcctggccgactacgaccccaacttcatggccatgtccctggacgaggcctacctgaacatcaccaagcacctggaggagcggcagaactggcccgaggacaagcggcggtacttcatcaagatgggctcctccgtggagaacgacaaccccggcaaggaggtgaacaagctgtccgagcacgagcggtccatctcccccctgctgttcgaggagtccccctccgacgtgcagccccccggcgaccccttccaggtgaacttcgaggagcagaacaacccccagatcctgcagaactccgtggtgttcggcacctccgcccaggaggtggtgaaggagatccggttccggatcgagcagaagaccaccctgaccgcctccgccggcatcgcccccaacaccatgctggccaaggtgtgctccgacaagaacaagcccaacggccagtaccagatcctgcccaaccggcaggccgtgatggacttcatcaaggacctgcccatccggaaggtgtccggcatcggcaaggtgaccgagaagatgctgaaggccctgggcatcatcacctgcaccgagctgtaccagcagcgggccctgctgtccctgctgttctccgagacctcctggcactacttcctgcacatctccctgggcctgggctccacccacctgacccgggacggcgagcggaagtccatgtccgtggagcggaccttctccgagatcaacaaggccgaggagcagtactccctgtgccaggagctgtgctccgagctggcccaggacctgcagaaggagcggctgaagggccggaccgtgaccatcaagctgaagaacgtgaacttcgaggtgaagacccgggcctccaccgtgtcctccgtggtgtccaccgccgaggagatcttcgccatcgccaaggagctgctgaagaccgagatcgacgccgacttcccccaccccctgcggctgcggctgatgggcgtgcggatctcctccttccccaacgaggaggaccggaagcaccagcagcggtccatcatcggcttcctgcaggccggcaaccaggccctgtccgccaccgagtgcaccctggagaagaccgacaaggacaagttcgtgaagcccctggagatgtcccacaagaagtccttcttcgacaagaagcggtccgagcggaagtggtcccaccaggacaccttcaagtgcgaggccgtgaacaagcagtccttccagacctcccagcccttccaggtgctgaagaagaagatgaacgagaacctggagatctccgagaactccgacgactgccagatcctgacctgccccgtgtgcttccgggcccagggctgcatctccctggaggccctgaacaagcacgtggacgagtgcctggacggcccctccatctccgagaacttcaagatgttctcctgctcccacgtgtccgccaccaaggtgaacaagaaggagaacgtgcccgcctcctccctgtgcgagaagcaggactacgaggcccaccccaagatcaaggagatctcctccgtggactgcatcgccctggtggacaccatcgacaactcctccaaggccgagtccatcgacgccctgtccaacaagcactccaaggaggagtgctcctccctgccctccaagtccttcaacatcgagcactgccaccagaactcctcctccaccgtgtccctggagaacgaggacgtgggctccttccggcaggagtaccggcagccctacctgtgcgaggtgaagaccggccaggccctggtgtgccccgtgtgcaacgtggagcagaagacctccgacctgaccctgttcaacgtgcacgtggacgtgtgcctgaacaagtccttcatccaggagctgcggaaggacaagttcaaccccgtgaaccagcccaaggagtcctcccggtccaccggctcctcctccggcgtgcagaaggccgtgacccggaccaagcggcccggcctgatgaccaagtactccacctccaagaagatcaagcccaacaaccccaagcacaccctggacatcttcttcaagtccggcggctccaagcggaccgccgacggctccgagttcgagcccaagaagaagcggaaggtgtccgagtccgccacccccgagtccgtgtccggctggcggctgttcaagaagatctcctagctagcaccagcctcaagaacacccgaatggagtctctaagctacataataccaacttacactttacaaaatgttgtcccccaaaatgtagccattcgtatctgctcctaataaaaagaaagtttcttcacattctctcgagaaaaaaaaaaaatggaaaaaaaaaaaacggaaaaaaaaaaaaggtaaaaaaaaaaaatataaaaaaaaaaaacataaaaaaaaaaaacgaaaaaaaaaaaacgtaaaaaaaaaaaactcaaaaaaaaaaaagataaaaaaaaaaaacctaaaaaaaaaaaatgtaaaaaaaaaaaagggaaaaaaaaaaaacgcaaaaaaaaaaaacacaaaaaaaaaaaatgcaaaaaaaaaaaatcgaaaaaaaaaaaatctaaaaaaaaaaaacgaaaaaaaaaaaacccaaaaaaaaaaaagacaaaaaaaaaaaatagaaaaaaaaaaaagttaaaaaaaaaaaactgaaaaaaaaaaaatttaaaaaaaaaaaatctag

SEQ ID NO: 1061 - RNA, 3249 nt, synthetic construct
  misc_feature 1..3249: note = Synthetic
  source 1..3249: mol_type = other RNA
atggcctccaacttcacccagttcgtgctggtggacaacggcggcaccggcgacgtgaccgtggccccctccaacttcgccaacggcgtggccgagtggatctcctccaactcccggtcccaggcctacaaggtgacctgctccgtgcggcagtcctccgcccagaaccggaagtacaccatcaaggtggaggtgcccaaggtggccacccagaccgtgggcggcgtggagctgcccgtggccgcctggcggtcctacctgaacatggagctgaccatccccatcttcgccaccaactccgactgcgagctgatcgtgaaggccatgcagggcctgctgaaggacggcaaccccatcccctccgccatcgccgccaactccggcatctacggcgcccccgagtccgccaccgagtccggcggcacctccaccgagtccgagggctccgccggcacctccaccgagtccgagggctccgccggctccgccggctccacctccggctccggctcctccatggactccaccaaggagaagtgcgactcctacaaggacgacctgctgctgcggatgggcctgaacgacaacaaggccggcatggagggcctggacaaggagaagatcaacaagatcatcatggaggccaccaagggctcccggttctacggcaacgagctgaagaaggagaagcaggtgaaccagcggatcgagaacatgatgcagcagaaggcccagatcacctcccagcagctgcggaaggcccagctgcaggtggaccggttcgccatggagctggagcagtcccggaacctgtccaacaccatcgtgcacatcgacatggacgccttctacgccgccgtggagatgcgggacaaccccgagctgaaggacaagcccatcgccgtgggctccatgtccatgctgtccacctccaactaccacgcccggcggttcggcgtgcgggccgccatgcccggcttcatcgccaagcggctgtgcccccagctgatcatcgtgccccccaacttcgacaagtaccgggccgtgtccaaggaggtgaaggagatcctggccgactacgaccccaacttcatggccatgtccctggacgaggcctacctgaacatcaccaagcacctggaggagcggcagaactggcccgaggacaagcggcggtacttcatcaagatgggctcctccgtggagaacgacaaccccggcaaggaggtgaacaagctgtccgagcacgagcggtccatctcccccctgctgttcgaggagtccccctccgacgtgcagccccccggcgaccccttccaggtgaacttcgaggagcagaacaacccccagatcctgcagaactccgtggtgttcggcacctccgcccaggaggtggtgaaggagatccggttccggatcgagcagaagaccaccctgaccgcctccgccggcatcgcccccaacaccatgctggccaaggtgtgctccgacaagaacaagcccaacggccagtaccagatcctgcccaaccggcaggccgtgatggacttcatcaaggacctgcccatccggaaggtgtccggcatcggcaaggtgaccgagaagatgctgaaggccctgggcatcatcacctgcaccgagctgtaccagcagcgggccctgctgtccctgctgttctccgagacctcctggcactacttcctgcacatctccctgggcctgggctccacccacctgacccgggacggcgagcggaagtccatgtccgtggagcggaccttctccgagatcaacaaggccgaggagcagtactccctgtgccaggagctgtgctccgagctggcccaggacctgcagaaggagcggctgaagggccggaccgtgaccatcaagctgaagaacgtgaacttcgaggtgaagacccgggcctccaccgtgtcctccgtggtgtccaccgccgaggagatcttcgccatcgccaaggagctgctgaagaccgagatcgacgccgacttcccccaccccctgcggctgcggctgatgggcgtgcggatctcctccttccccaacgaggaggaccggaagcaccagcagcggtccatcatcggcttcctgcaggccggcaaccaggccctgtccgccaccgagtgcaccctggagaagaccgacaaggacaagttcgtgaagcccctggagatgtcccacaagaagtccttcttcgacaagaagcggtccgagcggaagtggtcccaccaggacaccttcaagtgcgaggccgtgaacaagcagtccttccagacctcccagcccttccaggtgctgaagaagaagatgaacgagaacctggagatctccgagaactccgacgactgccagatcctgacctgccccgtgtgcttccgggcccagggctgcatctccctggaggccctgaacaagcacgtggacgagtgcctggacggcccctccatctccgagaacttcaagatgttctcctgctcccacgtgtccgccaccaaggtgaacaagaaggagaacgtgcccgcctcctccctgtgcgagaagcaggactacgaggcccaccccaagatcaaggagatctcctccgtggactgcatcgccctggtggacaccatcgacaactcctccaaggccgagtccatcgacgccctgtccaacaagcactccaaggaggagtgctcctccctgccctccaagtccttcaacatcgagcactgccaccagaactcctcctccaccgtgtccctggagaacgaggacgtgggctccttccggcaggagtaccggcagccctacctgtgcgaggtgaagaccggccaggccctggtgtgccccgtgtgcaacgtggagcagaagacctccgacctgaccctgttcaacgtgcacgtggacgtgtgcctgaacaagtccttcatccaggagctgcggaaggacaagttcaaccccgtgaaccagcccaaggagtcctcccggtccaccggctcctcctccggcgtgcagaaggccgtgacccggaccaagcggcccggcctgatgaccaagtactccacctccaagaagatcaagcccaacaaccccaagcacaccctggacatcttcttcaagtccggcggctccaagcggaccgccgacggctccgagttcgagcccaagaagaagcggaaggtgtccgagtccgccacccccgagtccgtgtccggctggcggctgttcaagaagatctcctag

SEQ ID NO: 1062 - protein, 1082 aa, synthetic construct
  REGION 1..1082: note = Synthetic
MASNFTQFVLVDNGGTGDVTVAPSNFANGVAEWISSNSRSQAYKVTCSVRQSSAQNRKYTIKVEVPKVATQTVGGVELPVAAWRSYLNMELTIPIFATNSDCELIVKAMQGLLKDGNPIPSAIAANSGIYGAPESATESGGTSTESEGSAGTSTESEGSAGSAGSTSGSGSSMDSTKEKCDSYKDDLLLRMGLNDNKAGMEGLDKEKINKIIMEATKGSRFYGNELKKEKQVNQRIENMMQQKAQITSQQLRKAQLQVDRFAMELEQSRNLSNTIVHIDMDAFYAAVEMRDNPELKDKPIAVGSMSMLSTSNYHARRFGVRAAMPGFIAKRLCPQLIIVPPNFDKYRAVSKEVKEILADYDPNFMAMSLDEAYLNITKHLEERQNWPEDKRRYFIKMGSSVENDNPGKEVNKLSEHERSISPLLFEESPSDVQPPGDPFQVNFEEQNNPQILQNSVVFGTSAQEVVKEIRFRIEQKTTLTASAGIAPNTMLAKVCSDKNKPNGQYQILPNRQAVMDFIKDLPIRKVSGIGKVTEKMLKALGIITCTELYQQRALLSLLFSETSWHYFLHISLGLGSTHLTRDGERKSMSVERTFSEINKAEEQYSLCQELCSELAQDLQKERLKGRTVTIKLKNVNFEVKTRASTVSSVVSTAEEIFAIAKELLKTEIDADFPHPLRLRLMGVRISSFPNEEDRKHQQRSIIGFLQAGNQALSATECTLEKTDKDKFVKPLEMSHKKSFFDKKRSERKWSHQDTFKCEAVNKQSFQTSQPFQVLKKKMNENLEISENSDDCQILTCPVCFRAQGCISLEALNKHVDECLDGPSISENFKMFSCSHVSATKVNKKENVPASSLCEKQDYEAHPKIKEISSVDCIALVDTIDNSSKAESIDALSNKHSKEECSSLPSKSFNIEHCHQNSSSTVSLENEDVGSFRQEYRQPYLCEVKTGQALVCPVCNVEQKTSDLTLFNVHVDVCLNKSFIQELRKDKFNPVNQPKESSRSTGSSSGVQKAVTRTKRPGLMTKYSTSKKIKPNNPKHTLDIFFKSGGSKRTADGSEFEPKKKRKVSESATPESVSGWRLFKKIS

SEQ ID NO: 1063 - RNA, 3189 nt, synthetic construct
  misc_feature 1..3189: note = Synthetic
  source 1..3189: mol_type = other RNA
atggcctccaacttcacccagttcgtgctggtggacaacggcggcaccggcgacgtgaccgtggccccctccaacttcgccaacggcgtggccgagtggatctcctccaactcccggtcccaggcctacaaggtgacctgctccgtgcggcagtcctccgcccagaaccggaagtacaccatcaaggtggaggtgcccaaggtggccacccagaccgtgggcggcgtggagctgcccgtggccgcctggcggtcctacctgaacatggagctgaccatccccatcttcgccaccaactccgactgcgagctgatcgtgaaggccatgcagggcctgctgaaggacggcaaccccatcccctccgccatcgccgccaactccggcatctacggcgcccccgagtccgccaccgagtccggcggcacctccaccgagtccgagggctccgccggcacctccaccgagtccgagggctccgccggctccgccggctccacctccggctccggctcctccatggactccaccaaggagaagtgcgactcctacaaggacgacctgctgctgcggatgggcctgaacgacaacaaggccggcatggagggcctggacaaggagaagatcaacaagatcatcatggaggccaccaagggctcccggttctacggcaacgagctgaagaaggagaagcaggtgaaccagcggatcgagaacatgatgcagcagaaggcccagatcacctcccagcagctgcggaaggcccagctgcaggtggaccggttcgccatggagctggagcagtcccggaacctgtccaacaccatcgtgcacatcgacatggacgccttctacgccgccgtggagatgcgggacaaccccgagctgaaggacaagcccatcgccgtgggctccatgtccatgctgtccacctccaactaccacgcccggcggttcggcgtgcgggccgccatgcccggcttcatcgccaagcggctgtgcccccagctgatcatcgtgccccccaacttcgacaagtaccgggccgtgtccaaggaggtgaaggagatcctggccgactacgaccccaacttcatggccatgtccctggacgaggcctacctgaacatcaccaagcacctggaggagcggcagaactggcccgaggacaagcggcggtacttcatcaagatgggctcctccgtggagaacgacaaccccggcaaggaggtgaacaagctgtccgagcacgagcggtccatctcccccctgctgttcgaggagtccccctccgacgtgcagccccccggcgaccccttccaggtgaacttcgaggagcagaacaacccccagatcctgcagaactccgtggtgttcggcacctccgcccaggaggtggtgaaggagatccggttccggatcgagcagaagaccaccctgaccgcctccgccggcatcgcccccaacaccatgctggccaaggtgtgctccgacaagaacaagcccaacggccagtaccagatcctgcccaaccggcaggccgtgatggacttcatcaaggacctgcccatccggaaggtgtccggcatcggcaaggtgaccgagaagatgctgaaggccctgggcatcatcacctgcaccgagctgtaccagcagcgggccctgctgtccctgctgttctccgagacctcctggcactacttcctgcacatctccctgggcctgggctccacccacctgacccgggacggcgagcggaagtccatgtccgtggagcggaccttctccgagatcaacaaggccgaggagcagtactccctgtgccaggagctgtgctccgagctggcccaggacctgcagaaggagcggctgaagggccggaccgtgaccatcaagctgaagaacgtgaacttcgaggtgaagacccgggcctccaccgtgtcctccgtggtgtccaccgccgaggagatcttcgccatcgccaaggagctgctgaagaccgagatcgacgccgacttcccccaccccctgcggctgcggctgatgggcgtgcggatctcctccttccccaacgaggaggaccggaagcaccagcagcggtccatcatcggcttcctgcaggccggcaaccaggccctgtccgccaccgagtgcaccctggagaagaccgacaaggacaagttcgtgaagcccctggagatgtcccacaagaagtccttcttcgacaagaagcggtccgagcggaagtggtcccaccaggacaccttcaagtgcgaggccgtgaacaagcagtccttccagacctcccagcccttccaggtgctgaagaagaagatgaacgagaacctggagatctccgagaactccgacgactgccagatcctgacctgccccgtgtgcttccgggcccagggctgcatctccctggaggccctgaacaagcacgtggacgagtgcctggacggcccctccatctccgagaacttcaagatgttctcctgctcccacgtgtccgccaccaaggtgaacaagaaggagaacgtgcccgcctcctccctgtgcgagaagcaggactacgaggcccaccccaagatcaaggagatctcctccgtggactgcatcgccctggtggacaccatcgacaactcctccaaggccgagtccatcgacgccctgtccaacaagcactccaaggaggagtgctcctccctgccctccaagtccttcaacatcgagcactgccaccagaactcctcctccaccgtgtccctggagaacgaggacgtgggctccttccggcaggagtaccggcagccctacctgtgcgaggtgaagaccggccaggccctggtgtgccccgtgtgcaacgtggagcagaagacctccgacctgaccctgttcaacgtgcacgtggacgtgtgcctgaacaagtccttcatccaggagctgcggaaggacaagttcaaccccgtgaaccagcccaaggagtcctcccggtccaccggctcctcctccggcgtgcagaaggccgtgacccggaccaagcggcccggcctgatgaccaagtactccacctccaagaagatcaagcccaacaaccccaagcacaccctggacatcttcttcaagtccggcggctccaagcggaccgccgacggctccgagttcgagcccaagaagaagcggaaggtg

SEQ ID NO: 1064 - protein, 1063 aa, synthetic construct
  REGION 1..1063: note = Synthetic
MASNFTQFVLVDNGGTGDVTVAPSNFANGVAEWISSNSRSQAYKVTCSVRQSSAQNRKYTIKVEVPKVATQTVGGVELPVAAWRSYLNMELTIPIFATNSDCELIVKAMQGLLKDGNPIPSAIAANSGIYGAPESATESGGTSTESEGSAGTSTESEGSAGSAGSTSGSGSSMDSTKEKCDSYKDDLLLRMGLNDNKAGMEGLDKEKINKIIMEATKGSRFYGNELKKEKQVNQRIENMMQQKAQITSQQLRKAQLQVDRFAMELEQSRNLSNTIVHIDMDAFYAAVEMRDNPELKDKPIAVGSMSMLSTSNYHARRFGVRAAMPGFIAKRLCPQLIIVPPNFDKYRAVSKEVKEILADYDPNFMAMSLDEAYLNITKHLEERQNWPEDKRRYFIKMGSSVENDNPGKEVNKLSEHERSISPLLFEESPSDVQPPGDPFQVNFEEQNNPQILQNSVVFGTSAQEVVKEIRFRIEQKTTLTASAGIAPNTMLAKVCSDKNKPNGQYQILPNRQAVMDFIKDLPIRKVSGIGKVTEKMLKALGIITCTELYQQRALLSLLFSETSWHYFLHISLGLGSTHLTRDGERKSMSVERTFSEINKAEEQYSLCQELCSELAQDLQKERLKGRTVTIKLKNVNFEVKTRASTVSSVVSTAEEIFAIAKELLKTEIDADFPHPLRLRLMGVRISSFPNEEDRKHQQRSIIGFLQAGNQALSATECTLEKTDKDKFVKPLEMSHKKSFFDKKRSERKWSHQDTFKCEAVNKQSFQTSQPFQVLKKKMNENLEISENSDDCQILTCPVCFRAQGCISLEALNKHVDECLDGPSISENFKMFSCSHVSATKVNKKENVPASSLCEKQDYEAHPKIKEISSVDCIALVDTIDNSSKAESIDALSNKHSKEECSSLPSKSFNIEHCHQNSSSTVSLENEDVGSFRQEYRQPYLCEVKTGQALVCPVCNVEQKTSDLTLFNVHVDVCLNKSFIQELRKDKFNPVNQPKESSRSTGSSSGVQKAVTRTKRPGLMTKYSTSKKIKPNNPKHTLDIFFKSGGSKRTADGSEFEPKKKRKV

SEQ ID NO: 1065 - RNA, 3809 nt, synthetic construct
  misc_feature 1..3809: note = Synthetic
  source 1..3809: mol_type = other RNA
gggaagctcagaataaacgctcaactttggccggatctgccaccatggcctccaacttcacccagttcgtgctggtggacaacggcggcaccggcgacgtgaccgtggccccctccaacttcgccaacggcgtggccgagtggatctcctccaactcccggtcccaggcctacaaggtgacctgctccgtgcggcagtcctccgcccagaaccggaagtacaccatcaaggtggaggtgcccaaggtggccacccagaccgtgggcggcgtggagctgcccgtggccgcctggcggtcctacctgaacatggagctgaccatccccatcttcgccaccaactccgactgcgagctgatcgtgaaggccatgcagggcctgctgaaggacggcaaccccatcccctccgccatcgccgccaactccggcatctacggcgcccccgagtccgccaccgagtccggcggcacctccaccgagtccgagggctccgccggcacctccaccgagtccgagggctccgccggctccgccggctccacctccggctccggctcctccatggactccaccaaggagaagtgcgactcctacaaggacgacctgctgctgcggatgggcctgaacgacaacaaggccggcatggagggcctggacaaggagaagatcaacaagatcatcatggaggccaccaagggctcccggttctacggcaacgagctgaagaaggagaagcaggtgaaccagcggatcgagaacatgatgcagcagaaggcccagatcacctcccagcagctgcggaaggcccagctgcaggtggaccggttcgccatggagctggagcagtcccggaacctgtccaacaccatcgtgcacatcgacatggacgccttctacgccgccgtggagatgcgggacaaccccgagctgaaggacaagcccatcgccgtgggctccatgtccatgctgtccacctccaactaccacgcccggcggttcggcgtgcgggccgccatgcccggcttcatcgccaagcggctgtgcccccagctgatcatcgtgccccccaacttcgacaagtaccgggccgtgtccaaggaggtgaaggagatcctggccgactacgaccccaacttcatggccatgtccctggacgaggcctacctgaacatcaccaagcacctggaggagcggcagaactggcccgaggacaagcggcggtacttcatcaagatgggctcctccgtggagaacgacaaccccggcaaggaggtgaacaagctgtccgagcacgagcggtccatctcccccctgctgttcgaggagtccccctccgacgtgcagccccccggcgaccccttccaggtgaacttcgaggagcagaacaacccccagatcctgcagaactccgtggtgttcggcacctccgcccaggaggtggtgaaggagatccggttccggatcgagcagaagaccaccctgaccgcctccgccggcatcgcccccaacaccatgctggccaaggtgtgctccgacaagaacaagcccaacggccagtaccagatcctgcccaaccggcaggccgtgatggacttcatcaaggacctgcccatccggaaggtgtccggcatcggcaaggtgaccgagaagatgctgaaggccctgggcatcatcacctgcaccgagctgtaccagcagcgggccctgctgtccctgctgttctccgagacctcctggcactacttcctgcacatctccctgggcctgggctccacccacctgacccgggaccgggtgcggaagtccatgtccgtggagcggaccttctccgagatcaacaaggccgaggagcagtactccctgtgccaggagctgtgctccgagctggcccaggacctgcagaaggagcggctgaagggccggaccgtgaccatcaagctgaagaacgtgaacttcgaggtgaagacccgggcctccaccgtgtcctccgtggtgtccaccgccgaggagatcttcgccatcgccaaggagctgctgaagaccgagatcgacgccgacttcccccaccccctgcggctgcggctgatgggcgtgcggatctcctccttccccaacgaggaggaccggaagcaccagcagcggtccatcatcggcttcctgcaggccggcaaccaggccctgtccgccaccgagtgcaccctggagaagaccgacaaggacaagttcgtgaagcccctggagatgtcccacaagaagtccttcttcgacaagaagcggtccgagcggaagtggtcccaccaggacaccttcaagtgcgaggccgtgaacaagcagtccttccagacctcccagcccttccaggtgctgaagaagaagatgaacgagaacctggagatctccgagaactccgacgactgccagatcctgacctgccccgtgtgcttccgggcccagggctgcatctccctggaggccctgaacaagcacgtggacgagtgcctggacggcccctccatctccgagaacttcaagatgttctcctgctcccacgtgtccgccaccaaggtgaacaagaaggagaacgtgcccgcctcctccctgtgcgagaagcaggactacgaggcccaccccaagatcaaggagatctcctccgtggactgcatcgccctggtggacaccatcgacaactcctccaaggccgagtccatcgacgccctgtccaacaagcactccaaggaggagtgctcctccctgccctccaagtccttcaacatcgagcactgccaccagaactcctcctccaccgtgtccctggagaacgaggacgtgggctccttccggcaggagtaccggcagccctacctgtgcgaggtgaagaccggccaggccctggtgtgccccgtgtgcaacgtggagcagaagacctccgacctgaccctgttcaacgtgcacgtggacgtgtgcctgaacaagtccttcatccaggagctgcggaaggacaagttcaaccccgtgaaccagcccaaggagtcctcccggtccaccggctcctcctccggcgtgcagaaggccgtgacccggaccaagcggcccggcctgatgaccaagtactccacctccaagaagatcaagcccaacaaccccaagcacaccctggacatcttcttcaagtccggcggctccaagcggaccgccgacggctccgagttcgagcccaagaagaagcggaaggtgtccgagtccgccacccccgagtccgtgtccggctggcggctgttcaagaagatctcctagctagcaccagcctcaagaacacccgaatggagtctctaagctacataataccaacttacactttacaaaatgttgtcccccaaaatgtagccattcgtatctgctcctaataaaaagaaagtttcttcacattctctcgagaaaaaaaaaaaatggaaaaaaaaaaaacggaaaaaaaaaaaaggtaaaaaaaaaaaatataaaaaaaaaaaacataaaaaaaaaaaacgaaaaaaaaaaaacgtaaaaaaaaaaaactcaaaaaaaaaaaagataaaaaaaaaaaacctaaaaaaaaaaaatgtaaaaaaaaaaaagggaaaaaaaaaaaacgcaaaaaaaaaaaacacaaaaaaaaaaaatgcaaaaaaaaaaaatcgaaaaaaaaaaaatctaaaaaaaaaaaacgaaaaaaaaaaaacccaaaaaaaaaaaagacaaaaaaaaaaaatagaaaaaaaaaaaagttaaaaaaaaaaaactgaaaaaaaaaaaatttaaaaaaaaaaaatctag

SEQ ID NO: 1066 - RNA, 3249 nt, synthetic construct
  misc_feature 1..3249: note = Synthetic
  source 1..3249: mol_type = other RNA
atggcctccaacttcacccagttcgtgctggtggacaacggcggcaccggcgacgtgaccgtggccccctccaacttcgccaacggcgtggccgagtggatctcctccaactcccggtcccaggcctacaaggtgacctgctccgtgcggcagtcctccgcccagaaccggaagtacaccatcaaggtggaggtgcccaaggtggccacccagaccgtgggcggcgtggagctgcccgtggccgcctggcggtcctacctgaacatggagctgaccatccccatcttcgccaccaactccgactgcgagctgatcgtgaaggccatgcagggcctgctgaaggacggcaaccccatcccctccgccatcgccgccaactccggcatctacggcgcccccgagtccgccaccgagtccggcggcacctccaccgagtccgagggctccgccggcacctccaccgagtccgagggctccgccggctccgccggctccacctccggctccggctcctccatggactccaccaaggagaagtgcgactcctacaaggacgacctgctgctgcggatgggcctgaacgacaacaaggccggcatggagggcctggacaaggagaagatcaacaagatcatcatggaggccaccaagggctcccggttctacggcaacgagctgaagaaggagaagcaggtgaaccagcggatcgagaacatgatgcagcagaaggcccagatcacctcccagcagctgcggaaggcccagctgcaggtggaccggttcgccatggagctggagcagtcccggaacctgtccaacaccatcgtgcacatcgacatggacgccttctacgccgccgtggagatgcgggacaaccccgagctgaaggacaagcccatcgccgtgggctccatgtccatgctgtccacctccaactaccacgcccggcggttcggcgtgcgggccgccatgcccggcttcatcgccaagcggctgtgcccccagctgatcatcgtgccccccaacttcgacaagtaccgggccgtgtccaaggaggtgaaggagatcctggccgactacgaccccaacttcatggccatgtccctggacgaggcctacctgaacatcaccaagcacctggaggagcggcagaactggcccgaggacaagcggcggtacttcatcaagatgggctcctccgtggagaacgacaaccccggcaaggaggtgaacaagctgtccgagcacgagcggtccatctcccccctgctgttcgaggagtccccctccgacgtgcagccccccggcgaccccttccaggtgaacttcgaggagcagaacaacccccagatcctgcagaactccgtggtgttcggcacctccgcccaggaggtggtgaaggagatccggttccggatcgagcagaagaccaccctgaccgcctccgccggcatcgcccccaacaccatgctggccaaggtgtgctccgacaagaacaagcccaacggccagtaccagatcctgcccaaccggcaggccgtgatggacttcatcaaggacctgcccatccggaaggtgtccggcatcggcaaggtgaccgagaagatgctgaaggccctgggcatcatcacctgcaccgagctgtaccagcagcgggccctgctgtccctgctgttctccgagacctcctggcactacttcctgcacatctccctgggcctgggctccacccacctgacccgggaccgggtgcggaagtccatgtccgtggagcggaccttctccgagatcaacaaggccgaggagcagtactccctgtgccaggagctgtgctccgagctggcccaggacctgcagaaggagcggctgaagggccggaccgtgaccatcaagctgaagaacgtgaacttcgaggtgaagacccgggcctccaccgtgtcctccgtggtgtccaccgccgaggagatcttcgccatcgccaaggagctgctgaagaccgagatcgacgccgacttcccccaccccctgcggctgcggctgatgggcgtgcggatctcctccttccccaacgaggaggaccggaagcaccagcagcggtccatcatcggcttcctgcaggccggcaaccaggccctgtccgccaccgagtgcaccctggagaagaccgacaaggacaagttcgtgaagcccctggagatgtcccacaagaagtccttcttcgacaagaagcggtccgagcggaagtggtcccaccaggacaccttcaagtgcgaggccgtgaacaagcagtccttccagacctcccagcccttccaggtgctgaagaagaagatgaacgagaacctggagatctccgagaactccgacgactgccagatcctgacctgccccgtgtgcttccgggcccagggctgcatctccctggaggccctgaacaagcacgtggacgagtgcctggacggcccctccatctccgagaacttcaagatgttctcctgctcccacgtgtccgccaccaaggtgaacaagaaggagaacgtgcccgcctcctccctgtgcgagaagcaggactacgaggcccaccccaagatcaaggagatctcctccgtggactgcatcgccctggtggacaccatcgacaactcctccaaggccgagtccatcgacgccctgtccaacaagcactccaaggaggagtgctcctccctgccctccaagtccttcaacatcgagcactgccaccagaactcctcctccaccgtgtccctggagaacgaggacgtgggctccttccggcaggagtaccggcagccctacctgtgcgaggtgaagaccggccaggccctggtgtgccccgtgtgcaacgtggagcagaagacctccgacctgaccctgttcaacgtgcacgtggacgtgtgcctgaacaagtccttcatccaggagctgcggaaggacaagttcaaccccgtgaaccagcccaaggagtcctcccggtccaccggctcctcctccggcgtgcagaaggccgtgacccggaccaagcggcccggcctgatgaccaagtactccacctccaagaagatcaagcccaacaaccccaagcacaccctggacatcttcttcaagtccggcggctccaagcggaccgccgacggctccgagttcgagcccaagaagaagcggaaggtgtccgagtccgccacccccgagtccgtgtccggctggcggctgttcaagaagatctcctag

SEQ ID NO: 1067 - protein, 1082 aa, synthetic construct
  REGION 1..1082: note = Synthetic
MASNFTQFVLVDNGGTGDVTVAPSNFANGVAEWISSNSRSQAYKVTCSVRQSSAQNRKYTIKVEVPKVATQTVGGVELPVAAWRSYLNMELTIPIFATNSDCELIVKAMQGLLKDGNPIPSAIAANSGIYGAPESATESGGTSTESEGSAGTSTESEGSAGSAGSTSGSGSSMDSTKEKCDSYKDDLLLRMGLNDNKAGMEGLDKEKINKIIMEATKGSRFYGNELKKEKQVNQRIENMMQQKAQITSQQLRKAQLQVDRFAMELEQSRNLSNTIVHIDMDAFYAAVEMRDNPELKDKPIAVGSMSMLSTSNYHARRFGVRAAMPGFIAKRLCPQLIIVPPNFDKYRAVSKEVKEILADYDPNFMAMSLDEAYLNITKHLEERQNWPEDKRRYFIKMGSSVENDNPGKEVNKLSEHERSISPLLFEESPSDVQPPGDPFQVNFEEQNNPQILQNSVVFGTSAQEVVKEIRFRIEQKTTLTASAGIAPNTMLAKVCSDKNKPNGQYQILPNRQAVMDFIKDLPIRKVSGIGKVTEKMLKALGIITCTELYQQRALLSLLFSETSWHYFLHISLGLGSTHLTRDRVRKSMSVERTFSEINKAEEQYSLCQELCSELAQDLQKERLKGRTVTIKLKNVNFEVKTRASTVSSVVSTAEEIFAIAKELLKTEIDADFPHPLRLRLMGVRISSFPNEEDRKHQQRSIIGFLQAGNQALSATECTLEKTDKDKFVKPLEMSHKKSFFDKKRSERKWSHQDTFKCEAVNKQSFQTSQPFQVLKKKMNENLEISENSDDCQILTCPVCFRAQGCISLEALNKHVDECLDGPSISENFKMFSCSHVSATKVNKKENVPASSLCEKQDYEAHPKIKEISSVDCIALVDTIDNSSKAESIDALSNKHSKEECSSLPSKSFNIEHCHQNSSSTVSLENEDVGSFRQEYRQPYLCEVKTGQALVCPVCNVEQKTSDLTLFNVHVDVCLNKSFIQELRKDKFNPVNQPKESSRSTGSSSGVQKAVTRTKRPGLMTKYSTSKKIKPNNPKHTLDIFFKSGGSKRTADGSEFEPKKKRKVSESATPESVSGWRLFKKIS

SEQ ID NO: 1068 - RNA, 3189 nt, synthetic construct
  misc_feature 1..3189: note = Synthetic
  source 1..3189: mol_type = other RNA
atggcctccaacttcacccagttcgtgctggtggacaacggcggcaccggcgacgtgaccgtggccccctccaacttcgccaacggcgtggccgagtggatctcctccaactcccggtcccaggcctacaaggtgacctgctccgtgcggcagtcctccgcccagaaccggaagtacaccatcaaggtggaggtgcccaaggtggccacccagaccgtgggcggcgtggagctgcccgtggccgcctggcggtcctacctgaacatggagctgaccatccccatcttcgccaccaactccgactgcgagctgatcgtgaaggccatgcagggcctgctgaaggacggcaaccccatcccctccgccatcgccgccaactccggcatctacggcgcccccgagtccgccaccgagtccggcggcacctccaccgagtccgagggctccgccggcacctccaccgagtccgagggctccgccggctccgccggctccacctccggctccggctcctccatggactccaccaaggagaagtgcgactcctacaaggacgacctgctgctgcggatgggcctgaacgacaacaaggccggcatggagggcctggacaaggagaagatcaacaagatcatcatggaggccaccaagggctcccggttctacggcaacgagctgaagaaggagaagcaggtgaaccagcggatcgagaacatgatgcagcagaaggcccagatcacctcccagcagctgcggaaggcccagctgcaggtggaccggttcgccatggagctggagcagtcccggaacctgtccaacaccatcgtgcacatcgacatggacgccttctacgccgccgtggagatgcgggacaaccccgagctgaaggacaagcccatcgccgtgggctccatgtccatgctgtccacctccaactaccacgcccggcggttcggcgtgcgggccgccatgcccggcttcatcgccaagcggctgtgcccccagctgatcatcgtgccccccaacttcgacaagtaccgggccgtgtccaaggaggtgaaggagatcctggccgactacgaccccaacttcatggccatgtccctggacgaggcctacctgaacatcaccaagcacctggaggagcggcagaactggcccgaggacaagcggcggtacttcatcaagatgggctcctccgtggagaacgacaaccccggcaaggaggtgaacaagctgtccgagcacgagcggtccatctcccccctgctgttcgaggagtccccctccgacgtgcagccccccggcgaccccttccaggtgaacttcgaggagcagaacaacccccagatcctgcagaactccgtggtgttcggcacctccgcccaggaggtggtgaaggagatccggttccggatcgagcagaagaccaccctgaccgcctccgccggcatcgcccccaacaccatgctggccaaggtgtgctccgacaagaacaagcccaacggccagtaccagatcctgcccaaccggcaggccgtgatggacttcatcaaggacctgcccatccggaaggtgtccggcatcggcaaggtgaccgagaagatgctgaaggccctgggcatcatcacctgcaccgagctgtaccagcagcgggccctgctgtccctgctgttctccgagacctcctggcactacttcctgcacatctccctgggcctgggctccacccacctgacccgggaccgggtgcggaagtccatgtccgtggagcggaccttctccgagatcaacaaggccgaggagcagtactccctgtgccaggagctgtgctccgagctggcccaggacctgcagaaggagcggctgaagggccggaccgtgaccatcaagctgaagaacgtgaacttcgaggtgaagacccgggcctccaccgtgtcctccgtggtgtccaccgccgaggagatcttcgccatcgccaaggagctgctgaagaccgagatcgacgccgacttcccccaccccctgcggctgcggctgatgggcgtgcggatctcctccttccccaacgaggaggaccggaagcaccagcagcggtccatcatcggcttcctgcaggccggcaaccaggccctgtccgccaccgagtgcaccctggagaagaccgacaaggacaagttcgtgaagcccctggagatgtcccacaagaagtccttcttcgacaagaagcggtccgagcggaagtggtcccaccaggacaccttcaagtgcgaggccgtgaacaagcagtccttccagacctcccagcccttccaggtgctgaagaagaagatgaacgagaacctggagatctccgagaactccgacgactgccagatcctgacctgccccgtgtgcttccgggcccagggctgcatctccctggaggccctgaacaagcacgtggacgagtgcctggacggcccctccatctccgagaacttcaagatgttctcctgctcccacgtgtccgccaccaaggtgaacaagaaggagaacgtgcccgcctcctccctgtgcgagaagcaggactacgaggcccaccccaagatcaaggagatctcctccgtggactgcatcgccctggtggacaccatcgacaactcctccaaggccgagtccatcgacgccctgtccaacaagcactccaaggaggagtgctcctccctgccctccaagtccttcaacatcgagcactgccaccagaactcctcctccaccgtgtccctggagaacgaggacgtgggctccttccggcaggagtaccggcagccctacctgtgcgaggtgaagaccggccaggccctggtgtgccccgtgtgcaacgtggagcagaagacctccgacctgaccctgttcaacgtgcacgtggacgtgtgcctgaacaagtccttcatccaggagctgcggaaggacaagttcaaccccgtgaaccagcccaaggagtcctcccggtccaccggctcctcctccggcgtgcagaaggccgtgacccggaccaagcggcccggcctgatgaccaagtactccacctccaagaagatcaagcccaacaaccccaagcacaccctggacatcttcttcaagtccggcggctccaagcggaccgccgacggctccgagttcgagcccaagaagaagcggaaggtg

SEQ ID NO: 1069 - protein, 1063 aa, synthetic construct
  REGION 1..1063: note = Synthetic
MASNFTQFVLVDNGGTGDVTVAPSNFANGVAEWISSNSRSQAYKVTCSVRQSSAQNRKYTIKVEVPKVATQTVGGVELPVAAWRSYLNMELTIPIFATNSDCELIVKAMQGLLKDGNPIPSAIAANSGIYGAPESATESGGTSTESEGSAGTSTESEGSAGSAGSTSGSGSSMDSTKEKCDSYKDDLLLRMGLNDNKAGMEGLDKEKINKIIMEATKGSRFYGNELKKEKQVNQRIENMMQQKAQITSQQLRKAQLQVDRFAMELEQSRNLSNTIVHIDMDAFYAAVEMRDNPELKDKPIAVGSMSMLSTSNYHARRFGVRAAMPGFIAKRLCPQLIIVPPNFDKYRAVSKEVKEILADYDPNFMAMSLDEAYLNITKHLEERQNWPEDKRRYFIKMGSSVENDNPGKEVNKLSEHERSISPLLFEESPSDVQPPGDPFQVNFEEQNNPQILQNSVVFGTSAQEVVKEIRFRIEQKTTLTASAGIAPNTMLAKVCSDKNKPNGQYQILPNRQAVMDFIKDLPIRKVSGIGKVTEKMLKALGIITCTELYQQRALLSLLFSETSWHYFLHISLGLGSTHLTRDRVRKSMSVERTFSEINKAEEQYSLCQELCSELAQDLQKERLKGRTVTIKLKNVNFEVKTRASTVSSVVSTAEEIFAIAKELLKTEIDADFPHPLRLRLMGVRISSFPNEEDRKHQQRSIIGFLQAGNQALSATECTLEKTDKDKFVKPLEMSHKKSFFDKKRSERKWSHQDTFKCEAVNKQSFQTSQPFQVLKKKMNENLEISENSDDCQILTCPVCFRAQGCISLEALNKHVDECLDGPSISENFKMFSCSHVSATKVNKKENVPASSLCEKQDYEAHPKIKEISSVDCIALVDTIDNSSKAESIDALSNKHSKEECSSLPSKSFNIEHCHQNSSSTVSLENEDVGSFRQEYRQPYLCEVKTGQALVCPVCNVEQKTSDLTLFNVHVDVCLNKSFIQELRKDKFNPVNQPKESSRSTGSSSGVQKAVTRTKRPGLMTKYSTSKKIKPNNPKHTLDIFFKSGGSKRTADGSEFEPKKKRKV

SEQ ID NO: 1070 - RNA, 8033 nt, synthetic construct
  misc_feature 1..8033: note = Synthetic
  source 1..8033: mol_type = other RNA
gggaagctcagaataaacgctcaactttggccggatctgccaccatgcccaagaagaagcggaaggtggacaagaagtactccatcggcctggacatcggcaccaactccgtgggctgggccgtgatcaccgacgagtacaaggtgccctccaagaagttcaaggtgctgggcaacaccgaccggcactccatcaagaagaacctgatcggcgccctgctgttcgactccggcgagaccgccgaggccacccggctgaagcggaccgcccggcggcggtacacccggcggaagaaccggatctgctacctgcaggagatcttctccaacgagatggccaaggtggacgactccttcttccaccggctggaggagtccttcctggtggaggaggacaagaagcacgagcggcaccccatcttcggcaacatcgtggacgaggtggcctaccacgagaagtaccccaccatctaccacctgcggaagaagctggtggactccaccgacaaggccgacctgcggctgatctacctggccctggcccacatgatcaagttccggggccacttcctgatcgagggcgacctgaaccccgacaactccgacgtggacaagctgttcatccagctggtgcagacctacaaccagctgttcgaggagaaccccatcaacgcctccggcgtggacgccaaggccatcctgtccgcccggctgtccaagtcccggcggctggagaacctgatcgcccagctgcccggcgagaagaagaacggcctgttcggcaacctgatcgccctgtccctgggcctgacccccaacttcaagtccaacttcgacctggccgaggacgccaagctgcagctgtccaaggacacctacgacgacgacctggacaacctgctggcccagatcggcgaccagtacgccgacctgttcctggccgccaagaacctgtccgacgccatcctgctgtccgacatcctgcgggtgaacaccgagatcaccaaggcccccctgtccgcctccatgatcaagcggtacgacgagcaccaccaggacctgaccctgctgaaggccctggtgcggcagcagctgcccgagaagtacaaggagatcttcttcgaccagtccaagaacggctacgccggctacatcgacggcggcgcctcccaggaggagttctacaagttcatcaagcccatcctggagaagatggacggcaccgaggagctgctggtgaagctgaaccgggaggacctgctgcggaagcagcggaccttcgacaacggctccatcccccaccagatccacctgggcgagctgcacgccatcctgcggcggcaggaggacttctaccccttcctgaaggacaaccgggagaagatcgagaagatcctgaccttccggatcccctactacgtgggccccctggcccggggcaactcccggttcgcctggatgacccggaagtccgaggagaccatcaccccctggaacttcgaggaggtggtggacaagggcgcctccgcccagtccttcatcgagcggatgaccaacttcgacaagaacctgcccaacgagaaggtgctgcccaagcactccctgctgtacgagtacttcaccgtgtacaacgagctgaccaaggtgaagtacgtgaccgagggcatgcggaagcccgccttcctgtccggcgagcagaagaaggccatcgtggacctgctgttcaagaccaaccggaaggtgaccgtgaagcagctgaaggaggactacttcaagaagatcgagtgcttcgactccgtggagatctccggcgtggaggaccggttcaacgcctccctgggcacctaccacgacctgctgaagatcatcaaggacaaggacttcctggacaacgaggagaacgaggacatcctggaggacatcgtgctgaccctgaccctgttcgaggaccgggagatgatcgaggagcggctgaagacctacgcccacctgttcgacgacaaggtgatgaagcagctgaagcggcggcggtacaccggctggggccggctgtcccggaagctgatcaacggcatccgggacaagcagtccggcaagaccatcctggacttcctgaagtccgacggcttcgccaaccggaacttcatgcagctgatccacgacgactccctgaccttcaaggaggacatccagaaggcccaggtgtccggccagggcgactccctgcacgagcacatcgccaacctggccggctcccccgccatcaagaagggcatcctgcagaccgtgaaggtggtggacgagctggtgaaggtgatgggccggcacaagcccgagaacatcgtgatcgagatggcccgggagaaccagaccacccagaagggccagaagaactcccgggagcggatgaagcggatcgaggagggcatcaaggagctgggctcccagatcctgaaggagcaccccgtggagaacacccagctgcagaacgagaagctgtacctgtactacctgcagaacggccgggacatgtacgtggaccaggagctggacatcaaccggctgtccgactacgacgtggacgccatcgtgccccagtccttcctgaaggacgactccatcgacaacaaggtgctgacccggtccgacaagaaccggggcaagtccgacaacgtgccctccgaggaggtggtgaagaagatgaagaactactggcggcagctgctgaacgccaagctgatcacccagcggaagttcgacaacctgaccaaggccgagcggggcggcctgtccgagctggacaaggccggcttcatcaagcggcagctggtggagacccggcagatcaccaagcacgtggcccagatcctggactcccggatgaacaccaagtacgacgagaacgacaagctgatccgggaggtgaaggtgatcaccctgaagtccaagctggtgtccgacttccggaaggacttccagttctacaaggtgcgggagatcaacaactaccaccacgcccacgacgcctacctgaacgccgtggtgggcaccgccctgatcaagaagtaccccaagctggagtccgagttcgtgtacggcgactacaaggtgtacgacgtgcggaagatgatcgccaagtccgagcaggagatcggcaaggccaccgccaagtacttcttctactccaacatcatgaacttcttcaagaccgagatcaccctggccaacggcgagatccggaagcggcccctgatcgagaccaacggcgagaccggcgagatcgtgtgggacaagggccgggacttcgccaccgtgcggaaggtgctgtccatgccccaggtgaacatcgtgaagaagaccgaggtgcagaccggcggcttctccaaggagtccatcctgcccaagcggaactccgacaagctgatcgcccggaagaaggactgggaccccaagaagtacggcggcttcgactcccccaccgtggcctactccgtgctggtggtggccaaggtggagaagggcaagtccaagaagctgaagtccgtgaaggagctgctgggcatcaccatcatggagcggtcctccttcgagaagaaccccatcgacttcctggaggccaagggctacaaggaggtgaagaaggacctgatcatcaagctgcccaagtactccctgttcgagctggagaacggccggaagcggatgctggcctccgccggcgagctgcagaagggcaacgagctggccctgccctccaagtacgtgaacttcctgtacctggcctcccactacgagaagctgaagggctcccccgaggacaacgagcagaagcagctgttcgtggagcagcacaagcactacctggacgagatcatcgagcagatctccgagttctccaagcgggtgatcctggccgacgccaacctggacaaggtgctgtccgcctacaacaagcaccgggacaagcccatccgggagcaggccgagaacatcatccacctgttcaccctgaccaacctgggcgcccccgccgccttcaagtacttcgacaccaccatcgaccggaagcggtacacctccaccaaggaggtgctggacgccaccctgatccaccagtccatcaccggcctgtacgagacccggatcgacctgtcccagctgggcggcgactccggcggctcctccggcggctccaagcggaccgccgacggctccgagttcgagtcccccaagaagaagcggaaggtgtccggcggctcctccggcggctccatggactccaccaaggagaagtgcgactcctacaaggacgacctgctgctgcggatgggcctgaacgacaacaaggccggcatggagggcctggacaaggagaagatcaacaagatcatcatggaggccaccaagggctcccggttctacggcaacgagctgaagaaggagaagcaggtgaaccagcggatcgagaacatgatgcagcagaaggcccagatcacctcccagcagctgcggaaggcccagctgcaggtggaccggttcgccatggagctggagcagtcccggaacctgtccaacaccatcgtgcacatcgacatggacgccttctacgccgccgtggagatgcgggacaaccccgagctgaaggacaagcccatcgccgtgggctccatgtccatgctgtccacctccaactaccacgcccggcggttcggcgtgcgggccgccatgcccggcttcatcgccaagcggctgtgcccccagctgatcatcgtgccccccaacttcgacaagtaccgggccgtgtccaaggaggtgaaggagatcctggccgactacgaccccaacttcatggccatgtccctggacgaggcctacctgaacatcaccaagcacctggaggagcggcagaactggcccgaggacaagcggcggtacttcatcaagatgggctcctccgtggagaacgacaaccccggcaaggaggtgaacaagctgtccgagcacgagcggtccatctcccccctgctgttcgaggagtccccctccgacgtgcagccccccggcgaccccttccaggtgaacttcgaggagcagaacaacccccagatcctgcagaactccgtggtgttcggcacctccgcccaggaggtggtgaaggagatccggttccggatcgagcagaagaccaccctgaccgcctccgccggcatcgcccccaacaccatgctggccaaggtgtgctccgacaagaacaagcccaacggccagtaccagatcctgcccaaccggcaggccgtgatggacttcatcaaggacctgcccatccggaaggtgtccggcatcggcaaggtgaccgagaagatgctgaaggccctgggcatcatcacctgcaccgagctgtaccagcagcgggccctgctgtccctgctgttctccgagacctcctggcactacttcctgcacatctccctgggcctgggctccacccacctgacccgggacggcgagcggaagtccatgtccgtggagcggaccttctccgagatcaacaaggccgaggagcagtactccctgtgccaggagctgtgctccgagctggcccaggacctgcagaaggagcggctgaagggccggaccgtgaccatcaagctgaagaacgtgaacttcgaggtgaagacccgggcctccaccgtgtcctccgtggtgtccaccgccgaggagatcttcgccatcgccaaggagctgctgaagaccgagatcgacgccgacttcccccaccccctgcggctgcggctgatgggcgtgcggatctcctccttccccaacgaggaggaccggaagcaccagcagcggtccatcatcggcttcctgcaggccggcaaccaggccctgtccgccaccgagtgcaccctggagaagaccgacaaggacaagttcgtgaagcccctggagatgtcccacaagaagtccttcttcgacaagaagcggtccgagcggaagtggtcccaccaggacaccttcaagtgcgaggccgtgaacaagcagtccttccagacctcccagcccttccaggtgctgaagaagaagatgaacgagaacctggagatctccgagaactccgacgactgccagatcctgacctgccccgtgtgcttccgggcccagggctgcatctccctggaggccctgaacaagcacgtggacgagtgcctggacggcccctccatctccgagaacttcaagatgttctcctgctcccacgtgtccgccaccaaggtgaacaagaaggagaacgtgcccgcctcctccctgtgcgagaagcaggactacgaggcccaccccaagatcaaggagatctcctccgtggactgcatcgccctggtggacaccatcgacaactcctccaaggccgagtccatcgacgccctgtccaacaagcactccaaggaggagtgctcctccctgccctccaagtccttcaacatcgagcactgccaccagaactcctcctccaccgtgtccctggagaacgaggacgtgggctccttccggcaggagtaccggcagccctacctgtgcgaggtgaagaccggccaggccctggtgtgccccgtgtgcaacgtggagcagaagacctccgacctgaccctgttcaacgtgcacgtggacgtgtgcctgaacaagtccttcatccaggagctgcggaaggacaagttcaaccccgtgaaccagcccaaggagtcctcccggtccaccggctcctcctccggcgtgcagaaggccgtgacccggaccaagcggcccggcctgatgaccaagtactccacctccaagaagatcaagcccaacaaccccaagcacaccctggacatcttcttcaagggcgcccccgagtccgccaccgagtccggcggcacctccaccgagtccgagggctccgccggcacctccaccgagtccgagggctccgccggctccgccggctccacctccggctccggctcctccgcctccaacttcacccagttcgtgctggtggacaacggcggcaccggcgacgtgaccgtggccccctccaacttcgccaacggcgtggccgagtggatctcctccaactcccggtcccaggcctacaaggtgacctgctccgtgcggcagtcctccgcccagaaccggaagtacaccatcaaggtggaggtgcccaaggtggccacccagaccgtgggcggcgtggagctgcccgtggccgcctggcggtcctacctgaacatggagctgaccatccccatcttcgccaccaactccgactgcgagctgatcgtgaaggccatgcagggcctgctgaaggacggcaaccccatcccctccgccatcgccgccaactccggcatctactccggcggctccaagcggaccgccgacggctccgagttcgagcccaagaagaagcggaaggtgtccgagtccgccacccccgagtccgtgtccggctggcggctgttcaagaagatctcctagctagcaccagcctcaagaacacccgaatggagtctctaagctacataataccaacttacactttacaaaatgttgtcccccaaaatgtagccattcgtatctgctcctaataaaaagaaagtttcttcacattctctcgagaaaaaaaaaaaatggaaaaaaaaaaaacggaaaaaaaaaaaaggtaaaaaaaaaaaatataaaaaaaaaaaacataaaaaaaaaaaacgaaaaaaaaaaaacgtaaaaaaaaaaaactcaaaaaaaaaaaagataaaaaaaaaaaacctaaaaaaaaaaaatgtaaaaaaaaaaaagggaaaaaaaaaaaacgcaaaaaaaaaaaacacaaaaaaaaaaaatgcaaaaaaaaaaaatcgaaaaaaaaaaaatctaaaaaaaaaaaacgaaaaaaaaaaaacccaaaaaaaaaaaagacaaaaaaaaaaaatagaaaaaaaaaaaagttaaaaaaaaaaaactgaaaaaaaaaaaatttaaaaaaaaaaaatctag

SEQ ID NO: 1071 - RNA, 7473 nt, synthetic construct
  misc_feature 1..7473: note = Synthetic
  source 1..7473: mol_type = other RNA
atgcccaagaagaagcggaaggtggacaagaagtactccatcggcctggacatcggcaccaactccgtgggctgggccgtgatcaccgacgagtacaaggtgccctccaagaagttcaaggtgctgggcaacaccgaccggcactccatcaagaagaacctgatcggcgccctgctgttcgactccggcgagaccgccgaggccacccggctgaagcggaccgcccggcggcggtacacccggcggaagaaccggatctgctacctgcaggagatcttctccaacgagatggccaaggtggacgactccttcttccaccggctggaggagtccttcctggtggaggaggacaagaagcacgagcggcaccccatcttcggcaacatcgtggacgaggtggcctaccacgagaagtaccccaccatctaccacctgcggaagaagctggtggactccaccgacaaggccgacctgcggctgatctacctggccctggcccacatgatcaagttccggggccacttcctgatcgagggcgacctgaaccccgacaactccgacgtggacaagctgttcatccagctggtgcagacctacaaccagctgttcgaggagaaccccatcaacgcctccggcgtggacgccaaggccatcctgtccgcccggctgtccaagtcccggcggctggagaacctgatcgcccagctgcccggcgagaagaagaacggcctgttcggcaacctgatcgccctgtccctgggcctgacccccaacttcaagtccaacttcgacctggccgaggacgccaagctgcagctgtccaaggacacctacgacgacgacctggacaacctgctggcccagatcggcgaccagtacgccgacctgttcctggccgccaagaacctgtccgacgccatcctgctgtccgacatcctgcgggtgaacaccgagatcaccaaggcccccctgtccgcctccatgatcaagcggtacgacgagcaccaccaggacctgaccctgctgaaggccctggtgcggcagcagctgcccgagaagtacaaggagatcttcttcgaccagtccaagaacggctacgccggctacatcgacggcggcgcctcccaggaggagttctacaagttcatcaagcccatcctggagaagatggacggcaccgaggagctgctggtgaagctgaaccgggaggacctgctgcggaagcagcggaccttcgacaacggctccatcccccaccagatccacctgggcgagctgcacgccatcctgcggcggcaggaggacttctaccccttcctgaaggacaaccgggagaagatcgagaagatcctgaccttccggatcccctactacgtgggccccctggcccggggcaactcccggttcgcctggatgacccggaagtccgaggagaccatcaccccctggaacttcgaggaggtggtggacaagggcgcctccgcccagtccttcatcgagcggatgaccaacttcgacaagaacctgcccaacgagaaggtgctgcccaagcactccctgctgtacgagtacttcaccgtgtacaacgagctgaccaaggtgaagtacgtgaccgagggcatgcggaagcccgccttcctgtccggcgagcagaagaaggccatcgtggacctgctgttcaagaccaaccggaaggtgaccgtgaagcagctgaaggaggactacttcaagaagatcgagtgcttcgactccgtggagatctccggcgtggaggaccggttcaacgcctccctgggcacctaccacgacctgctgaagatcatcaaggacaaggacttcctggacaacgaggagaacgaggacatcctggaggacatcgtgctgaccctgaccctgttcgaggaccgggagatgatcgaggagcggctgaagacctacgcccacctgttcgacgacaaggtgatgaagcagctgaagcggcggcggtacaccggctggggccggctgtcccggaagctgatcaacggcatccgggacaagcagtccggcaagaccatcctggacttcctgaagtccgacggcttcgccaaccggaacttcatgcagctgatccacgacgactccctgaccttcaaggaggacatccagaaggcccaggtgtccggccagggcgactccctgcacgagcacatcgccaacctggccggctcccccgccatcaagaagggcatcctgcagaccgtgaaggtggtggacgagctggtgaaggtgatgggccggcacaagcccgagaacatcgtgatcgagatggcccgggagaaccagaccacccagaagggccagaagaactcccgggagcggatgaagcggatcgaggagggcatcaaggagctgggctcccagatcctgaaggagcaccccgtggagaacacccagctgcagaacgagaagctgtacctgtactacctgcagaacggccgggacatgtacgtggaccaggagctggacatcaaccggctgtccgactacgacgtggacgccatcgtgccccagtccttcctgaaggacgactccatcgacaacaaggtgctgacccggtccgacaagaaccggggcaagtccgacaacgtgccctccgaggaggtggtgaagaagatgaagaactactggcggcagctgctgaacgccaagctgatcacccagcggaagttcgacaacctgaccaaggccgagcggggcggcctgtccgagctggacaaggccggcttcatcaagcggcagctggtggagacccggcagatcaccaagcacgtggcccagatcctggactcccggatgaacaccaagtacgacgagaacgacaagctgatccgggaggtgaaggtgatcaccctgaagtccaagctggtgtccgacttccggaaggacttccagttctacaaggtgcgggagatcaacaactaccaccacgcccacgacgcctacctgaacgccgtggtgggcaccgccctgatcaagaagtaccccaagctggagtccgagttcgtgtacggcgactacaaggtgtacgacgtgcggaagatgatcgccaagtccgagcaggagatcggcaaggccaccgccaagtacttcttctactccaacatcatgaacttcttcaagaccgagatcaccctggccaacggcgagatccggaagcggcccctgatcgagaccaacggcgagaccggcgagatcgtgtgggacaagggccgggacttcgccaccgtgcggaaggtgctgtccatgccccaggtgaacatcgtgaagaagaccgaggtgcagaccggcggcttctccaaggagtccatcctgcccaagcggaactccgacaagctgatcgcccggaagaaggactgggaccccaagaagtacggcggcttcgactcccccaccgtggcctactccgtgctggtggtggccaaggtggagaagggcaagtccaagaagctgaagtccgtgaaggagctgctgggcatcaccatcatggagcggtcctccttcgagaagaaccccatcgacttcctggaggccaagggctacaaggaggtgaagaaggacctgatcatcaagctgcccaagtactccctgttcgagctggagaacggccggaagcggatgctggcctccgccggcgagctgcagaagggcaacgagctggccctgccctccaagtacgtgaacttcctgtacctggcctcccactacgagaagctgaagggctcccccgaggacaacgagcagaagcagctgttcgtggagcagcacaagcactacctggacgagatcatcgagcagatctccgagttctccaagcgggtgatcctggccgacgccaacctggacaaggtgctgtccgcctacaacaagcaccgggacaagcccatccgggagcaggccgagaacatcatccacctgttcaccctgaccaacctgggcgcccccgccgccttcaagtacttcgacaccaccatcgaccggaagcggtacacctccaccaaggaggtgctggacgccaccctgatccaccagtccatcaccggcctgtacgagacccggatcgacctgtcccagctgggcggcgactccggcggctcctccggcggctccaagcggaccgccgacggctccgagttcgagtcccccaagaagaagcggaaggtgtccggcggctcctccggcggctccatggactccaccaaggagaagtgcgactcctacaaggacgacctgctgctgcggatgggcctgaacgacaacaaggccggcatggagggcctggacaaggagaagatcaacaagatcatcatggaggccaccaagggctcccggttctacggcaacgagctgaagaaggagaagcaggtgaaccagcggatcgagaacatgatgcagcagaaggcccagatcacctcccagcagctgcggaaggcccagctgcaggtggaccggttcgccatggagctggagcagtcccggaacctgtccaacaccatcgtgcacatcgacatggacgccttctacgccgccgtggagatgcgggacaaccccgagctgaaggacaagcccatcgccgtgggctccatgtccatgctgtccacctccaactaccacgcccggcggttcggcgtgcgggccgccatgcccggcttcatcgccaagcggctgtgcccccagctgatcatcgtgccccccaacttcgacaagtaccgggccgtgtccaaggaggtgaaggagatcctggccgactacgaccccaacttcatggccatgtccctggacgaggcctacctgaacatcaccaagcacctggaggagcggcagaactggcccgaggacaagcggcggtacttcatcaagatgggctcctccgtggagaacgacaaccccggcaaggaggtgaacaagctgtccgagcacgagcggtccatctcccccctgctgttcgaggagtccccctccgacgtgcagccccccggcgaccccttccaggtgaacttcgaggagcagaacaacccccagatcctgcagaactccgtggtgttcggcacctccgcccaggaggtggtgaaggagatccggttccggatcgagcagaagaccaccctgaccgcctccgccggcatcgcccccaacaccatgctggccaaggtgtgctccgacaagaacaagcccaacggccagtaccagatcctgcccaaccggcaggccgtgatggacttcatcaaggacctgcccatccggaaggtgtccggcatcggcaaggtgaccgagaagatgctgaaggccctgggcatcatcacctgcaccgagctgtaccagcagcgggccctgctgtccctgctgttctccgagacctcctggcactacttcctgcacatctccctgggcctgggctccacccacctgacccgggacggcgagcggaagtccatgtccgtggagcggaccttctccgagatcaacaaggccgaggagcagtactccctgtgccaggagctgtgctccgagctggcccaggacctgcagaaggagcggctgaagggccggaccgtgaccatcaagctgaagaacgtgaacttcgaggtgaagacccgggcctccaccgtgtcctccgtggtgtccaccgccgaggagatcttcgccatcgccaaggagctgctgaagaccgagatcgacgccgacttcccccaccccctgcggctgcggctgatgggcgtgcggatctcctccttccccaacgaggaggaccggaagcaccagcagcggtccatcatcggcttcctgcaggccggcaaccaggccctgtccgccaccgagtgcaccctggagaagaccgacaaggacaagttcgtgaagcccctggagatgtcccacaagaagtccttcttcgacaagaagcggtccgagcggaagtggtcccaccaggacaccttcaagtgcgaggccgtgaacaagcagtccttccagacctcccagcccttccaggtgctgaagaagaagatgaacgagaacctggagatctccgagaactccgacgactgccagatcctgacctgccccgtgtgcttccgggcccagggctgcatctccctggaggccctgaacaagcacgtggacgagtgcctggacggcccctccatctccgagaacttcaagatgttctcctgctcccacgtgtccgccaccaaggtgaacaagaaggagaacgtgcccgcctcctccctgtgcgagaagcaggactacgaggcccaccccaagatcaaggagatctcctccgtggactgcatcgccctggtggacaccatcgacaactcctccaaggccgagtccatcgacgccctgtccaacaagcactccaaggaggagtgctcctccctgccctccaagtccttcaacatcgagcactgccaccagaactcctcctccaccgtgtccctggagaacgaggacgtgggctccttccggcaggagtaccggcagccctacctgtgcgaggtgaagaccggccaggccctggtgtgccccgtgtgcaacgtggagcagaagacctccgacctgaccctgttcaacgtgcacgtggacgtgtgcctgaacaagtccttcatccaggagctgcggaaggacaagttcaaccccgtgaaccagcccaaggagtcctcccggtccaccggctcctcctccggcgtgcagaaggccgtgacccggaccaagcggcccggcctgatgaccaagtactccacctccaagaagatcaagcccaacaaccccaagcacaccctggacatcttcttcaagggcgcccccgagtccgccaccgagtccggcggcacctccaccgagtccgagggctccgccggcacctccaccgagtccgagggctccgccggctccgccggctccacctccggctccggctcctccgcctccaacttcacccagttcgtgctggtggacaacggcggcaccggcgacgtgaccgtggccccctccaacttcgccaacggcgtggccgagtggatctcctccaactcccggtcccaggcctacaaggtgacctgctccgtgcggcagtcctccgcccagaaccggaagtacaccatcaaggtggaggtgcccaaggtggccacccagaccgtgggcggcgtggagctgcccgtggccgcctggcggtcctacctgaacatggagctgaccatccccatcttcgccaccaactccgactgcgagctgatcgtgaaggccatgcagggcctgctgaaggacggcaaccccatcccctccgccatcgccgccaactccggcatctactccggcggctccaagcggaccgccgacggctccgagttcgagcccaagaagaagcggaaggtgtccgagtccgccacccccgagtccgtgtccggctggcggctgttcaagaagatctcctag

SEQ ID NO: 1072 - protein, 2490 aa, synthetic construct
  REGION 1..2490: note = Synthetic
MPKKKRKVDKKYSIGLDIGTNSVGWAVITDEYKVPSKKFKVLGNTDRHSIKKNLIGALLFDSGETAEATRLKRTARRRYTRRKNRICYLQEIFSNEMAKVDDSFFHRLEESFLVEEDKKHERHPIFGNIVDEVAYHEKYPTIYHLRKKLVDSTDKADLRLIYLALAHMIKFRGHFLIEGDLNPDNSDVDKLFIQLVQTYNQLFEENPINASGVDAKAILSARLSKSRRLENLIAQLPGEKKNGLFGNLIALSLGLTPNFKSNFDLAEDAKLQLSKDTYDDDLDNLLAQIGDQYADLFLAAKNLSDAILLSDILRVNTEITKAPLSASMIKRYDEHHQDLTLLKALVRQQLPEKYKEIFFDQSKNGYAGYIDGGASQEEFYKFIKPILEKMDGTEELLVKLNREDLLRKQRTFDNGSIPHQIHLGELHAILRRQEDFYPFLKDNREKIEKILTFRIPYYVGPLARGNSRFAWMTRKSEETITPWNFEEVVDKGASAQSFIERMTNFDKNLPNEKVLPKHSLLYEYFTVYNELTKVKYVTEGMRKPAFLSGEQKKAIVDLLFKTNRKVTVKQLKEDYFKKIECFDSVEISGVEDRFNASLGTYHDLLKIIKDKDFLDNEENEDILEDIVLTLTLFEDREMIEERLKTYAHLFDDKVMKQLKRRRYTGWGRLSRKLINGIRDKQSGKTILDFLKSDGFANRNFMQLIHDDSLTFKEDIQKAQVSGQGDSLHEHIANLAGSPAIKKGILQTVKVVDELVKVMGRHKPENIVIEMARENQTTQKGQKNSRERMKRIEEGIKELGSQILKEHPVENTQLQNEKLYLYYLQNGRDMYVDQELDINRLSDYDVDAIVPQSFLKDDSIDNKVLTRSDKNRGKSDNVPSEEVVKKMKNYWRQLLNAKLITQRKFDNLTKAERGGLSELDKAGFIKRQLVETRQITKHVAQILDSRMNTKYDENDKLIREVKVITLKSKLVSDFRKDFQFYKVREINNYHHAHDAYLNAVVGTALIKKYPKLESEFVYGDYKVYDVRKMIAKSEQEIGKATAKYFFYSNIMNFFKTEITLANGEIRKRPLIETNGETGEIVWDKGRDFATVRKVLSMPQVNIVKKTEVQTGGFSKESILPKRNSDKLIARKKDWDPKKYGGFDSPTVAYSVLVVAKVEKGKSKKLKSVKELLGITIMERSSFEKNPIDFLEAKGYKEVKKDLIIKLPKYSLFELENGRKRMLASAGELQKGNELALPSKYVNFLYLASHYEKLKGSPEDNEQKQLFVEQHKHYLDEIIEQISEFSKRVILADANLDKVLSAYNKHRDKPIREQAENIIHLFTLTNLGAPAAFKYFDTTIDRKRYTSTKEVLDATLIHQSITGLYETRIDLSQLGGDSGGSSGGSKRTADGSEFESPKKKRKVSGGSSGGSMDSTKEKCDSYKDDLLLRMGLNDNKAGMEGLDKEKINKIIMEATKGSRFYGNELKKEKQVNQRIENMMQQKAQITSQQLRKAQLQVDRFAMELEQSRNLSNTIVHIDMDAFYAAVEMRDNPELKDKPIAVGSMSMLSTSNYHARRFGVRAAMPGFIAKRLCPQLIIVPPNFDKYRAVSKEVKEILADYDPNFMAMSLDEAYLNITKHLEERQNWPEDKRRYFIKMGSSVENDNPGKEVNKLSEHERSISPLLFEESPSDVQPPGDPFQVNFEEQNNPQILQNSVVFGTSAQEVVKEIRFRIEQKTTLTASAGIAPNTMLAKVCSDKNKPNGQYQILPNRQAVMDFIKDLPIRKVSGIGKVTEKMLKALGIITCTELYQQRALLSLLFSETSWHYFLHISLGLGSTHLTRDGERKSMSVERTFSEINKAEEQYSLCQELCSELAQDLQKERLKGRTVTIKLKNVNFEVKTRASTVSSVVSTAEEIFAIAKELLKTEIDADFPHPLRLRLMGVRISSFPNEEDRKHQQRSIIGFLQAGNQALSATECTLEKTDKDKFVKPLEMSHKKSFFDKKRSERKWSHQDTFKCEAVNKQSFQTSQPFQVLKKKMNENLEISENSDDCQILTCPVCFRAQGCISLEALNKHVDECLDGPSISENFKMFSCSHVSATKVNKKENVPASSLCEKQDYEAHPKIKEISSVDCIALVDTIDNSSKAESIDALSNKHSKEECSSLPSKSFNIEHCHQNSSSTVSLENEDVGSFRQEYRQPYLCEVKTGQALVCPVCNVEQKTSDLTLFNVHVDVCLNKSFIQELRKDKFNPVNQPKESSRSTGSSSGVQKAVTRTKRPGLMTKYSTSKKIKPNNPKHTLDIFFKGAPESATESGGTSTESEGSAGTSTESEGSAGSAGSTSGSGSSASNFTQFVLVDNGGTGDVTVAPSNFANGVAEWISSNSRSQAYKVTCSVRQSSAQNRKYTIKVEVPKVATQTVGGVELPVAAWRSYLNMELTIPIFATNSDCELIVKAMQGLLKDGNPIPSAIAANSGIYSGGSKRTADGSEFEPKKKRKVSESATPESVSGWRLFKKIS

SEQ ID NO: 1073 - RNA, 7413 nt, synthetic construct
  misc_feature 1..7413: note = Synthetic
  source 1..7413: mol_type = other RNA
atgcccaagaagaagcggaaggtggacaagaagtactccatcggcctggacatcggcaccaactccgtgggctgggccgtgatcaccgacgagtacaaggtgccctccaagaagttcaaggtgctgggcaacaccgaccggcactccatcaagaagaacctgatcggcgccctgctgttcgactccggcgagaccgccgaggccacccggctgaagcggaccgcccggcggcggtacacccggcggaagaaccggatctgctacctgcaggagatcttctccaacgagatggccaaggtggacgactccttcttccaccggctggaggagtccttcctggtggaggaggacaagaagcacgagcggcaccccatcttcggcaacatcgtggacgaggtggcctaccacgagaagtaccccaccatctaccacctgcggaagaagctggtggactccaccgacaaggccgacctgcggctgatctacctggccctggcccacatgatcaagttccggggccacttcctgatcgagggcgacctgaaccccgacaactccgacgtggacaagctgttcatccagctggtgcagacctacaaccagctgttcgaggagaaccccatcaacgcctccggcgtggacgccaaggccatcctgtccgcccggctgtccaagtcccggcggctggagaacctgatcgcccagctgcccggcgagaagaagaacggcctgttcggcaacctgatcgccctgtccctgggcctgacccccaacttcaagtccaacttcgacctggccgaggacgccaagctgcagctgtccaaggacacctacgacgacgacctggacaacctgctggcccagatcggcgaccagtacgccgacctgttcctggccgccaagaacctgtccgacgccatcctgctgtccgacatcctgcgggtgaacaccgagatcaccaaggcccccctgtccgcctccatgatcaagcggtacgacgagcaccaccaggacctgaccctgctgaaggccctggtgcggcagcagctgcccgagaagtacaaggagatcttcttcgaccagtccaagaacggctacgccggctacatcgacggcggcgcctcccaggaggagttctacaagttcatcaagcccatcctggagaagatggacggcaccgaggagctgctggtgaagctgaaccgggaggacctgctgcggaagcagcggaccttcgacaacggctccatcccccaccagatccacctgggcgagctgcacgccatcctgcggcggcaggaggacttctaccccttcctgaaggacaaccgggagaagatcgagaagatcctgaccttccggatcccctactacgtgggccccctggcccggggcaactcccggttcgcctggatgacccggaagtccgaggagaccatcaccccctggaacttcgaggaggtggtggacaagggcgcctccgcccagtccttcatcgagcggatgaccaacttcgacaagaacctgcccaacgagaaggtgctgcccaagcactccctgctgtacgagtacttcaccgtgtacaacgagctgaccaaggtgaagtacgtgaccgagggcatgcggaagcccgccttcctgtccggcgagcagaagaaggccatcgtggacctgctgttcaagaccaaccggaaggtgaccgtgaagcagctgaaggaggactacttcaagaagatcgagtgcttcgactccgtggagatctccggcgtggaggaccggttcaacgcctccctgggcacctaccacgacctgctgaagatcatcaaggacaaggacttcctggacaacgaggagaacgaggacatcctggaggacatcgtgctgaccctgaccctgttcgaggaccgggagatgatcgaggagcggctgaagacctacgcccacctgttcgacgacaaggtgatgaagcagctgaagcggcggcggtacaccggctggggccggctgtcccggaagctgatcaacggcatccgggacaagcagtccggcaagaccatcctggacttcctgaagtccgacggcttcgccaaccggaacttcatgcagctgatccacgacgactccctgaccttcaaggaggacatccagaaggcccaggtgtccggccagggcgactccctgcacgagcacatcgccaacctggccggctcccccgccatcaagaagggcatcctgcagaccgtgaaggtggtggacgagctggtgaaggtgatgggccggcacaagcccgagaacatcgtgatcgagatggcccgggagaaccagaccacccagaagggccagaagaactcccgggagcggatgaagcggatcgaggagggcatcaaggagctgggctcccagatcctgaaggagcaccccgtggagaacacccagctgcagaacgagaagctgtacctgtactacctgcagaacggccgggacatgtacgtggaccaggagctggacatcaaccggctgtccgactacgacgtggacgccatcgtgccccagtccttcctgaaggacgactccatcgacaacaaggtgctgacccggtccgacaagaaccggggcaagtccgacaacgtgccctccgaggaggtggtgaagaagatgaagaactactggcggcagctgctgaacgccaagctgatcacccagcggaagttcgacaacctgaccaaggccgagcggggcggcctgtccgagctggacaaggccggcttcatcaagcggcagctggtggagacccggcagatcaccaagcacgtggcccagatcctggactcccggatgaacaccaagtacgacgagaacgacaagctgatccgggaggtgaaggtgatcaccctgaagtccaagctggtgtccgacttccggaaggacttccagttctacaaggtgcgggagatcaacaactaccaccacgcccacgacgcctacctgaacgccgtggtgggcaccgccctgatcaagaagtaccccaagctggagtccgagttcgtgtacggcgactacaaggtgtacgacgtgcggaagatgatcgccaagtccgagcaggagatcggcaaggccaccgccaagtacttcttctactccaacatcatgaacttcttcaagaccgagatcaccctggccaacggcgagatccggaagcggcccctgatcgagaccaacggcgagaccggcgagatcgtgtgggacaagggccgggacttcgccaccgtgcggaaggtgctgtccatgccccaggtgaacatcgtgaagaagaccgaggtgcagaccggcggcttctccaaggagtccatcctgcccaagcggaactccgacaagctgatcgcccggaagaaggactgggaccccaagaagtacggcggcttcgactcccccaccgtggcctactccgtgctggtggtggccaaggtggagaagggcaagtccaagaagctgaagtccgtgaaggagctgctgggcatcaccatcatggagcggtcctccttcgagaagaaccccatcgacttcctggaggccaagggctacaaggaggtgaagaaggacctgatcatcaagctgcccaagtactccctgttcgagctggagaacggccggaagcggatgctggcctccgccggcgagctgcagaagggcaacgagctggccctgccctccaagtacgtgaacttcctgtacctggcctcccactacgagaagctgaagggctcccccgaggacaacgagcagaagcagctgttcgtggagcagcacaagcactacctggacgagatcatcgagcagatctccgagttctccaagcgggtgatcctggccgacgccaacctggacaaggtgctgtccgcctacaacaagcaccgggacaagcccatccgggagcaggccgagaacatcatccacctgttcaccctgaccaacctgggcgcccccgccgccttcaagtacttcgacaccaccatcgaccggaagcggtacacctccaccaaggaggtgctggacgccaccctgatccaccagtccatcaccggcctgtacgagacccggatcgacctgtcccagctgggcggcgactccggcggctcctccggcggctccaagcggaccgccgacggctccgagttcgagtcccccaagaagaagcggaaggtgtccggcggctcctccggcggctccatggactccaccaaggagaagtgcgactcctacaaggacgacctgctgctgcggatgggcctgaacgacaacaaggccggcatggagggcctggacaaggagaagatcaacaagatcatcatggaggccaccaagggctcccggttctacggcaacgagctgaagaaggagaagcaggtgaaccagcggatcgagaacatgatgcagcagaaggcccagatcacctcccagcagctgcggaaggcccagctgcaggtggaccggttcgccatggagctggagcagtcccggaacctgtccaacaccatcgtgcacatcgacatggacgccttctacgccgccgtggagatgcgggacaaccccgagctgaaggacaagcccatcgccgtgggctccatgtccatgctgtccacctccaactaccacgcccggcggttcggcgtgcgggccgccatgcccggcttcatcgccaagcggctgtgcccccagctgatcatcgtgccccccaacttcgacaagtaccgggccgtgtccaaggaggtgaaggagatcctggccgactacgaccccaacttcatggccatgtccctggacgaggcctacctgaacatcaccaagcacctggaggagcggcagaactggcccgaggacaagcggcggtacttcatcaagatgggctcctccgtggagaacgacaaccccggcaaggaggtgaacaagctgtccgagcacgagcggtccatctcccccctgctgttcgaggagtccccctccgacgtgcagccccccggcgaccccttccaggtgaacttcgaggagcagaacaacccccagatcctgcagaactccgtggtgttcggcacctccgcccaggaggtggtgaaggagatccggttccggatcgagcagaagaccaccctgaccgcctccgccggcatcgcccccaacaccatgctggccaaggtgtgctccgacaagaacaagcccaacggccagtaccagatcctgcccaaccggcaggccgtgatggacttcatcaaggacctgcccatccggaaggtgtccggcatcggcaaggtgaccgagaagatgctgaaggccctgggcatcatcacctgcaccgagctgtaccagcagcgggccctgctgtccctgctgttctccgagacctcctggcactacttcctgcacatctccctgggcctgggctccacccacctgacccgggacggcgagcggaagtccatgtccgtggagcggaccttctccgagatcaacaaggccgaggagcagtactccctgtgccaggagctgtgctccgagctggcccaggacctgcagaaggagcggctgaagggccggaccgtgaccatcaagctgaagaacgtgaacttcgaggtgaagacccgggcctccaccgtgtcctccgtggtgtccaccgccgaggagatcttcgccatcgccaaggagctgctgaagaccgagatcgacgccgacttcccccaccccctgcggctgcggctgatgggcgtgcggatctcctccttccccaacgaggaggaccggaagcaccagcagcggtccatcatcggcttcctgcaggccggcaaccaggccctgtccgccaccgagtgcaccctggagaagaccgacaaggacaagttcgtgaagcccctggagatgtcccacaagaagtccttcttcgacaagaagcggtccgagcggaagtggtcccaccaggacaccttcaagtgcgaggccgtgaacaagcagtccttccagacctcccagcccttccaggtgctgaagaagaagatgaacgagaacctggagatctccgagaactccgacgactgccagatcctgacctgccccgtgtgcttccgggcccagggctgcatctccctggaggccctgaacaagcacgtggacgagtgcctggacggcccctccatctccgagaacttcaagatgttctcctgctcccacgtgtccgccaccaaggtgaacaagaaggagaacgtgcccgcctcctccctgtgcgagaagcaggactacgaggcccaccccaagatcaaggagatctcctccgtggactgcatcgccctggtggacaccatcgacaactcctccaaggccgagtccatcgacgccctgtccaacaagcactccaaggaggagtgctcctccctgccctccaagtccttcaacatcgagcactgccaccagaactcctcctccaccgtgtccctggagaacgaggacgtgggctccttccggcaggagtaccggcagccctacctgtgcgaggtgaagaccggccaggccctggtgtgccccgtgtgcaacgtggagcagaagacctccgacctgaccctgttcaacgtgcacgtggacgtgtgcctgaacaagtccttcatccaggagctgcggaaggacaagttcaaccccgtgaaccagcccaaggagtcctcccggtccaccggctcctcctccggcgtgcagaaggccgtgacccggaccaagcggcccggcctgatgaccaagtactccacctccaagaagatcaagcccaacaaccccaagcacaccctggacatcttcttcaagggcgcccccgagtccgccaccgagtccggcggcacctccaccgagtccgagggctccgccggcacctccaccgagtccgagggctccgccggctccgccggctccacctccggctccggctcctccgcctccaacttcacccagttcgtgctggtggacaacggcggcaccggcgacgtgaccgtggccccctccaacttcgccaacggcgtggccgagtggatctcctccaactcccggtcccaggcctacaaggtgacctgctccgtgcggcagtcctccgcccagaaccggaagtacaccatcaaggtggaggtgcccaaggtggccacccagaccgtgggcggcgtggagctgcccgtggccgcctggcggtcctacctgaacatggagctgaccatccccatcttcgccaccaactccgactgcgagctgatcgtgaaggccatgcagggcctgctgaaggacggcaaccccatcccctccgccatcgccgccaactccggcatctactccggcggctccaagcggaccgccgacggctccgagttcgagcccaagaagaagcggaaggtg

SEQ ID NO: 1074 - protein, 2471 aa, synthetic construct
  REGION 1..2471: note = Synthetic
MPKKKRKVDKKYSIGLDIGTNSVGWAVITDEYKVPSKKFKVLGNTDRHSIKKNLIGALLFDSGETAEATRLKRTARRRYTRRKNRICYLQEIFSNEMAKVDDSFFHRLEESFLVEEDKKHERHPIFGNIVDEVAYHEKYPTIYHLRKKLVDSTDKADLRLIYLALAHMIKFRGHFLIEGDLNPDNSDVDKLFIQLVQTYNQLFEENPINASGVDAKAILSARLSKSRRLENLIAQLPGEKKNGLFGNLIALSLGLTPNFKSNFDLAEDAKLQLSKDTYDDDLDNLLAQIGDQYADLFLAAKNLSDAILLSDILRVNTEITKAPLSASMIKRYDEHHQDLTLLKALVRQQLPEKYKEIFFDQSKNGYAGYIDGGASQEEFYKFIKPILEKMDGTEELLVKLNREDLLRKQRTFDNGSIPHQIHLGELHAILRRQEDFYPFLKDNREKIEKILTFRIPYYVGPLARGNSRFAWMTRKSEETITPWNFEEVVDKGASAQSFIERMTNFDKNLPNEKVLPKHSLLYEYFTVYNELTKVKYVTEGMRKPAFLSGEQKKAIVDLLFKTNRKVTVKQLKEDYFKKIECFDSVEISGVEDRFNASLGTYHDLLKIIKDKDFLDNEENEDILEDIVLTLTLFEDREMIEERLKTYAHLFDDKVMKQLKRRRYTGWGRLSRKLINGIRDKQSGKTILDFLKSDGFANRNFMQLIHDDSLTFKEDIQKAQVSGQGDSLHEHIANLAGSPAIKKGILQTVKVVDELVKVMGRHKPENIVIEMARENQTTQKGQKNSRERMKRIEEGIKELGSQILKEHPVENTQLQNEKLYLYYLQNGRDMYVDQELDINRLSDYDVDAIVPQSFLKDDSIDNKVLTRSDKNRGKSDNVPSEEVVKKMKNYWRQLLNAKLITQRKFDNLTKAERGGLSELDKAGFIKRQLVETRQITKHVAQILDSRMNTKYDENDKLIREVKVITLKSKLVSDFRKDFQFYKVREINNYHHAHDAYLNAVVGTALIKKYPKLESEFVYGDYKVYDVRKMIAKSEQEIGKATAKYFFYSNIMNFFKTEITLANGEIRKRPLIETNGETGEIVWDKGRDFATVRKVLSMPQVNIVKKTEVQTGGFSKESILPKRNSDKLIARKKDWDPKKYGGFDSPTVAYSVLVVAKVEKGKSKKLKSVKELLGITIMERSSFEKNPIDFLEAKGYKEVKKDLIIKLPKYSLFELENGRKRMLASAGELQKGNELALPSKYVNFLYLASHYEKLKGSPEDNEQKQLFVEQHKHYLDEIIEQISEFSKRVILADANLDKVLSAYNKHRDKPIREQAENIIHLFTLTNLGAPAAFKYFDTTIDRKRYTSTKEVLDATLIHQSITGLYETRIDLSQLGGDSGGSSGGSKRTADGSEFESPKKKRKVSGGSSGGSMDSTKEKCDSYKDDLLLRMGLNDNKAGMEGLDKEKINKIIMEATKGSRFYGNELKKEKQVNQRIENMMQQKAQITSQQLRKAQLQVDRFAMELEQSRNLSNTIVHIDMDAFYAAVEMRDNPELKDKPIAVGSMSMLSTSNYHARRFGVRAAMPGFIAKRLCPQLIIVPPNFDKYRAVSKEVKEILADYDPNFMAMSLDEAYLNITKHLEERQNWPEDKRRYFIKMGSSVENDNPGKEVNKLSEHERSISPLLFEESPSDVQPPGDPFQVNFEEQNNPQILQNSVVFGTSAQEVVKEIRFRIEQKTTLTASAGIAPNTMLAKVCSDKNKPNGQYQILPNRQAVMDFIKDLPIRKVSGIGKVTEKMLKALGIITCTELYQQRALLSLLFSETSWHYFLHISLGLGSTHLTRDGERKSMSVERTFSEINKAEEQYSLCQELCSELAQDLQKERLKGRTVTIKLKNVNFEVKTRASTVSSVVSTAEEIFAIAKELLKTEIDADFPHPLRLRLMGVRISSFPNEEDRKHQQRSIIGFLQAGNQALSATECTLEKTDKDKFVKPLEMSHKKSFFDKKRSERKWSHQDTFKCEAVNKQSFQTSQPFQVLKKKMNENLEISENSDDCQILTCPVCFRAQGCISLEALNKHVDECLDGPSISENFKMFSCSHVSATKVNKKENVPASSLCEKQDYEAHPKIKEISSVDCIALVDTIDNSSKAESIDALSNKHSKEECSSLPSKSFNIEHCHQNSSSTVSLENEDVGSFRQEYRQPYLCEVKTGQALVCPVCNVEQKTSDLTLFNVHVDVCLNKSFIQELRKDKFNPVNQPKESSRSTGSSSGVQKAVTRTKRPGLMTKYSTSKKIKPNNPKHTLDIFFKGAPESATESGGTSTESEGSAGTSTESEGSAGSAGSTSGSGSSASNFTQFVLVDNGGTGDVTVAPSNFANGVAEWISSNSRSQAYKVTCSVRQSSAQNRKYTIKVEVPKVATQTVGGVELPVAAWRSYLNMELTIPIFATNSDCELIVKAMQGLLKDGNPIPSAIAANSGIYSGGSKRTADGSEFEPKKKRKV

SEQ ID NO: 1075 - DNA, 7770 bp, synthetic construct
  misc_feature 1..7770: note = Synthetic
  source 1..7770: mol_type = other DNA
atgaacctgctgcggcggtccggcaagcggcggcggtccgagtccggctccgactccttctccggctccggcggcgactcctccgcctccccccagttcctgtccggctccgtgctgtcccccccccccggcctgggccggtgcctgaaggccgccgccgccggcgagtgcaagcccaccgtgcccgactacgagcgggacaagctgctgctggccaactggggcctgcccaaggccgtgctggagaagtaccactccttcggcgtgaagaagatgttcgagtggcaggccgagtgcctgctgctgggccaggtgctggagggcaagaacctggtgtactccgcccccacctccgccggcaagaccctggtggccgagctgctgatcctgaagcgggtgctggagatgcggaagaaggccctgttcatcctgcccttcgtgtccgtggccaaggagaagaagtactacctgcagtccctgttccaggaggtgggcatcaaggtggacggctacatgggctccacctccccctcccggcacttctcctccctggacatcgccgtgtgcaccatcgagcgggccaacggcctgatcaaccggctgatcgaggagaacaagatggacctgctgggcatggtggtggtggacgagctgcacatgctgggcgactcccaccggggctacctgctggagctgctgctgaccaagatctgctacatcacccggaagtccgcctcctgccaggccgacctggcctcctccctgtccaacgccgtgcagatcgtgggcatgtccgccaccctgcccaacctggagctggtggcctcctggctgaacgccgagctgtaccacaccgacttccggcccgtgcccctgctggagtccgtgaaggtgggcaactccatctacgactcctccatgaagctggtgcgggagttcgagcccatgctgcaggtgaagggcgacgaggaccacgtggtgtccctgtgctacgagaccatctgcgacaaccactccgtgctgctgttctgcccctccaagaagtggtgcgagaagctggccgacatcatcgcccgggagttctacaacctgcaccaccaggccgagggcctggtgaagccctccgagtgcccccccgtgatcctggagcagaaggagctgctggaggtgatggaccagctgcggcggctgccctccggcctggactccgtgctgcagaagaccgtgccctggggcgtggccttccaccacgccggcctgaccttcgaggagcgggacatcatcgagggcgccttccggcagggcctgatccgggtgctggccgccacctccaccctgtcctccggcgtgaacctgcccgcccggcgggtgatcatccggacccccatcttcggcggccggcccctggacatcctgacctacaagcagatggtgggccgggccggccggaagggcgtggacaccgtgggcgagtccatcctgatctgcaagaactccgagaagtccaagggcatcgccctgctgcagggctccctgaagcccgtgcggtcctgcctgcagcggcgggagggcgaggaggtgaccggctccatgatccgggccatcctggagatcatcgtgggcggcgtggcctccacctcccaggacatgcacacctacgccgcctgcaccttcctggccgcctccatgaaggagggcaagcagggcatccagcggaaccaggagtccgtgcagctgggcgccatcgaggcctgcgtgatgtggctgctggagaacgagttcatccagtccaccgaggcctccgacggcaccgagggcaaggtgtaccaccccacccacctgggctccgccaccctgtcctcctccctgtcccccgccgacaccctggacatcttcgccgacctgcagcgggccatgaagggcttcgtgctggagaacgacctgcacatcctgtacctggtgacccccatgttcgaggactggaccaccatcgactggtaccggttcttctgcctgtgggagaagctgcccacctccatgaagcgggtggccgagctggtgggcgtggaggagggcttcctggcccggtgcgtgaagggcaaggtggtggcccggaccgagcggcagcaccggcagatggccatccacaagcggttcttcacctccctggtgctgctggacctgatctccgaggtgcccctgcgggagatcaaccagaagtacggctgcaaccggggccagatccagtccctgcagcagtccgccgccgtgtacgccggcatgatcaccgtgttctccaaccggctgggctggcacaacatggagctgctgctgtcccagttccagaagcggctgaccttcggcatccagcgggagctgtgcgacctggtgcgggtgtccctgctgaacgcccagcgggcccgggtgctgtacgcctccggcttccacaccgtggccgacctggcccgggccaacatcgtggaggtggaggtgatcctgaagaacgccgtgcccttcaagtccgcccggaaggccgtggacgaggaggaggaggccgtggaggagcggcggaacatgcggaccatctgggtgaccggccggaagggcctgaccgagcgggaggccgccgccctgatcgtggaggaggcccggatgatcctgcagcaggacctggtggagatgggcgtgcagtggaacccctgcgccctgctgcactcctccacctgctccctgacccactccgagtccgaggtgaaggagcacaccttcatctcccagaccaagtcctcctacaagaagctgacctccaagaacaagtccaacaccatcttctccgactcctacatcaagcactcccccaacatcgtgcaggacctgaacaagtcccgggagcacacctcctccttcaactgcaacttccagaacggcaaccaggagcaccagacctgctccatcttccgggcccggaagcgggcctccctggacatcaacaaggagaagcccggcgcctcccagaacgagggcaagacctccgacaagaaggtggtgcagaccttctcccagaagaccaagaaggcccccctgaacttcaactccgagaagatgtcccggtccttccggtcctggaagcggcggaagcacctgaagcggtcccgggactcctcccccctgaaggactccggcgcctgccggatccacctgcagggccagaccctgtccaacccctccctgtgcgaggaccccttcaccctggacgagaagaagaccgagttccggaactccggccccttcgccaagaacgtgtccctgtccggcaaggagaaggacaacaagacctccttccccctgcagatcaagcagaactgctcctggaacatcaccctgaccaacgacaacttcgtggagcacatcgtgaccggctcccagtccaagaacgtgacctgccaggccacctccgtggtgtccgagaagggccggggcgtggccgtggaggccgagaagatcaacgaggtgctgatccagaacggctccaagaaccagaacgtgtacatgaagcaccacgacatccaccccatcaaccagtacctgcggaagcagtcccacgagcagacctccaccatcaccaagcagaagaacatcatcgagcggcagatgccctgcgaggccgtgtcctcctacatcaaccgggactccaacgtgaccatcaactgcgagcggatcaagctgaacaccgaggagaacaagccctcccacttccaggccctgggcgacgacatctcccggaccgtgatcccctccgaggtgctgccctccgccggcgccttctccaagtccgagggccagcacgagaacttcctgaacatctcccggctgcaggagaagaccggcacctacaccaccaacaagaccaagaacaaccacgtgtccgacctgggcctggtgctgtgcgacttcgaggactccttctacctggacacccagtccgagaagatcatccagcagatggccaccgagaacgccaagctgggcgccaaggacaccaacctggccgccggcatcatgcagaagtccctggtgcagcagaactccatgaactccttccagaaggagtgccacatccccttccccgccgagcagcaccccctgggcgccaccaagatcgaccacctggacctgaagaccgtgggcaccatgaagcagtcctccgactcccacggcgtggacatcctgacccccgagtcccccatcttccactcccccatcctgctggaggagaacggcctgttcctgaagaagaacgaggtgtccgtgaccgactcccagctgaactccttcctgcagggctaccagacccaggagaccgtgaagcccgtgatcctgctgatcccccagaagcggacccccaccggcgtggagggcgagtgcctgcccgtgcccgagacctccctgaacatgtccgactccctgctgttcgactccttctccgacgactacctggtgaaggagcagctgcccgacatgcagatgaaggagcccctgccctccgaggtgacctccaaccacttctccgactccctgtgcctgcaggaggacctgatcaagaagtccaacgtgaacgagaaccaggacacccaccagcagctgacctgctccaacgacgagtccatcatcttctccgagatggactccgtgcagatggtggaggccctggacaacgtggacatcttccccgtgcaggagaagaaccacaccgtggtgtccccccgggccctggagctgtccgaccccgtgctggacgagcaccaccagggcgaccaggacggcggcgaccaggacgagcgggccgagaagtccaagctgaccggcacccggcagaaccactccttcatctggtccggcgcctccttcgacctgtcccccggcctgcagcggatcctggacaaggtgtcctcccccctggagaacgagaagctgaagtccatgaccatcaacttctcctccctgaaccggaagaacaccgagctgaacgaggagcaggaggtgatctccaacctggagaccaagcaggtgcagggcatctccttctcctccaacaacgaggtgaagtccaagatcgagatgctggagaacaacgccaaccacgacgagacctcctccctgctgccccggaaggagtccaacatcgtggacgacaacggcctgatcccccccacccccatccccacctccgcctccaagctgaccttccccggcatcctggagacccccgtgaacccctggaagaccaacaacgtgctgcagcccggcgagtcctacctgttcggctccccctccgacatcaagaaccacgacctgtcccccggctcccggaacggcttcaaggacaactcccccatctccgacacctccttctccctgcagctgtcccaggacggcctgcagctgacccccgcctcctcctcctccgagtccctgtccatcatcgacgtggcctccgaccagaacctgttccagaccttcatcaaggagtggcggtgcaagaagcggttctccatctccctggcctgcgagaagatccggtccctgacctcctccaagaccgccaccatcggctcccggttcaagcaggcctcctccccccaggagatccccatccgggacgacggcttccccatcaagggctgcgacgacaccctggtggtgggcctggccgtgtgctggggcggccgggacgcctactacttctccctgcagaaggagcagaagcactccgagatctccgcctccctggtgcccccctccctggacccctccctgaccctgaaggaccggatgtggtacctgcagtcctgcctgcggaaggagtccgacaaggagtgctccgtggtgatctacgacttcatccagtcctacaagatcctgctgctgtcctgcggcatctccctggagcagtcctacgaggaccccaaggtggcctgctggctgctggaccccgactcccaggagcccaccctgcactccatcgtgacctccttcctgccccacgagctgcccctgctggagggcatggagacctcccagggcatccagtccctgggcctgaacgccggctccgagcactccggccggtaccgggcctccgtggagtccatcctgatcttcaactccatgaaccagctgaactccctgctgcagaaggagaacctgcaggacgtgttccggaaggtggagatgccctcccagtactgcctggccctgctggagctgaacggcatcggcttctccaccgccgagtgcgagtcccagaagcacatcatgcaggccaagctggacgccatcgagacccaggcctaccagctggccggccactccttctccttcacctcctccgacgacatcgccgaggtgctgttcctggagctgaagctgccccccaaccgggagatgaagaaccagggctccaagaagaccctgggctccacccggcggggcatcgacaacggccggaagctgcggctgggccggcagttctccacctccaaggacgtgctgaacaagctgaaggccctgcaccccctgcccggcctgatcctggagtggcggcggatcaccaacgccatcaccaaggtggtgttccccctgcagcgggagaagtgcctgaaccccttcctgggcatggagcggatctaccccgtgtcccagtcccacaccgccaccggccggatcaccttcaccgagcccaacatccagaacgtgccccgggacttcgagatcaagatgcccaccctggtgggcgagtcccccccctcccaggccgtgggcaagggcctgctgcccatgggccggggcaagtacaagaagggcttctccgtgaacccccggtgccaggcccagatggaggagcgggccgccgaccggggcatgcccttctccatctccatgcggcacgccttcgtgcccttccccggcggctccatcctggccgccgactactcccagctggagctgcggatcctggcccacctgtcccacgaccggcggctgatccaggtgctgaacaccggcgccgacgtgttccggtccatcgccgccgagtggaagatgatcgagcccgagtccgtgggcgacgacctgcggcagcaggccaagcagatctgctacggcatcatctacggcatgggcgccaagtccctgggcgagcagatgggcatcaaggagaacgacgccgcctgctacatcgactccttcaagtcccggtacaccggcatcaaccagttcatgaccgagaccgtgaagaactgcaagcgggacggcttcgtgcagaccatcctgggccggcggcggtacctgcccggcatcaaggacaacaacccctaccggaaggcccacgccgagcggcaggccatcaacaccatcgtgcagggctccgccgccgacatcgtgaagatcgccaccgtgaacatccagaagcagctggagaccttccactccaccttcaagtcccacggccaccgggagggcatgctgcagtccgaccagaccggcctgtcccggaagcggaagctgcagggcatgttctgccccatccggggcggcttcttcatcctgcagctgcacgacgagctgctgtacgaggtggccgaggaggacgtggtgcaggtggcccagatcgtgaagaacgagatggagtccgccgtgaagctgtccgtgaagctgaaggtgaaggtgaagatcggcgcctcctggggcgagctgaaggacttcgacgtg

SEQ ID NO: 1076 - protein, 2590 aa, synthetic construct
  REGION 1..2590: note = Synthetic
MNLLRRSGKRRRSESGSDSFSGSGGDSSASPQFLSGSVLSPPPGLGRCLKAAAAGECKPTVPDYERDKLLLANWGLPKAVLEKYHSFGVKKMFEWQAECLLLGQVLEGKNLVYSAPTSAGKTLVAELLILKRVLEMRKKALFILPFVSVAKEKKYYLQSLFQEVGIKVDGYMGSTSPSRHFSSLDIAVCTIERANGLINRLIEENKMDLLGMVVVDELHMLGDSHRGYLLELLLTKICYITRKSASCQADLASSLSNAVQIVGMSATLPNLELVASWLNAELYHTDFRPVPLLESVKVGNSIYDSSMKLVREFEPMLQVKGDEDHVVSLCYETICDNHSVLLFCPSKKWCEKLADIIAREFYNLHHQAEGLVKPSECPPVILEQKELLEVMDQLRRLPSGLDSVLQKTVPWGVAFHHAGLTFEERDIIEGAFRQGLIRVLAATSTLSSGVNLPARRVIIRTPIFGGRPLDILTYKQMVGRAGRKGVDTVGESILICKNSEKSKGIALLQGSLKPVRSCLQRREGEEVTGSMIRAILEIIVGGVASTSQDMHTYAACTFLAASMKEGKQGIQRNQESVQLGAIEACVMWLLENEFIQSTEASDGTEGKVYHPTHLGSATLSSSLSPADTLDIFADLQRAMKGFVLENDLHILYLVTPMFEDWTTIDWYRFFCLWEKLPTSMKRVAELVGVEEGFLARCVKGKVVARTERQHRQMAIHKRFFTSLVLLDLISEVPLREINQKYGCNRGQIQSLQQSAAVYAGMITVFSNRLGWHNMELLLSQFQKRLTFGIQRELCDLVRVSLLNAQRARVLYASGFHTVADLARANIVEVEVILKNAVPFKSARKAVDEEEEAVEERRNMRTIWVTGRKGLTEREAAALIVEEARMILQQDLVEMGVQWNPCALLHSSTCSLTHSESEVKEHTFISQTKSSYKKLTSKNKSNTIFSDSYIKHSPNIVQDLNKSREHTSSFNCNFQNGNQEHQTCSIFRARKRASLDINKEKPGASQNEGKTSDKKVVQTFSQKTKKAPLNFNSEKMSRSFRSWKRRKHLKRSRDSSPLKDSGACRIHLQGQTLSNPSLCEDPFTLDEKKTEFRNSGPFAKNVSLSGKEKDNKTSFPLQIKQNCSWNITLTNDNFVEHIVTGSQSKNVTCQATSVVSEKGRGVAVEAEKINEVLIQNGSKNQNVYMKHHDIHPINQYLRKQSHEQTSTITKQKNIIERQMPCEAVSSYINRDSNVTINCERIKLNTEENKPSHFQALGDDISRTVIPSEVLPSAGAFSKSEGQHENFLNISRLQEKTGTYTTNKTKNNHVSDLGLVLCDFEDSFYLDTQSEKIIQQMATENAKLGAKDTNLAAGIMQKSLVQQNSMNSFQKECHIPFPAEQHPLGATKIDHLDLKTVGTMKQSSDSHGVDILTPESPIFHSPILLEENGLFLKKNEVSVTDSQLNSFLQGYQTQETVKPVILLIPQKRTPTGVEGECLPVPETSLNMSDSLLFDSFSDDYLVKEQLPDMQMKEPLPSEVTSNHFSDSLCLQEDLIKKSNVNENQDTHQQLTCSNDESIIFSEMDSVQMVEALDNVDIFPVQEKNHTVVSPRALELSDPVLDEHHQGDQDGGDQDERAEKSKLTGTRQNHSFIWSGASFDLSPGLQRILDKVSSPLENEKLKSMTINFSSLNRKNTELNEEQEVISNLETKQVQGISFSSNNEVKSKIEMLENNANHDETSSLLPRKESNIVDDNGLIPPTPIPTSASKLTFPGILETPVNPWKTNNVLQPGESYLFGSPSDIKNHDLSPGSRNGFKDNSPISDTSFSLQLSQDGLQLTPASSSSESLSIIDVASDQNLFQTFIKEWRCKKRFSISLACEKIRSLTSSKTATIGSRFKQASSPQEIPIRDDGFPIKGCDDTLVVGLAVCWGGRDAYYFSLQKEQKHSEISASLVPPSLDPSLTLKDRMWYLQSCLRKESDKECSVVIYDFIQSYKILLLSCGISLEQSYEDPKVACWLLDPDSQEPTLHSIVTSFLPHELPLLEGMETSQGIQSLGLNAGSEHSGRYRASVESILIFNSMNQLNSLLQKENLQDVFRKVEMPSQYCLALLELNGIGFSTAECESQKHIMQAKLDAIETQAYQLAGHSFSFTSSDDIAEVLFLELKLPPNREMKNQGSKKTLGSTRRGIDNGRKLRLGRQFSTSKDVLNKLKALHPLPGLILEWRRITNAITKVVFPLQREKCLNPFLGMERIYPVSQSHTATGRITFTEPNIQNVPRDFEIKMPTLVGESPPSQAVGKGLLPMGRGKYKKGFSVNPRCQAQMEERAADRGMPFSISMRHAFVPFPGGSILAADYSQLELRILAHLSHDRRLIQVLNTGADVFRSIAAEWKMIEPESVGDDLRQQAKQICYGIIYGMGAKSLGEQMGIKENDAACYIDSFKSRYTGINQFMTETVKNCKRDGFVQTILGRRRYLPGIKDNNPYRKAHAERQAINTIVQGSAADIVKIATVNIQKQLETFHSTFKSHGHREGMLQSDQTGLSRKRKLQGMFCPIRGGFFILQLHDELLYEVAEEDVVQVAQIVKNEMESAVKLSVKLKVKVKIGASWGELKDFDV

SEQ ID NO: 1077 - RNA, 3008 nt, synthetic construct
  misc_feature 1..3008: note = Synthetic
  source 1..3008: mol_type = other RNA
gggaagctcagaataaacgctcaactttggccggatctgccaccatgtcctcctcctccgagtccctgtccatcatcgacgtggcctccgaccagaacctgttccagaccttcatcaaggagtggcggtgcaagaagcggttctccatctccctggcctgcgagaagatccggtccctgacctcctccaagaccgccaccatcggctcccggttcaagcaggcctcctccccccaggagatccccatccgggacgacggcttccccatcaagggctgcgacgacaccctggtggtgggcctggccgtgtgctggggcggccgggacgcctactacttctccctgcagaaggagcagaagcactccgagatctccgcctccctggtgcccccctccctggacccctccctgaccctgaaggaccggatgtggtacctgcagtcctgcctgcggaaggagtccgacaaggagtgctccgtggtgatctacgacttcatccagtcctacaagatcctgctgctgtcctgcggcatctccctggagcagtcctacgaggaccccaaggtggcctgctggctgctggaccccgactcccaggagcccaccctgcactccatcgtgacctccttcctgccccacgagctgcccctgctggagggcatggagacctcccagggcatccagtccctgggcctgaacgccggctccgagcactccggccggtaccgggcctccgtggagtccatcctgatcttcaactccatgaaccagctgaactccctgctgcagaaggagaacctgcaggacgtgttccggaaggtggagatgccctcccagtactgcctggccctgctggagctgaacggcatcggcttctccaccgccgagtgcgagtcccagaagcacatcatgcaggccaagctggacgccatcgagacccaggcctaccagctggccggccactccttctccttcacctcctccgacgacatcgccgaggtgctgttcctggagctgaagctgccccccaaccgggagatgaagaaccagggctccaagaagaccctgggctccacccggcggggcatcgacaacggccggaagctgcggctgggccggcagttctccacctccaaggacgtgctgaacaagctgaaggccctgcaccccctgcccggcctgatcctggagtggcggcggatcaccaacgccatcaccaaggtggtgttccccctgcagcgggagaagtgcctgaaccccttcctgggcatggagcggatctaccccgtgtcccagtcccacaccgccaccggccggatcaccttcaccgagcccaacatccagaacgtgccccgggacttcgagatcaagatgcccaccctggtgggcgagtcccccccctcccaggccgtgggcaagggcctgctgcccatgggccggggcaagtacaagaagggcttctccgtgaacccccggtgccaggcccagatggaggagcgggccgccgaccggggcatgcccttctccatctccatgcggcacgccttcgtgcccttccccggcggctccatcctggccgccgactactcccagctggagctgcggatcctggcccacctgtcccacgaccggcggctgatccaggtgctgaacaccggcgccgacgtgttccggtccatcgccgccgagtggaagatgatcgagcccgagtccgtgggcgacgacctgcggcagcaggccaagcagatctgctacggcatcatctacggcatgggcgccaagtccctgggcgagcagatgggcatcaaggagaacgacgccgcctgctacatcgactccttcaagtcccggtacaccggcatcaaccagttcatgaccgagaccgtgaagaactgcaagcgggacggcttcgtgcagaccatcctgggccggcggcggtacctgcccggcatcaaggacaacaacccctaccggaaggcccacgccgagcggcaggccatcaacaccatcgtgcagggctccgccgccgacatcgtgaagatcgccaccgtgaacatccagaagcagctggagaccttccactccaccttcaagtcccacggccaccgggagggcatgctgcagtccgaccagaccggcctgtcccggaagcggaagctgcagggcatgttctgccccatccggggcggcttcttcatcctgcagctgcacgacgagctgctgtacgaggtggccgaggaggacgtggtgcaggtggcccagatcgtgaagaacgagatggagtccgccgtgaagctgtccgtgaagctgaaggtgaaggtgaagatcggcgcctcctggggcgagctgaaggacttcgacgtgggcggcggctccggcaagcggaccgccgacggctccggcggcggctcccccaagaagaagcggaaggtgtccgagtccgccacccccgagtccgtgtccggctggcggctgttcaagaagatctcctagctagcaccagcctcaagaacacccgaatggagtctctaagctacataataccaacttacactttacaaaatgttgtcccccaaaatgtagccattcgtatctgctcctaataaaaagaaagtttcttcacattctctcgagaaaaaaaaaaaatggaaaaaaaaaaaacggaaaaaaaaaaaaggtaaaaaaaaaaaatataaaaaaaaaaaacataaaaaaaaaaaacgaaaaaaaaaaaacgtaaaaaaaaaaaactcaaaaaaaaaaaagataaaaaaaaaaaacctaaaaaaaaaaaatgtaaaaaaaaaaaagggaaaaaaaaaaaacgcaaaaaaaaaaaacacaaaaaaaaaaaatgcaaaaaaaaaaaatcgaaaaaaaaaaaatctaaaaaaaaaaaacgaaaaaaaaaaaacccaaaaaaaaaaaagacaaaaaaaaaaaatagaaaaaaaaaaaagttaaaaaaaaaaaactgaaaaaaaaaaaatttaaaaaaaaaaaatctag

SEQ ID NO: 1078 - RNA, 2448 nt, synthetic construct
  misc_feature 1..2448: note = Synthetic
  source 1..2448: mol_type = other RNA
atgtcctcctcctccgagtccctgtccatcatcgacgtggcctccgaccagaacctgttccagaccttcatcaaggagtggcggtgcaagaagcggttctccatctccctggcctgcgagaagatccggtccctgacctcctccaagaccgccaccatcggctcccggttcaagcaggcctcctccccccaggagatccccatccgggacgacggcttccccatcaagggctgcgacgacaccctggtggtgggcctggccgtgtgctggggcggccgggacgcctactacttctccctgcagaaggagcagaagcactccgagatctccgcctccctggtgcccccctccctggacccctccctgaccctgaaggaccggatgtggtacctgcagtcctgcctgcggaaggagtccgacaaggagtgctccgtggtgatctacgacttcatccagtcctacaagatcctgctgctgtcctgcggcatctccctggagcagtcctacgaggaccccaaggtggcctgctggctgctggaccccgactcccaggagcccaccctgcactccatcgtgacctccttcctgccccacgagctgcccctgctggagggcatggagacctcccagggcatccagtccctgggcctgaacgccggctccgagcactccggccggtaccgggcctccgtggagtccatcctgatcttcaactccatgaaccagctgaactccctgctgcagaaggagaacctgcaggacgtgttccggaaggtggagatgccctcccagtactgcctggccctgctggagctgaacggcatcggcttctccaccgccgagtgcgagtcccagaagcacatcatgcaggccaagctggacgccatcgagacccaggcctaccagctggccggccactccttctccttcacctcctccgacgacatcgccgaggtgctgttcctggagctgaagctgccccccaaccgggagatgaagaaccagggctccaagaagaccctgggctccacccggcggggcatcgacaacggccggaagctgcggctgggccggcagttctccacctccaaggacgtgctgaacaagctgaaggccctgcaccccctgcccggcctgatcctggagtggcggcggatcaccaacgccatcaccaaggtggtgttccccctgcagcgggagaagtgcctgaaccccttcctgggcatggagcggatctaccccgtgtcccagtcccacaccgccaccggccggatcaccttcaccgagcccaacatccagaacgtgccccgggacttcgagatcaagatgcccaccctggtgggcgagtcccccccctcccaggccgtgggcaagggcctgctgcccatgggccggggcaagtacaagaagggcttctccgtgaacccccggtgccaggcccagatggaggagcgggccgccgaccggggcatgcccttctccatctccatgcggcacgccttcgtgcccttccccggcggctccatcctggccgccgactactcccagctggagctgcggatcctggcccacctgtcccacgaccggcggctgatccaggtgctgaacaccggcgccgacgtgttccggtccatcgccgccgagtggaagatgatcgagcccgagtccgtgggcgacgacctgcggcagcaggccaagcagatctgctacggcatcatctacggcatgggcgccaagtccctgggcgagcagatgggcatcaaggagaacgacgccgcctgctacatcgactccttcaagtcccggtacaccggcatcaaccagttcatgaccgagaccgtgaagaactgcaagcgggacggcttcgtgcagaccatcctgggccggcggcggtacctgcccggcatcaaggacaacaacccctaccggaaggcccacgccgagcggcaggccatcaacaccatcgtgcagggctccgccgccgacatcgtgaagatcgccaccgtgaacatccagaagcagctggagaccttccactccaccttcaagtcccacggccaccgggagggcatgctgcagtccgaccagaccggcctgtcccggaagcggaagctgcagggcatgttctgccccatccggggcggcttcttcatcctgcagctgcacgacgagctgctgtacgaggtggccgaggaggacgtggtgcaggtggcccagatcgtgaagaacgagatggagtccgccgtgaagctgtccgtgaagctgaaggtgaaggtgaagatcggcgcctcctggggcgagctgaaggacttcgacgtgggcggcggctccggcaagcggaccgccgacggctccggcggcggctcccccaagaagaagcggaaggtgtccgagtccgccacccccgagtccgtgtccggctggcggctgttcaagaagatctcctag

SEQ ID NO: 1079 - protein, 815 aa, synthetic construct
  REGION 1..815: note = Synthetic
MSSSSESLSIIDVASDQNLFQTFIKEWRCKKRFSISLACEKIRSLTSSKTATIGSRFKQASSPQEIPIRDDGFPIKGCDDTLVVGLAVCWGGRDAYYFSLQKEQKHSEISASLVPPSLDPSLTLKDRMWYLQSCLRKESDKECSVVIYDFIQSYKILLLSCGISLEQSYEDPKVACWLLDPDSQEPTLHSIVTSFLPHELPLLEGMETSQGIQSLGLNAGSEHSGRYRASVESILIFNSMNQLNSLLQKENLQDVFRKVEMPSQYCLALLELNGIGFSTAECESQKHIMQAKLDAIETQAYQLAGHSFSFTSSDDIAEVLFLELKLPPNREMKNQGSKKTLGSTRRGIDNGRKLRLGRQFSTSKDVLNKLKALHPLPGLILEWRRITNAITKVVFPLQREKCLNPFLGMERIYPVSQSHTATGRITFTEPNIQNVPRDFEIKMPTLVGESPPSQAVGKGLLPMGRGKYKKGFSVNPRCQAQMEERAADRGMPFSISMRHAFVPFPGGSILAADYSQLELRILAHLSHDRRLIQVLNTGADVFRSIAAEWKMIEPESVGDDLRQQAKQICYGIIYGMGAKSLGEQMGIKENDAACYIDSFKSRYTGINQFMTETVKNCKRDGFVQTILGRRRYLPGIKDNNPYRKAHAERQAINTIVQGSAADIVKIATVNIQKQLETFHSTFKSHGHREGMLQSDQTGLSRKRKLQGMFCPIRGGFFILQLHDELLYEVAEEDVVQVAQIVKNEMESAVKLSVKLKVKVKIGASWGELKDFDVGGGSGKRTADGSGGGSPKKKRKVSESATPESVSGWRLFKKIS

SEQ ID NO: 1080 - RNA, 2388 nt, synthetic construct
  misc_feature 1..2388: note = Synthetic
  source 1..2388: mol_type = other RNA
atgtcctcctcctccgagtccctgtccatcatcgacgtggcctccgaccagaacctgttccagaccttcatcaaggagtggcggtgcaagaagcggttctccatctccctggcctgcgagaagatccggtccctgacctcctccaagaccgccaccatcggctcccggttcaagcaggcctcctccccccaggagatccccatccgggacgacggcttccccatcaagggctgcgacgacaccctggtggtgggcctggccgtgtgctggggcggccgggacgcctactacttctccctgcagaaggagcagaagcactccgagatctccgcctccctggtgcccccctccctggacccctccctgaccctgaaggaccggatgtggtacctgcagtcctgcctgcggaaggagtccgacaaggagtgctccgtggtgatctacgacttcatccagtcctacaagatcctgctgctgtcctgcggcatctccctggagcagtcctacgaggaccccaaggtggcctgctggctgctggaccccgactcccaggagcccaccctgcactccatcgtgacctccttcctgccccacgagctgcccctgctggagggcatggagacctcccagggcatccagtccctgggcctgaacgccggctccgagcactccggccggtaccgggcctccgtggagtccatcctgatcttcaactccatgaaccagctgaactccctgctgcagaaggagaacctgcaggacgtgttccggaaggtggagatgccctcccagtactgcctggccctgctggagctgaacggcatcggcttctccaccgccgagtgcgagtcccagaagcacatcatgcaggccaagctggacgccatcgagacccaggcctaccagctggccggccactccttctccttcacctcctccgacgacatcgccgaggtgctgttcctggagctgaagctgccccccaaccgggagatgaagaaccagggctccaagaagaccctgggctccacccggcggggcatcgacaacggccggaagctgcggctgggccggcagttctccacctccaaggacgtgctgaacaagctgaaggccctgcaccccctgcccggcctgatcctggagtggcggcggatcaccaacgccatcaccaaggtggtgttccccctgcagcgggagaagtgcctgaaccccttcctgggcatggagcggatctaccccgtgtcccagtcccacaccgccaccggccggatcaccttcaccgagcccaacatccagaacgtgccccgggacttcgagatcaagatgcccaccctggtgggcgagtcccccccctcccaggccgtgggcaagggcctgctgcccatgggccggggcaagtacaagaagggcttctccgtgaacccccggtgccaggcccagatggaggagcgggccgccgaccggggcatgcccttctccatctccatgcggcacgccttcgtgcccttccccggcggctccatcctggccgccgactactcccagctggagctgcggatcctggcccacctgtcccacgaccggcggctgatccaggtgctgaacaccggcgccgacgtgttccggtccatcgccgccgagtggaagatgatcgagcccgagtccgtgggcgacgacctgcggcagcaggccaagcagatctgctacggcatcatctacggcatgggcgccaagtccctgggcgagcagatgggcatcaaggagaacgacgccgcctgctacatcgactccttcaagtcccggtacaccggcatcaaccagttcatgaccgagaccgtgaagaactgcaagcgggacggcttcgtgcagaccatcctgggccggcggcggtacctgcccggcatcaaggacaacaacccctaccggaaggcccacgccgagcggcaggccatcaacaccatcgtgcagggctccgccgccgacatcgtgaagatcgccaccgtgaacatccagaagcagctggagaccttccactccaccttcaagtcccacggccaccgggagggcatgctgcagtccgaccagaccggcctgtcccggaagcggaagctgcagggcatgttctgccccatccggggcggcttcttcatcctgcagctgcacgacgagctgctgtacgaggtggccgaggaggacgtggtgcaggtggcccagatcgtgaagaacgagatggagtccgccgtgaagctgtccgtgaagctgaaggtgaaggtgaagatcggcgcctcctggggcgagctgaaggacttcgacgtgggcggcggctccggcaagcggaccgccgacggctccggcggcggctcccccaagaagaagcggaaggtg

SEQ ID NO: 1081 - protein, 796 aa, synthetic construct
  REGION 1..796: note = Synthetic
MSSSSESLSIIDVASDQNLFQTFIKEWRCKKRFSISLACEKIRSLTSSKTATIGSRFKQASSPQEIPIRDDGFPIKGCDDTLVVGLAVCWGGRDAYYFSLQKEQKHSEISASLVPPSLDPSLTLKDRMWYLQSCLRKESDKECSVVIYDFIQSYKILLLSCGISLEQSYEDPKVACWLLDPDSQEPTLHSIVTSFLPHELPLLEGMETSQGIQSLGLNAGSEHSGRYRASVESILIFNSMNQLNSLLQKENLQDVFRKVEMPSQYCLALLELNGIGFSTAECESQKHIMQAKLDAIETQAYQLAGHSFSFTSSDDIAEVLFLELKLPPNREMKNQGSKKTLGSTRRGIDNGRKLRLGRQFSTSKDVLNKLKALHPLPGLILEWRRITNAITKVVFPLQREKCLNPFLGMERIYPVSQSHTATGRITFTEPNIQNVPRDFEIKMPTLVGESPPSQAVGKGLLPMGRGKYKKGFSVNPRCQAQMEERAADRGMPFSISMRHAFVPFPGGSILAADYSQLELRILAHLSHDRRLIQVLNTGADVFRSIAAEWKMIEPESVGDDLRQQAKQICYGIIYGMGAKSLGEQMGIKENDAACYIDSFKSRYTGINQFMTETVKNCKRDGFVQTILGRRRYLPGIKDNNPYRKAHAERQAINTIVQGSAADIVKIATVNIQKQLETFHSTFKSHGHREGMLQSDQTGLSRKRKLQGMFCPIRGGFFILQLHDELLYEVAEEDVVQVAQIVKNEMESAVKLSVKLKVKVKIGASWGELKDFDVGGGSGKRTADGSGGGSPKKKRKV

SEQ ID NO: 1082 - RNA, 7223 nt, synthetic construct
  misc_feature 1..7223: note = Synthetic
  source 1..7223: mol_type = other RNA
gggaagctcagaataaacgctcaactttggccggatctgccaccatggacaagaagtactccatcggcctggacatcggcaccaactccgtgggctgggccgtgatcaccgacgagtacaaggtgccctccaagaagttcaaggtgctgggcaacaccgaccggcactccatcaagaagaacctgatcggcgccctgctgttcgactccggcgagaccgccgaggccacccggctgaagcggaccgcccggcggcggtacacccggcggaagaaccggatctgctacctgcaggagatcttctccaacgagatggccaaggtggacgactccttcttccaccggctggaggagtccttcctggtggaggaggacaagaagcacgagcggcaccccatcttcggcaacatcgtggacgaggtggcctaccacgagaagtaccccaccatctaccacctgcggaagaagctggtggactccaccgacaaggccgacctgcggctgatctacctggccctggcccacatgatcaagttccggggccacttcctgatcgagggcgacctgaaccccgacaactccgacgtggacaagctgttcatccagctggtgcagacctacaaccagctgttcgaggagaaccccatcaacgcctccggcgtggacgccaaggccatcctgtccgcccggctgtccaagtcccggcggctggagaacctgatcgcccagctgcccggcgagaagaagaacggcctgttcggcaacctgatcgccctgtccctgggcctgacccccaacttcaagtccaacttcgacctggccgaggacgccaagctgcagctgtccaaggacacctacgacgacgacctggacaacctgctggcccagatcggcgaccagtacgccgacctgttcctggccgccaagaacctgtccgacgccatcctgctgtccgacatcctgcgggtgaacaccgagatcaccaaggcccccctgtccgcctccatgatcaagcggtacgacgagcaccaccaggacctgaccctgctgaaggccctggtgcggcagcagctgcccgagaagtacaaggagatcttcttcgaccagtccaagaacggctacgccggctacatcgacggcggcgcctcccaggaggagttctacaagttcatcaagcccatcctggagaagatggacggcaccgaggagctgctggtgaagctgaaccgggaggacctgctgcggaagcagcggaccttcgacaacggctccatcccccaccagatccacctgggcgagctgcacgccatcctgcggcggcaggaggacttctaccccttcctgaaggacaaccgggagaagatcgagaagatcctgaccttccggatcccctactacgtgggccccctggcccggggcaactcccggttcgcctggatgacccggaagtccgaggagaccatcaccccctggaacttcgaggaggtggtggacaagggcgcctccgcccagtccttcatcgagcggatgaccaacttcgacaagaacctgcccaacgagaaggtgctgcccaagcactccctgctgtacgagtacttcaccgtgtacaacgagctgaccaaggtgaagtacgtgaccgagggcatgcggaagcccgccttcctgtccggcgagcagaagaaggccatcgtggacctgctgttcaagaccaaccggaaggtgaccgtgaagcagctgaaggaggactacttcaagaagatcgagtgcttcgactccgtggagatctccggcgtggaggaccggttcaacgcctccctgggcacctaccacgacctgctgaagatcatcaaggacaaggacttcctggacaacgaggagaacgaggacatcctggaggacatcgtgctgaccctgaccctgttcgaggaccgggagatgatcgaggagcggctgaagacctacgcccacctgttcgacgacaaggtgatgaagcagctgaagcggcggcggtacaccggctggggccggctgtcccggaagctgatcaacggcatccgggacaagcagtccggcaagaccatcctggacttcctgaagtccgacggcttcgccaaccggaacttcatgcagctgatccacgacgactccctgaccttcaaggaggacatccagaaggcccaggtgtccggccagggcgactccctgcacgagcacatcgccaacctggccggctcccccgccatcaagaagggcatcctgcagaccgtgaaggtggtggacgagctggtgaaggtgatgggccggcacaagcccgagaacatcgtgatcgagatggcccgggagaaccagaccacccagaagggccagaagaactcccgggagcggatgaagcggatcgaggagggcatcaaggagctgggctcccagatcctgaaggagcaccccgtggagaacacccagctgcagaacgagaagctgtacctgtactacctgcagaacggccgggacatgtacgtggaccaggagctggacatcaaccggctgtccgactacgacgtggacgccatcgtgccccagtccttcctgaaggacgactccatcgacaacaaggtgctgacccggtccgacaagaaccggggcaagtccgacaacgtgccctccgaggaggtggtgaagaagatgaagaactactggcggcagctgctgaacgccaagctgatcacccagcggaagttcgacaacctgaccaaggccgagcggggcggcctgtccgagctggacaaggccggcttcatcaagcggcagctggtggagacccggcagatcaccaagcacgtggcccagatcctggactcccggatgaacaccaagtacgacgagaacgacaagctgatccgggaggtgaaggtgatcaccctgaagtccaagctggtgtccgacttccggaaggacttccagttctacaaggtgcgggagatcaacaactaccaccacgcccacgacgcctacctgaacgccgtggtgggcaccgccctgatcaagaagtaccccaagctggagtccgagttcgtgtacggcgactacaaggtgtacgacgtgcggaagatgatcgccaagtccgagcaggagatcggcaaggccaccgccaagtacttcttctactccaacatcatgaacttcttcaagaccgagatcaccctggccaacggcgagatccggaagcggcccctgatcgagaccaacggcgagaccggcgagatcgtgtgggacaagggccgggacttcgccaccgtgcggaaggtgctgtccatgccccaggtgaacatcgtgaagaagaccgaggtgcagaccggcggcttctccaaggagtccatcctgcccaagcggaactccgacaagctgatcgcccggaagaaggactgggaccccaagaagtacggcggcttcgactcccccaccgtggcctactccgtgctggtggtggccaaggtggagaagggcaagtccaagaagctgaagtccgtgaaggagctgctgggcatcaccatcatggagcggtcctccttcgagaagaaccccatcgacttcctggaggccaagggctacaaggaggtgaagaaggacctgatcatcaagctgcccaagtactccctgttcgagctggagaacggccggaagcggatgctggcctccgccggcgagctgcagaagggcaacgagctggccctgccctccaagtacgtgaacttcctgtacctggcctcccactacgagaagctgaagggctcccccgaggacaacgagcagaagcagctgttcgtggagcagcacaagcactacctggacgagatcatcgagcagatctccgagttctccaagcgggtgatcctggccgacgccaacctggacaaggtgctgtccgcctacaacaagcaccgggacaagcccatccgggagcaggccgagaacatcatccacctgttcaccctgaccaacctgggcgcccccgccgccttcaagtacttcgacaccaccatcgaccggaagcggtacacctccaccaaggaggtgctggacgccaccctgatccaccagtccatcaccggcctgtacgagacccggatcgacctgtcccagctgggcggcgacggcgcccccgagtccgccaccgagtccggcggcacctccaccgagtccgagggctccgccggcacctccaccgagtccgagggctccgccggctccgccggctccacctccggctcctcctcctccgagtccctgtccatcatcgacgtggcctccgaccagaacctgttccagaccttcatcaaggagtggcggtgcaagaagcggttctccatctccctggcctgcgagaagatccggtccctgacctcctccaagaccgccaccatcggctcccggttcaagcaggcctcctccccccaggagatccccatccgggacgacggcttccccatcaagggctgcgacgacaccctggtggtgggcctggccgtgtgctggggcggccgggacgcctactacttctccctgcagaaggagcagaagcactccgagatctccgcctccctggtgcccccctccctggacccctccctgaccctgaaggaccggatgtggtacctgcagtcctgcctgcggaaggagtccgacaaggagtgctccgtggtgatctacgacttcatccagtcctacaagatcctgctgctgtcctgcggcatctccctggagcagtcctacgaggaccccaaggtggcctgctggctgctggaccccgactcccaggagcccaccctgcactccatcgtgacctccttcctgccccacgagctgcccctgctggagggcatggagacctcccagggcatccagtccctgggcctgaacgccggctccgagcactccggccggtaccgggcctccgtggagtccatcctgatcttcaactccatgaaccagctgaactccctgctgcagaaggagaacctgcaggacgtgttccggaaggtggagatgccctcccagtactgcctggccctgctggagctgaacggcatcggcttctccaccgccgagtgcgagtcccagaagcacatcatgcaggccaagctggacgccatcgagacccaggcctaccagctggccggccactccttctccttcacctcctccgacgacatcgccgaggtgctgttcctggagctgaagctgccccccaaccgggagatgaagaaccagggctccaagaagaccctgggctccacccggcggggcatcgacaacggccggaagctgcggctgggccggcagttctccacctccaaggacgtgctgaacaagctgaaggccctgcaccccctgcccggcctgatcctggagtggcggcggatcaccaacgccatcaccaaggtggtgttccccctgcagcgggagaagtgcctgaaccccttcctgggcatggagcggatctaccccgtgtcccagtcccacaccgccaccggccggatcaccttcaccgagcccaacatccagaacgtgccccgggacttcgagatcaagatgcccaccctggtgggcgagtcccccccctcccaggccgtgggcaagggcctgctgcccatgggccggggcaagtacaagaagggcttctccgtgaacccccggtgccaggcccagatggaggagcgggccgccgaccggggcatgcccttctccatctccatgcggcacgccttcgtgcccttccccggcggctccatcctggccgccgactactcccagctggagctgcggatcctggcccacctgtcccacgaccggcggctgatccaggtgctgaacaccggcgccgacgtgttccggtccatcgccgccgagtggaagatgatcgagcccgagtccgtgggcgacgacctgcggcagcaggccaagcagatctgctacggcatcatctacggcatgggcgccaagtccctgggcgagcagatgggcatcaaggagaacgacgccgcctgctacatcgactccttcaagtcccggtacaccggcatcaaccagttcatgaccgagaccgtgaagaactgcaagcgggacggcttcgtgcagaccatcctgggccggcggcggtacctgcccggcatcaaggacaacaacccctaccggaaggcccacgccgagcggcaggccatcaacaccatcgtgcagggctccgccgccgacatcgtgaagatcgccaccgtgaacatccagaagcagctggagaccttccactccaccttcaagtcccacggccaccgggagggcatgctgcagtccgaccagaccggcctgtcccggaagcggaagctgcagggcatgttctgccccatccggggcggcttcttcatcctgcagctgcacgacgagctgctgtacgaggtggccgaggaggacgtggtgcaggtggcccagatcgtgaagaacgagatggagtccgccgtgaagctgtccgtgaagctgaaggtgaaggtgaagatcggcgcctcctggggcgagctgaaggacttcgacgtgggcggcggctccggcaagcggaccgccgacggctccggcggcggctcccccaagaagaagcggaaggtgtccgagtccgccacccccgagtccgtgtccggctggcggctgttcaagaagatctcctagctagcaccagcctcaagaacacccgaatggagtctctaagctacataataccaacttacactttacaaaatgttgtcccccaaaatgtagccattcgtatctgctcctaataaaaagaaagtttcttcacattctctcgagaaaaaaaaaaaatggaaaaaaaaaaaacggaaaaaaaaaaaaggtaaaaaaaaaaaatataaaaaaaaaaaacataaaaaaaaaaaacgaaaaaaaaaaaacgtaaaaaaaaaaaactcaaaaaaaaaaaagataaaaaaaaaaaacctaaaaaaaaaaaatgtaaaaaaaaaaaagggaaaaaaaaaaaacgcaaaaaaaaaaaacacaaaaaaaaaaaatgcaaaaaaaaaaaatcgaaaaaaaaaaaatctaaaaaaaaaaaacgaaaaaaaaaaaacccaaaaaaaaaaaagacaaaaaaaaaaaatagaaaaaaaaaaaagttaaaaaaaaaaaactgaaaaaaaaaaaatttaaaaaaaaaaaatctag

SEQ ID NO: 1083 - RNA, 6663 nt, synthetic construct
  misc_feature 1..6663: note = Synthetic
  source 1..6663: mol_type = other RNA
atggacaagaagtactccatcggcctggacatcggcaccaactccgtgggctgggccgtgatcaccgacgagtacaaggtgccctccaagaagttcaaggtgctgggcaacaccgaccggcactccatcaagaagaacctgatcggcgccctgctgttcgactccggcgagaccgccgaggccacccggctgaagcggaccgcccggcggcggtacacccggcggaagaaccggatctgctacctgcaggagatcttctccaacgagatggccaaggtggacgactccttcttccaccggctggaggagtccttcctggtggaggaggacaagaagcacgagcggcaccccatcttcggcaacatcgtggacgaggtggcctaccacgagaagtaccccaccatctaccacctgcggaagaagctggtggactccaccgacaaggccgacctgcggctgatctacctggccctggcccacatgatcaagttccggggccacttcctgatcgagggcgacctgaaccccgacaactccgacgtggacaagctgttcatccagctggtgcagacctacaaccagctgttcgaggagaaccccatcaacgcctccggcgtggacgccaaggccatcctgtccgcccggctgtccaagtcccggcggctggagaacctgatcgcccagctgcccggcgagaagaagaacggcctgttcggcaacctgatcgccctgtccctgggcctgacccccaacttcaagtccaacttcgacctggccgaggacgccaagctgcagctgtccaaggacacctacgacgacgacctggacaacctgctggcccagatcggcgaccagtacgccgacctgttcctggccgccaagaacctgtccgacgccatcctgctgtccgacatcctgcgggtgaacaccgagatcaccaaggcccccctgtccgcctccatgatcaagcggtacgacgagcaccaccaggacctgaccctgctgaaggccctggtgcggcagcagctgcccgagaagtacaaggagatcttcttcgaccagtccaagaacggctacgccggctacatcgacggcggcgcctcccaggaggagttctacaagttcatcaagcccatcctggagaagatggacggcaccgaggagctgctggtgaagctgaaccgggaggacctgctgcggaagcagcggaccttcgacaacggctccatcccccaccagatccacctgggcgagctgcacgccatcctgcggcggcaggaggacttctaccccttcctgaaggacaaccgggagaagatcgagaagatcctgaccttccggatcccctactacgtgggccccctggcccggggcaactcccggttcgcctggatgacccggaagtccgaggagaccatcaccccctggaacttcgaggaggtggtggacaagggcgcctccgcccagtccttcatcgagcggatgaccaacttcgacaagaacctgcccaacgagaaggtgctgcccaagcactccctgctgtacgagtacttcaccgtgtacaacgagctgaccaaggtgaagtacgtgaccgagggcatgcggaagcccgccttcctgtccggcgagcagaagaaggccatcgtggacctgctgttcaagaccaaccggaaggtgaccgtgaagcagctgaaggaggactacttcaagaagatcgagtgcttcgactccgtggagatctccggcgtggaggaccggttcaacgcctccctgggcacctaccacgacctgctgaagatcatcaaggacaaggacttcctggacaacgaggagaacgaggacatcctggaggacatcgtgctgaccctgaccctgttcgaggaccgggagatgatcgaggagcggctgaagacctacgcccacctgttcgacgacaaggtgatgaagcagctgaagcggcggcggtacaccggctggggccggctgtcccggaagctgatcaacggcatccgggacaagcagtccggcaagaccatcctggacttcctgaagtccgacggcttcgccaaccggaacttcatgcagctgatccacgacgactccctgaccttcaaggaggacatccagaaggcccaggtgtccggccagggcgactccctgcacgagcacatcgccaacctggccggctcccccgccatcaagaagggcatcctgcagaccgtgaaggtggtggacgagctggtgaaggtgatgggccggcacaagcccgagaacatcgtgatcgagatggcccgggagaaccagaccacccagaagggccagaagaactcccgggagcggatgaagcggatcgaggagggcatcaaggagctgggctcccagatcctgaaggagcaccccgtggagaacacccagctgcagaacgagaagctgtacctgtactacctgcagaacggccgggacatgtacgtggaccaggagctggacatcaaccggctgtccgactacgacgtggacgccatcgtgccccagtccttcctgaaggacgactccatcgacaacaaggtgctgacccggtccgacaagaaccggggcaagtccgacaacgtgccctccgaggaggtggtgaagaagatgaagaactactggcggcagctgctgaacgccaagctgatcacccagcggaagttcgacaacctgaccaaggccgagcggggcggcctgtccgagctggacaaggccggcttcatcaagcggcagctggtggagacccggcagatcaccaagcacgtggcccagatcctggactcccggatgaacaccaagtacgacgagaacgacaagctgatccgggaggtgaaggtgatcaccctgaagtccaagctggtgtccgacttccggaaggacttccagttctacaaggtgcgggagatcaacaactaccaccacgcccacgacgcctacctgaacgccgtggtgggcaccgccctgatcaagaagtaccccaagctggagtccgagttcgtgtacggcgactacaaggtgtacgacgtgcggaagatgatcgccaagtccgagcaggagatcggcaaggccaccgccaagtacttcttctactccaacatcatgaacttcttcaagaccgagatcaccctggccaacggcgagatccggaagcggcccctgatcgagaccaacggcgagaccggcgagatcgtgtgggacaagggccgggacttcgccaccgtgcggaaggtgctgtccatgccccaggtgaacatcgtgaagaagaccgaggtgcagaccggcggcttctccaaggagtccatcctgcccaagcggaactccgacaagctgatcgcccggaagaaggactgggaccccaagaagtacggcggcttcgactcccccaccgtggcctactccgtgctggtggtggccaaggtggagaagggcaagtccaagaagctgaagtccgtgaaggagctgctgggcatcaccatcatggagcggtcctccttcgagaagaaccccatcgacttcctggaggccaagggctacaaggaggtgaagaaggacctgatcatcaagctgcccaagtactccctgttcgagctggagaacggccggaagcggatgctggcctccgccggcgagctgcagaagggcaacgagctggccctgccctccaagtacgtgaacttcctgtacctggcctcccactacgagaagctgaagggctcccccgaggacaacgagcagaagcagctgttcgtggagcagcacaagcactacctggacgagatcatcgagcagatctccgagttctccaagcgggtgatcctggccgacgccaacctggacaaggtgctgtccgcctacaacaagcaccgggacaagcccatccgggagcaggccgagaacatcatccacctgttcaccctgaccaacctgggcgcccccgccgccttcaagtacttcgacaccaccatcgaccggaagcggtacacctccaccaaggaggtgctggacgccaccctgatccaccagtccatcaccggcctgtacgagacccggatcgacctgtcccagctgggcggcgacggcgcccccgagtccgccaccgagtccggcggcacctccaccgagtccgagggctccgccggcacctccaccgagtccgagggctccgccggctccgccggctccacctccggctcctcctcctccgagtccctgtccatcatcgacgtggcctccgaccagaacctgttccagaccttcatcaaggagtggcggtgcaagaagcggttctccatctccctggcctgcgagaagatccggtccctgacctcctccaagaccgccaccatcggctcccggttcaagcaggcctcctccccccaggagatccccatccgggacgacggcttccccatcaagggctgcgacgacaccctggtggtgggcctggccgtgtgctggggcggccgggacgcctactacttctccctgcagaaggagcagaagcactccgagatctccgcctccctggtgcccccctccctggacccctccctgaccctgaaggaccggatgtggtacctgcagtcctgcctgcggaaggagtccgacaaggagtgctccgtggtgatctacgacttcatccagtcctacaagatcctgctgctgtcctgcggcatctccctggagcagtcctacgaggaccccaaggtggcctgctggctgctggaccccgactcccaggagcccaccctgcactccatcgtgacctccttcctgccccacgagctgcccctgctggagggcatggagacctcccagggcatccagtccctgggcctgaacgccggctccgagcactccggccggtaccgggcctccgtggagtccatcctgatcttcaactccatgaaccagctgaactccctgctgcagaaggagaacctgcaggacgtgttccggaaggtggagatgccctcccagtactgcctggccctgctggagctgaacggcatcggcttctccaccgccgagtgcgagtcccagaagcacatcatgcaggccaagctggacgccatcgagacccaggcctaccagctggccggccactccttctccttcacctcctccgacgacatcgccgaggtgctgttcctggagctgaagctgccccccaaccgggagatgaagaaccagggctccaagaagaccctgggctccacccggcggggcatcgacaacggccggaagctgcggctgggccggcagttctccacctccaaggacgtgctgaacaagctgaaggccctgcaccccctgcccggcctgatcctggagtggcggcggatcaccaacgccatcaccaaggtggtgttccccctgcagcgggagaagtgcctgaaccccttcctgggcatggagcggatctaccccgtgtcccagtcccacaccgccaccggccggatcaccttcaccgagcccaacatccagaacgtgccccgggacttcgagatcaagatgcccaccctggtgggcgagtcccccccctcccaggccgtgggcaagggcctgctgcccatgggccggggcaagtacaagaagggcttctccgtgaacccccggtgccaggcccagatggaggagcgggccgccgaccggggcatgcccttctccatctccatgcggcacgccttcgtgcccttccccggcggctccatcctggccgccgactactcccagctggagctgcggatcctggcccacctgtcccacgaccggcggctgatccaggtgctgaacaccggcgccgacgtgttccggtccatcgccgccgagtggaagatgatcgagcccgagtccgtgggcgacgacctgcggcagcaggccaagcagatctgctacggcatcatctacggcatgggcgccaagtccctgggcgagcagatgggcatcaaggagaacgacgccgcctgctacatcgactccttcaagtcccggtacaccggcatcaaccagttcatgaccgagaccgtgaagaactgcaagcgggacggcttcgtgcagaccatcctgggccggcggcggtacctgcccggcatcaaggacaacaacccctaccggaaggcccacgccgagcggcaggccatcaacaccatcgtgcagggctccgccgccgacatcgtgaagatcgccaccgtgaacatccagaagcagctggagaccttccactccaccttcaagtcccacggccaccgggagggcatgctgcagtccgaccagaccggcctgtcccggaagcggaagctgcagggcatgttctgccccatccggggcggcttcttcatcctgcagctgcacgacgagctgctgtacgaggtggccgaggaggacgtggtgcaggtggcccagatcgtgaagaacgagatggagtccgccgtgaagctgtccgtgaagctgaaggtgaaggtgaagatcggcgcctcctggggcgagctgaaggacttcgacgtgggcggcggctccggcaagcggaccgccgacggctccggcggcggctcccccaagaagaagcggaaggtgtccgagtccgccacccccgagtccgtgtccggctggcggctgttcaagaagatctcctag

SEQ ID NO: 1084 - protein, 2220 aa, synthetic construct
  REGION 1..2220: note = Synthetic
MDKKYSIGLDIGTNSVGWAVITDEYKVPSKKFKVLGNTDRHSIKKNLIGALLFDSGETAEATRLKRTARRRYTRRKNRICYLQEIFSNEMAKVDDSFFHRLEESFLVEEDKKHERHPIFGNIVDEVAYHEKYPTIYHLRKKLVDSTDKADLRLIYLALAHMIKFRGHFLIEGDLNPDNSDVDKLFIQLVQTYNQLFEENPINASGVDAKAILSARLSKSRRLENLIAQLPGEKKNGLFGNLIALSLGLTPNFKSNFDLAEDAKLQLSKDTYDDDLDNLLAQIGDQYADLFLAAKNLSDAILLSDILRVNTEITKAPLSASMIKRYDEHHQDLTLLKALVRQQLPEKYKEIFFDQSKNGYAGYIDGGASQEEFYKFIKPILEKMDGTEELLVKLNREDLLRKQRTFDNGSIPHQIHLGELHAILRRQEDFYPFLKDNREKIEKILTFRIPYYVGPLARGNSRFAWMTRKSEETITPWNFEEVVDKGASAQSFIERMTNFDKNLPNEKVLPKHSLLYEYFTVYNELTKVKYVTEGMRKPAFLSGEQKKAIVDLLFKTNRKVTVKQLKEDYFKKIECFDSVEISGVEDRFNASLGTYHDLLKIIKDKDFLDNEENEDILEDIVLTLTLFEDREMIEERLKTYAHLFDDKVMKQLKRRRYTGWGRLSRKLINGIRDKQSGKTILDFLKSDGFANRNFMQLIHDDSLTFKEDIQKAQVSGQGDSLHEHIANLAGSPAIKKGILQTVKVVDELVKVMGRHKPENIVIEMARENQTTQKGQKNSRERMKRIEEGIKELGSQILKEHPVENTQLQNEKLYLYYLQNGRDMYVDQELDINRLSDYDVDAIVPQSFLKDDSIDNKVLTRSDKNRGKSDNVPSEEVVKKMKNYWRQLLNAKLITQRKFDNLTKAERGGLSELDKAGFIKRQLVETRQITKHVAQILDSRMNTKYDENDKLIREVKVITLKSKLVSDFRKDFQFYKVREINNYHHAHDAYLNAVVGTALIKKYPKLESEFVYGDYKVYDVRKMIAKSEQEIGKATAKYFFYSNIMNFFKTEITLANGEIRKRPLIETNGETGEIVWDKGRDFATVRKVLSMPQVNIVKKTEVQTGGFSKESILPKRNSDKLIARKKDWDPKKYGGFDSPTVAYSVLVVAKVEKGKSKKLKSVKELLGITIMERSSFEKNPIDFLEAKGYKEVKKDLIIKLPKYSLFELENGRKRMLASAGELQKGNELALPSKYVNFLYLASHYEKLKGSPEDNEQKQLFVEQHKHYLDEIIEQISEFSKRVILADANLDKVLSAYNKHRDKPIREQAENIIHLFTLTNLGAPAAFKYFDTTIDRKRYTSTKEVLDATLIHQSITGLYETRIDLSQLGGDGAPESATESGGTSTESEGSAGTSTESEGSAGSAGSTSGSSSSESLSIIDVASDQNLFQTFIKEWRCKKRFSISLACEKIRSLTSSKTATIGSRFKQASSPQEIPIRDDGFPIKGCDDTLVVGLAVCWGGRDAYYFSLQKEQKHSEISASLVPPSLDPSLTLKDRMWYLQSCLRKESDKECSVVIYDFIQSYKILLLSCGISLEQSYEDPKVACWLLDPDSQEPTLHSIVTSFLPHELPLLEGMETSQGIQSLGLNAGSEHSGRYRASVESILIFNSMNQLNSLLQKENLQDVFRKVEMPSQYCLALLELNGIGFSTAECESQKHIMQAKLDAIETQAYQLAGHSFSFTSSDDIAEVLFLELKLPPNREMKNQGSKKTLGSTRRGIDNGRKLRLGRQFSTSKDVLNKLKALHPLPGLILEWRRITNAITKVVFPLQREKCLNPFLGMERIYPVSQSHTATGRITFTEPNIQNVPRDFEIKMPTLVGESPPSQAVGKGLLPMGRGKYKKGFSVNPRCQAQMEERAADRGMPFSISMRHAFVPFPGGSILAADYSQLELRILAHLSHDRRLIQVLNTGADVFRSIAAEWKMIEPESVGDDLRQQAKQICYGIIYGMGAKSLGEQMGIKENDAACYIDSFKSRYTGINQFMTETVKNCKRDGFVQTILGRRRYLPGIKDNNPYRKAHAERQAINTIVQGSAADIVKIATVNIQKQLETFHSTFKSHGHREGMLQSDQTGLSRKRKLQGMFCPIRGGFFILQLHDELLYEVAEEDVVQVAQIVKNEMESAVKLSVKLKVKVKIGASWGELKDFDVGGGSGKRTADGSGGGSPKKKRKVSESATPESVSGWRLFKKIS

SEQ ID NO: 1085 - RNA, 6603 nt, synthetic construct
  misc_feature 1..6603: note = Synthetic
  source 1..6603: mol_type = other RNA
atggacaagaagtactccatcggcctggacatcggcaccaactccgtgggctgggccgtgatcaccgacgagtacaaggtgccctccaagaagttcaaggtgctgggcaacaccgaccggcactccatcaagaagaacctgatcggcgccctgctgttcgactccggcgagaccgccgaggccacccggctgaagcggaccgcccggcggcggtacacccggcggaagaaccggatctgctacctgcaggagatcttctccaacgagatggccaaggtggacgactccttcttccaccggctggaggagtccttcctggtggaggaggacaagaagcacgagcggcaccccatcttcggcaacatcgtggacgaggtggcctaccacgagaagtaccccaccatctaccacctgcggaagaagctggtggactccaccgacaaggccgacctgcggctgatctacctggccctggcccacatgatcaagttccggggccacttcctgatcgagggcgacctgaaccccgacaactccgacgtggacaagctgttcatccagctggtgcagacctacaaccagctgttcgaggagaaccccatcaacgcctccggcgtggacgccaaggccatcctgtccgcccggctgtccaagtcccggcggctggagaacctgatcgcccagctgcccggcgagaagaagaacggcctgttcggcaacctgatcgccctgtccctgggcctgacccccaacttcaagtccaacttcgacctggccgaggacgccaagctgcagctgtccaaggacacctacgacgacgacctggacaacctgctggcccagatcggcgaccagtacgccgacctgttcctggccgccaagaacctgtccgacgccatcctgctgtccgacatcctgcgggtgaacaccgagatcaccaaggcccccctgtccgcctccatgatcaagcggtacgacgagcaccaccaggacctgaccctgctgaaggccctggtgcggcagcagctgcccgagaagtacaaggagatcttcttcgaccagtccaagaacggctacgccggctacatcgacggcggcgcctcccaggaggagttctacaagttcatcaagcccatcctggagaagatggacggcaccgaggagctgctggtgaagctgaaccgggaggacctgctgcggaagcagcggaccttcgacaacggctccatcccccaccagatccacctgggcgagctgcacgccatcctgcggcggcaggaggacttctaccccttcctgaaggacaaccgggagaagatcgagaagatcctgaccttccggatcccctactacgtgggccccctggcccggggcaactcccggttcgcctggatgacccggaagtccgaggagaccatcaccccctggaacttcgaggaggtggtggacaagggcgcctccgcccagtccttcatcgagcggatgaccaacttcgacaagaacctgcccaacgagaaggtgctgcccaagcactccctgctgtacgagtacttcaccgtgtacaacgagctgaccaaggtgaagtacgtgaccgagggcatgcggaagcccgccttcctgtccggcgagcagaagaaggccatcgtggacctgctgttcaagaccaaccggaaggtgaccgtgaagcagctgaaggaggactacttcaagaagatcgagtgcttcgactccgtggagatctccggcgtggaggaccggttcaacgcctccctgggcacctaccacgacctgctgaagatcatcaaggacaaggacttcctggacaacgaggagaacgaggacatcctggaggacatcgtgctgaccctgaccctgttcgaggaccgggagatgatcgaggagcggctgaagacctacgcccacctgttcgacgacaaggtgatgaagcagctgaagcggcggcggtacaccggctggggccggctgtcccggaagctgatcaacggcatccgggacaagcagtccggcaagaccatcctggacttcctgaagtccgacggcttcgccaaccggaacttcatgcagctgatccacgacgactccctgaccttcaaggaggacatccagaaggcccaggtgtccggccagggcgactccctgcacgagcacatcgccaacctggccggctcccccgccatcaagaagggcatcctgcagaccgtgaaggtggtggacgagctggtgaaggtgatgggccggcacaagcccgagaacatcgtgatcgagatggcccgggagaaccagaccacccagaagggccagaagaactcccgggagcggatgaagcggatcgaggagggcatcaaggagctgggctcccagatcctgaaggagcaccccgtggagaacacccagctgcagaacgagaagctgtacctgtactacctgcagaacggccgggacatgtacgtggaccaggagctggacatcaaccggctgtccgactacgacgtggacgccatcgtgccccagtccttcctgaaggacgactccatcgacaacaaggtgctgacccggtccgacaagaaccggggcaagtccgacaacgtgccctccgaggaggtggtgaagaagatgaagaactactggcggcagctgctgaacgccaagctgatcacccagcggaagttcgacaacctgaccaaggccgagcggggcggcctgtccgagctggacaaggccggcttcatcaagcggcagctggtggagacccggcagatcaccaagcacgtggcccagatcctggactcccggatgaacaccaagtacgacgagaacgacaagctgatccgggaggtgaaggtgatcaccctgaagtccaagctggtgtccgacttccggaaggacttccagttctacaaggtgcgggagatcaacaactaccaccacgcccacgacgcctacctgaacgccgtggtgggcaccgccctgatcaagaagtaccccaagctggagtccgagttcgtgtacggcgactacaaggtgtacgacgtgcggaagatgatcgccaagtccgagcaggagatcggcaaggccaccgccaagtacttcttctactccaacatcatgaacttcttcaagaccgagatcaccctggccaacggcgagatccggaagcggcccctgatcgagaccaacggcgagaccggcgagatcgtgtgggacaagggccgggacttcgccaccgtgcggaaggtgctgtccatgccccaggtgaacatcgtgaagaagaccgaggtgcagaccggcggcttctccaaggagtccatcctgcccaagcggaactccgacaagctgatcgcccggaagaaggactgggaccccaagaagtacggcggcttcgactcccccaccgtggcctactccgtgctggtggtggccaaggtggagaagggcaagtccaagaagctgaagtccgtgaaggagctgctgggcatcaccatcatggagcggtcctccttcgagaagaaccccatcgacttcctggaggccaagggctacaaggaggtgaagaaggacctgatcatcaagctgcccaagtactccctgttcgagctggagaacggccggaagcggatgctggcctccgccggcgagctgcagaagggcaacgagctggccctgccctccaagtacgtgaacttcctgtacctggcctcccactacgagaagctgaagggctcccccgaggacaacgagcagaagcagctgttcgtggagcagcacaagcactacctggacgagatcatcgagcagatctccgagttctccaagcgggtgatcctggccgacgccaacctggacaaggtgctgtccgcctacaacaagcaccgggacaagcccatccgggagcaggccgagaacatcatccacctgttcaccctgaccaacctgggcgcccccgccgccttcaagtacttcgacaccaccatcgaccggaagcggtacacctccaccaaggaggtgctggacgccaccctgatccaccagtccatcaccggcctgtacgagacccggatcgacctgtcccagctgggcggcgacggcgcccccgagtccgccaccgagtccggcggcacctccaccgagtccgagggctccgccggcacctccaccgagtccgagggctccgccggctccgccggctccacctccggctcctcctcctccgagtccctgtccatcatcgacgtggcctccgaccagaacctgttccagaccttcatcaaggagtggcggtgcaagaagcggttctccatctccctggcctgcgagaagatccggtccctgacctcctccaagaccgccaccatcggctcccggttcaagcaggcctcctccccccaggagatccccatccgggacgacggcttccccatcaagggctgcgacgacaccctggtggtgggcctggccgtgtgctggggcggccgggacgcctactacttctccctgcagaaggagcagaagcactccgagatctccgcctccctggtgcccccctccctggacccctccctgaccctgaaggaccggatgtggtacctgcagtcctgcctgcggaaggagtccgacaaggagtgctccgtggtgatctacgacttcatccagtcctacaagatcctgctgctgtcctgcggcatctccctggagcagtcctacgaggaccccaaggtggcctgctggctgctggaccccgactcccaggagcccaccctgcactccatcgtgacctccttcctgccccacgagctgcccctgctggagggcatggagacctcccagggcatccagtccctgggcctgaacgccggctccgagcactccggccggtaccgggcctccgtggagtccatcctgatcttcaactccatgaaccagctgaactccctgctgcagaaggagaacctgcaggacgtgttccggaaggtggagatgccctcccagtactgcctggccctgctggagctgaacggcatcggcttctccaccgccgagtgcgagtcccagaagcacatcatgcaggccaagctggacgccatcgagacccaggcctaccagctggccggccactccttctccttcacctcctccgacgacatcgccgaggtgctgttcctggagctgaagctgccccccaaccgggagatgaagaaccagggctccaagaagaccctgggctccacccggcggggcatcgacaacggccggaagctgcggctgggccggcagttctccacctccaaggacgtgctgaacaagctgaaggccctgcaccccctgcccggcctgatcctggagtggcggcggatcaccaacgccatcaccaaggtggtgttccccctgcagcgggagaagtgcctgaaccccttcctgggcatggagcggatctaccccgtgtcccagtcccacaccgccaccggccggatcaccttcaccgagcccaacatccagaacgtgccccgggacttcgagatcaagatgcccaccctggtgggcgagtcccccccctcccaggccgtgggcaagggcctgctgcccatgggccggggcaagtacaagaagggcttctccgtgaacccccggtgccaggcccagatggaggagcgggccgccgaccggggcatgcccttctccatctccatgcggcacgccttcgtgcccttccccggcggctccatcctggccgccgactactcccagctggagctgcggatcctggcccacctgtcccacgaccggcggctgatccaggtgctgaacaccggcgccgacgtgttccggtccatcgccgccgagtggaagatgatcgagcccgagtccgtgggcgacgacctgcggcagcaggccaagcagatctgctacggcatcatctacggcatgggcgccaagtccctgggcgagcagatgggcatcaaggagaacgacgccgcctgctacatcgactccttcaagtcccggtacaccggcatcaaccagttcatgaccgagaccgtgaagaactgcaagcgggacggcttcgtgcagaccatcctgggccggcggcggtacctgcccggcatcaaggacaacaacccctaccggaaggcccacgccgagcggcaggccatcaacaccatcgtgcagggctccgccgccgacatcgtgaagatcgccaccgtgaacatccagaagcagctggagaccttccactccaccttcaagtcccacggccaccgggagggcatgctgcagtccgaccagaccggcctgtcccggaagcggaagctgcagggcatgttctgccccatccggggcggcttcttcatcctgcagctgcacgacgagctgctgtacgaggtggccgaggaggacgtggtgcaggtggcccagatcgtgaagaacgagatggagtccgccgtgaagctgtccgtgaagctgaaggtgaaggtgaagatcggcgcctcctggggcgagctgaaggacttcgacgtgggcggcggctccggcaagcggaccgccgacggctccggcggcggctcccccaagaagaagcggaaggtg

SEQ ID NO: 1086 - protein, 2201 aa, synthetic construct
  REGION 1..2201: note = Synthetic
MDKKYSIGLDIGTNSVGWAVITDEYKVPSKKFKVLGNTDRHSIKKNLIGALLFDSGETAEATRLKRTARRRYTRRKNRICYLQEIFSNEMAKVDDSFFHRLEESFLVEEDKKHERHPIFGNIVDEVAYHEKYPTIYHLRKKLVDSTDKADLRLIYLALAHMIKFRGHFLIEGDLNPDNSDVDKLFIQLVQTYNQLFEENPINASGVDAKAILSARLSKSRRLENLIAQLPGEKKNGLFGNLIALSLGLTPNFKSNFDLAEDAKLQLSKDTYDDDLDNLLAQIGDQYADLFLAAKNLSDAILLSDILRVNTEITKAPLSASMIKRYDEHHQDLTLLKALVRQQLPEKYKEIFFDQSKNGYAGYIDGGASQEEFYKFIKPILEKMDGTEELLVKLNREDLLRKQRTFDNGSIPHQIHLGELHAILRRQEDFYPFLKDNREKIEKILTFRIPYYVGPLARGNSRFAWMTRKSEETITPWNFEEVVDKGASAQSFIERMTNFDKNLPNEKVLPKHSLLYEYFTVYNELTKVKYVTEGMRKPAFLSGEQKKAIVDLLFKTNRKVTVKQLKEDYFKKIECFDSVEISGVEDRFNASLGTYHDLLKIIKDKDFLDNEENEDILEDIVLTLTLFEDREMIEERLKTYAHLFDDKVMKQLKRRRYTGWGRLSRKLINGIRDKQSGKTILDFLKSDGFANRNFMQLIHDDSLTFKEDIQKAQVSGQGDSLHEHIANLAGSPAIKKGILQTVKVVDELVKVMGRHKPENIVIEMARENQTTQKGQKNSRERMKRIEEGIKELGSQILKEHPVENTQLQNEKLYLYYLQNGRDMYVDQELDINRLSDYDVDAIVPQSFLKDDSIDNKVLTRSDKNRGKSDNVPSEEVVKKMKNYWRQLLNAKLITQRKFDNLTKAERGGLSELDKAGFIKRQLVETRQITKHVAQILDSRMNTKYDENDKLIREVKVITLKSKLVSDFRKDFQFYKVREINNYHHAHDAYLNAVVGTALIKKYPKLESEFVYGDYKVYDVRKMIAKSEQEIGKATAKYFFYSNIMNFFKTEITLANGEIRKRPLIETNGETGEIVWDKGRDFATVRKVLSMPQVNIVKKTEVQTGGFSKESILPKRNSDKLIARKKDWDPKKYGGFDSPTVAYSVLVVAKVEKGKSKKLKSVKELLGITIMERSSFEKNPIDFLEAKGYKEVKKDLIIKLPKYSLFELENGRKRMLASAGELQKGNELALPSKYVNFLYLASHYEKLKGSPEDNEQKQLFVEQHKHYLDEIIEQISEFSKRVILADANLDKVLSAYNKHRDKPIREQAENIIHLFTLTNLGAPAAFKYFDTTIDRKRYTSTKEVLDATLIHQSITGLYETRIDLSQLGGDGAPESATESGGTSTESEGSAGTSTESEGSAGSAGSTSGSSSSESLSIIDVASDQNLFQTFIKEWRCKKRFSISLACEKIRSLTSSKTATIGSRFKQASSPQEIPIRDDGFPIKGCDDTLVVGLAVCWGGRDAYYFSLQKEQKHSEISASLVPPSLDPSLTLKDRMWYLQSCLRKESDKECSVVIYDFIQSYKILLLSCGISLEQSYEDPKVACWLLDPDSQEPTLHSIVTSFLPHELPLLEGMETSQGIQSLGLNAGSEHSGRYRASVESILIFNSMNQLNSLLQKENLQDVFRKVEMPSQYCLALLELNGIGFSTAECESQKHIMQAKLDAIETQAYQLAGHSFSFTSSDDIAEVLFLELKLPPNREMKNQGSKKTLGSTRRGIDNGRKLRLGRQFSTSKDVLNKLKALHPLPGLILEWRRITNAITKVVFPLQREKCLNPFLGMERIYPVSQSHTATGRITFTEPNIQNVPRDFEIKMPTLVGESPPSQAVGKGLLPMGRGKYKKGFSVNPRCQAQMEERAADRGMPFSISMRHAFVPFPGGSILAADYSQLELRILAHLSHDRRLIQVLNTGADVFRSIAAEWKMIEPESVGDDLRQQAKQICYGIIYGMGAKSLGEQMGIKENDAACYIDSFKSRYTGINQFMTETVKNCKRDGFVQTILGRRRYLPGIKDNNPYRKAHAERQAINTIVQGSAADIVKIATVNIQKQLETFHSTFKSHGHREGMLQSDQTGLSRKRKLQGMFCPIRGGFFILQLHDELLYEVAEEDVVQVAQIVKNEMESAVKLSVKLKVKVKIGASWGELKDFDVGGGSGKRTADGSGGGSPKKKRKV

SEQ ID NO: 1087 - DNA, 2700 bp, synthetic construct
  misc_feature 1..2700: note = Synthetic
  source 1..2700: mol_type = other DNA
atggagaactacgaggccctggtgggcttcgacctgtgcaacacccccctgtcctccgtggcccagaagatcatgtccgccatgcactccggcgacctggtggactccaagacctggggcaagtccaccgagaccatggaggtgatcaacaagtcctccgtgaagtactccgtgcagctggaggaccggaagacccagtcccccgagaagaaggacctgaagtccctgcggtcccagacctcccggggctccgccaagctgtccccccagtccttctccgtgcggctgaccgaccagctgtccgccgaccagaagcagaagtccatctcctccctgaccctgtcctcctgcctgatcccccagtacaaccaggaggcctccgtgctgcagaagaagggccacaagcggaagcacttcctgatggagaacatcaacaacgagaacaagggctccatcaacctgaagcggaagcacatcacctacaacaacctgtccgagaagacctccaagcagatggccctggaggaggacaccgacgacgccgagggctacctgaactccggcaactccggcgccctgaagaagcacttctgcgacatccggcacctggacgactgggccaagtcccagctgatcgagatgctgaagcaggccgccgccctggtgatcaccgtgatgtacaccgacggctccacccagctgggcgccgaccagacccccgtgtcctccgtgcggggcatcgtggtgctggtgaagcggcaggccgagggcggccacggctgccccgacgcccccgcctgcggccccgtgctggagggcttcgtgtccgacgacccctgcatctacatccagatcgagcactccgccatctgggaccaggagcaggaggcccaccagcagttcgcccggaacgtgctgttccagaccatgaagtgcaagtgccccgtgatctgcttcaacgccaaggacttcgtgcggatcgtgctgcagttcttcggcaacgacggctcctggaagcacgtggccgacttcatcggcctggacccccggatcgccgcctggctgatcgacccctccgacgccaccccctccttcgaggacctggtggagaagtactgcgagaagtccatcaccgtgaaggtgaactccacctacggcaactcctcccggaacatcgtgaaccagaacgtgcgggagaacctgaagaccctgtaccggctgaccatggacctgtgctccaagctgaaggactacggcctgtggcagctgttccggaccctggagctgcccctgatccccatcctggccgtgatggagtcccacgccatccaggtgaacaaggaggagatggagaagacctccgccctgctgggcgcccggctgaaggagctggagcaggaggcccacttcgtggccggcgagcggttcctgatcacctccaacaaccagctgcgggagatcctgttcggcaagctgaagctgcacctgctgtcccagcggaactccctgccccggaccggcctgcagaagtacccctccacctccgaggccgtgctgaacgccctgcgggacctgcaccccctgcccaagatcatcctggagtaccggcaggtgcacaagatcaagtccaccttcgtggacggcctgctggcctgcatgaagaagggctccatctcctccacctggaaccagaccggcaccgtgaccggccggctgtccgccaagcaccccaacatccagggcatctccaagcaccccatccagatcaccacccccaagaacttcaagggcaaggaggacaagatcctgaccatctccccccgggccatgttcgtgtcctccaagggccacaccttcctggccgccgacttctcccagatcgagctgcggatcctgacccacctgtccggcgaccccgagctgctgaagctgttccaggagtccgagcgggacgacgtgttctccaccctgacctcccagtggaaggacgtgcccgtggagcaggtgacccacgccgaccgggagcagaccaagaaggtggtgtacgccgtggtgtacggcgccggcaaggagcggctggccgcctgcctgggcgtgcccatccaggaggccgcccagttcctggagtccttcctgcagaagtacaagaagatcaaggacttcgcccgggccgccatcgcccagtgccaccagaccggctgcgtggtgtccatcatgggccggcggcggcccctgccccggatccacgcccacgaccagcagctgcgggcccaggccgagcggcaggccgtgaacttcgtggtgcagggctccgccgccgacctgtgcaagctggccatgatccacgtgttcaccgccgtggccgcctcccacaccctgaccgcccggctggtggcccagatccacgacgagctgctgttcgaggtggaggacccccagatccccgagtgcgccgccctggtgcggcggaccatggagtccctggagcaggtgcaggccctggagctgcagctgcaggtgcccctgaaggtgtccctgtccgccggccggtcctggggccacctggtgcccctgcaggaggcctggggccccccccccggcccctgccggaccgagtccccctccaactccctggccgcccccggctcccccgcctccacccagcccccccccctgcacttctccccctccttctgcctg

SEQ ID NO: 1088 - protein, 900 aa, synthetic construct
  REGION 1..900: note = Synthetic
MENYEALVGFDLCNTPLSSVAQKIMSAMHSGDLVDSKTWGKSTETMEVINKSSVKYSVQLEDRKTQSPEKKDLKSLRSQTSRGSAKLSPQSFSVRLTDQLSADQKQKSISSLTLSSCLIPQYNQEASVLQKKGHKRKHFLMENINNENKGSINLKRKHITYNNLSEKTSKQMALEEDTDDAEGYLNSGNSGALKKHFCDIRHLDDWAKSQLIEMLKQAAALVITVMYTDGSTQLGADQTPVSSVRGIVVLVKRQAEGGHGCPDAPACGPVLEGFVSDDPCIYIQIEHSAIWDQEQEAHQQFARNVLFQTMKCKCPVICFNAKDFVRIVLQFFGNDGSWKHVADFIGLDPRIAAWLIDPSDATPSFEDLVEKYCEKSITVKVNSTYGNSSRNIVNQNVRENLKTLYRLTMDLCSKLKDYGLWQLFRTLELPLIPILAVMESHAIQVNKEEMEKTSALLGARLKELEQEAHFVAGERFLITSNNQLREILFGKLKLHLLSQRNSLPRTGLQKYPSTSEAVLNALRDLHPLPKIILEYRQVHKIKSTFVDGLLACMKKGSISSTWNQTGTVTGRLSAKHPNIQGISKHPIQITTPKNFKGKEDKILTISPRAMFVSSKGHTFLAADFSQIELRILTHLSGDPELLKLFQESERDDVFSTLTSQWKDVPVEQVTHADREQTKKVVYAVVYGAGKERLAACLGVPIQEAAQFLESFLQKYKKIKDFARAAIAQCHQTGCVVSIMGRRRPLPRIHAHDQQLRAQAERQAVNFVVQGSAADLCKLAMIHVFTAVAASHTLTARLVAQIHDELLFEVEDPQIPECAALVRRTMESLEQVQALELQLQVPLKVSLSAGRSWGHLVPLQEAWGPPPGPCRTESPSNSLAAPGSPASTQPPPLHFSPSFCL

SEQ ID NO: 1089 - RNA, 3319 nt, synthetic construct
  misc_feature 1..3319: note = Synthetic
  source 1..3319: mol_type = other RNA
gggaagctcagaataaacgctcaactttggccggatctgccaccatgaagcggaccgccgacggctccgagttcgagtcccccaagaagaagcggaaggtgatggagaactacgaggccctggtgggcttcgacctgtgcaacacccccctgtcctccgtggcccagaagatcatgtccgccatgcactccggcgacctggtggactccaagacctggggcaagtccaccgagaccatggaggtgatcaacaagtcctccgtgaagtactccgtgcagctggaggaccggaagacccagtcccccgagaagaaggacctgaagtccctgcggtcccagacctcccggggctccgccaagctgtccccccagtccttctccgtgcggctgaccgaccagctgtccgccgaccagaagcagaagtccatctcctccctgaccctgtcctcctgcctgatcccccagtacaaccaggaggcctccgtgctgcagaagaagggccacaagcggaagcacttcctgatggagaacatcaacaacgagaacaagggctccatcaacctgaagcggaagcacatcacctacaacaacctgtccgagaagacctccaagcagatggccctggaggaggacaccgacgacgccgagggctacctgaactccggcaactccggcgccctgaagaagcacttctgcgacatccggcacctggacgactgggccaagtcccagctgatcgagatgctgaagcaggccgccgccctggtgatcaccgtgatgtacaccgacggctccacccagctgggcgccgaccagacccccgtgtcctccgtgcggggcatcgtggtgctggtgaagcggcaggccgagggcggccacggctgccccgacgcccccgcctgcggccccgtgctggagggcttcgtgtccgacgacccctgcatctacatccagatcgagcactccgccatctgggaccaggagcaggaggcccaccagcagttcgcccggaacgtgctgttccagaccatgaagtgcaagtgccccgtgatctgcttcaacgccaaggacttcgtgcggatcgtgctgcagttcttcggcaacgacggctcctggaagcacgtggccgacttcatcggcctggacccccggatcgccgcctggctgatcgacccctccgacgccaccccctccttcgaggacctggtggagaagtactgcgagaagtccatcaccgtgaaggtgaactccacctacggcaactcctcccggaacatcgtgaaccagaacgtgcgggagaacctgaagaccctgtaccggctgaccatggacctgtgctccaagctgaaggactacggcctgtggcagctgttccggaccctggagctgcccctgatccccatcctggccgtgatggagtcccacgccatccaggtgaacaaggaggagatggagaagacctccgccctgctgggcgcccggctgaaggagctggagcaggaggcccacttcgtggccggcgagcggttcctgatcacctccaacaaccagctgcgggagatcctgttcggcaagctgaagctgcacctgctgtcccagcggaactccctgccccggaccggcctgcagaagtacccctccacctccgaggccgtgctgaacgccctgcgggacctgcaccccctgcccaagatcatcctggagtaccggcaggtgcacaagatcaagtccaccttcgtggacggcctgctggcctgcatgaagaagggctccatctcctccacctggaaccagaccggcaccgtgaccggccggctgtccgccaagcaccccaacatccagggcatctccaagcaccccatccagatcaccacccccaagaacttcaagggcaaggaggacaagatcctgaccatctccccccgggccatgttcgtgtcctccaagggccacaccttcctggccgccgacttctcccagatcgagctgcggatcctgacccacctgtccggcgaccccgagctgctgaagctgttccaggagtccgagcgggacgacgtgttctccaccctgacctcccagtggaaggacgtgcccgtggagcaggtgacccacgccgaccgggagcagaccaagaaggtggtgtacgccgtggtgtacggcgccggcaaggagcggctggccgcctgcctgggcgtgcccatccaggaggccgcccagttcctggagtccttcctgcagaagtacaagaagatcaaggacttcgcccgggccgccatcgcccagtgccaccagaccggctgcgtggtgtccatcatgggccggcggcggcccctgccccggatccacgcccacgaccagcagctgcgggcccaggccgagcggcaggccgtgaacttcgtggtgcagggctccgccgccgacctgtgcaagctggccatgatccacgtgttcaccgccgtggccgcctcccacaccctgaccgcccggctggtggcccagatccacgacgagctgctgttcgaggtggaggacccccagatccccgagtgcgccgccctggtgcggcggaccatggagtccctggagcaggtgcaggccctggagctgcagctgcaggtgcccctgaaggtgtccctgtccgccggccggtcctggggccacctggtgcccctgcaggaggcctggggccccccccccggcccctgccggaccgagtccccctccaactccctggccgcccccggctcccccgcctccacccagcccccccccctgcacttctccccctccttctgcctgtagctagcaccagcctcaagaacacccgaatggagtctctaagctacataataccaacttacactttacaaaatgttgtcccccaaaatgtagccattcgtatctgctcctaataaaaagaaagtttcttcacattctctcgagaaaaaaaaaaaatggaaaaaaaaaaaacggaaaaaaaaaaaaggtaaaaaaaaaaaatataaaaaaaaaaaacataaaaaaaaaaaacgaaaaaaaaaaaacgtaaaaaaaaaaaactcaaaaaaaaaaaagataaaaaaaaaaaacctaaaaaaaaaaaatgtaaaaaaaaaaaagggaaaaaaaaaaaacgcaaaaaaaaaaaacacaaaaaaaaaaaatgcaaaaaaaaaaaatcgaaaaaaaaaaaatctaaaaaaaaaaaacgaaaaaaaaaaaacccaaaaaaaaaaaagacaaaaaaaaaaaatagaaaaaaaaaaagttaaaaaaaaaaaactgaaaaaaaaaaaatttaaaaaaaaaaaatctag

SEQ ID NO: 1090 - RNA, 2760 nt, synthetic construct
  misc_feature 1..2760: note = Synthetic
  source 1..2760: mol_type = other RNA
atgaagcggaccgccgacggctccgagttcgagtcccccaagaagaagcggaaggtgatggagaactacgaggccctggtgggcttcgacctgtgcaacacccccctgtcctccgtggcccagaagatcatgtccgccatgcactccggcgacctggtggactccaagacctggggcaagtccaccgagaccatggaggtgatcaacaagtcctccgtgaagtactccgtgcagctggaggaccggaagacccagtcccccgagaagaaggacctgaagtccctgcggtcccagacctcccggggctccgccaagctgtccccccagtccttctccgtgcggctgaccgaccagctgtccgccgaccagaagcagaagtccatctcctccctgaccctgtcctcctgcctgatcccccagtacaaccaggaggcctccgtgctgcagaagaagggccacaagcggaagcacttcctgatggagaacatcaacaacgagaacaagggctccatcaacctgaagcggaagcacatcacctacaacaacctgtccgagaagacctccaagcagatggccctggaggaggacaccgacgacgccgagggctacctgaactccggcaactccggcgccctgaagaagcacttctgcgacatccggcacctggacgactgggccaagtcccagctgatcgagatgctgaagcaggccgccgccctggtgatcaccgtgatgtacaccgacggctccacccagctgggcgccgaccagacccccgtgtcctccgtgcggggcatcgtggtgctggtgaagcggcaggccgagggcggccacggctgccccgacgcccccgcctgcggccccgtgctggagggcttcgtgtccgacgacccctgcatctacatccagatcgagcactccgccatctgggaccaggagcaggaggcccaccagcagttcgcccggaacgtgctgttccagaccatgaagtgcaagtgccccgtgatctgcttcaacgccaaggacttcgtgcggatcgtgctgcagttcttcggcaacgacggctcctggaagcacgtggccgacttcatcggcctggacccccggatcgccgcctggctgatcgacccctccgacgccaccccctccttcgaggacctggtggagaagtactgcgagaagtccatcaccgtgaaggtgaactccacctacggcaactcctcccggaacatcgtgaaccagaacgtgcgggagaacctgaagaccctgtaccggctgaccatggacctgtgctccaagctgaaggactacggcctgtggcagctgttccggaccctggagctgcccctgatccccatcctggccgtgatggagtcccacgccatccaggtgaacaaggaggagatggagaagacctccgccctgctgggcgcccggctgaaggagctggagcaggaggcccacttcgtggccggcgagcggttcctgatcacctccaacaaccagctgcgggagatcctgttcggcaagctgaagctgcacctgctgtcccagcggaactccctgccccggaccggcctgcagaagtacccctccacctccgaggccgtgctgaacgccctgcgggacctgcaccccctgcccaagatcatcctggagtaccggcaggtgcacaagatcaagtccaccttcgtggacggcctgctggcctgcatgaagaagggctccatctcctccacctggaaccagaccggcaccgtgaccggccggctgtccgccaagcaccccaacatccagggcatctccaagcaccccatccagatcaccacccccaagaacttcaagggcaaggaggacaagatcctgaccatctccccccgggccatgttcgtgtcctccaagggccacaccttcctggccgccgacttctcccagatcgagctgcggatcctgacccacctgtccggcgaccccgagctgctgaagctgttccaggagtccgagcgggacgacgtgttctccaccctgacctcccagtggaaggacgtgcccgtggagcaggtgacccacgccgaccgggagcagaccaagaaggtggtgtacgccgtggtgtacggcgccggcaaggagcggctggccgcctgcctgggcgtgcccatccaggaggccgcccagttcctggagtccttcctgcagaagtacaagaagatcaaggacttcgcccgggccgccatcgcccagtgccaccagaccggctgcgtggtgtccatcatgggccggcggcggcccctgccccggatccacgcccacgaccagcagctgcgggcccaggccgagcggcaggccgtgaacttcgtggtgcagggctccgccgccgacctgtgcaagctggccatgatccacgtgttcaccgccgtggccgcctcccacaccctgaccgcccggctggtggcccagatccacgacgagctgctgttcgaggtggaggacccccagatccccgagtgcgccgccctggtgcggcggaccatggagtccctggagcaggtgcaggccctggagctgcagctgcaggtgcccctgaaggtgtccctgtccgccggccggtcctggggccacctggtgcccctgcaggaggcctggggccccccccccggcccctgccggaccgagtccccctccaactccctggccgcccccggctcccccgcctccacccagcccccccccctgcacttctccccctccttctgcctgtag

SEQ ID NO: 1091 - protein, 919 aa, synthetic construct
  REGION 1..919: note = Synthetic
MKRTADGSEFESPKKKRKVMENYEALVGFDLCNTPLSSVAQKIMSAMHSGDLVDSKTWGKSTETMEVINKSSVKYSVQLEDRKTQSPEKKDLKSLRSQTSRGSAKLSPQSFSVRLTDQLSADQKQKSISSLTLSSCLIPQYNQEASVLQKKGHKRKHFLMENINNENKGSINLKRKHITYNNLSEKTSKQMALEEDTDDAEGYLNSGNSGALKKHFCDIRHLDDWAKSQLIEMLKQAAALVITVMYTDGSTQLGADQTPVSSVRGIVVLVKRQAEGGHGCPDAPACGPVLEGFVSDDPCIYIQIEHSAIWDQEQEAHQQFARNVLFQTMKCKCPVICFNAKDFVRIVLQFFGNDGSWKHVADFIGLDPRIAAWLIDPSDATPSFEDLVEKYCEKSITVKVNSTYGNSSRNIVNQNVRENLKTLYRLTMDLCSKLKDYGLWQLFRTLELPLIPILAVMESHAIQVNKEEMEKTSALLGARLKELEQEAHFVAGERFLITSNNQLREILFGKLKLHLLSQRNSLPRTGLQKYPSTSEAVLNALRDLHPLPKIILEYRQVHKIKSTFVDGLLACMKKGSISSTWNQTGTVTGRLSAKHPNIQGISKHPIQITTPKNFKGKEDKILTISPRAMFVSSKGHTFLAADFSQIELRILTHLSGDPELLKLFQESERDDVFSTLTSQWKDVPVEQVTHADREQTKKVVYAVVYGAGKERLAACLGVPIQEAAQFLESFLQKYKKIKDFARAAIAQCHQTGCVVSIMGRRRPLPRIHAHDQQLRAQAERQAVNFVVQGSAADLCKLAMIHVFTAVAASHTLTARLVAQIHDELLFEVEDPQIPECAALVRRTMESLEQVQALELQLQVPLKVSLSAGRSWGHLVPLQEAWGPPPGPCRTESPSNSLAAPGSPASTQPPPLHFSPSFCL

SEQ ID NO: 1092 - RNA, 7531 nt, synthetic construct
  misc_feature 1..7531: note = Synthetic
  source 1..7531: mol_type = other RNA
gggaagctcagaataaacgctcaactttggccggatctgccaccatggagaactacgaggccctggtgggcttcgacctgtgcaacacccccctgtcctccgtggcccagaagatcatgtccgccatgcactccggcgacctggtggactccaagacctggggcaagtccaccgagaccatggaggtgatcaacaagtcctccgtgaagtactccgtgcagctggaggaccggaagacccagtcccccgagaagaaggacctgaagtccctgcggtcccagacctcccggggctccgccaagctgtccccccagtccttctccgtgcggctgaccgaccagctgtccgccgaccagaagcagaagtccatctcctccctgaccctgtcctcctgcctgatcccccagtacaaccaggaggcctccgtgctgcagaagaagggccacaagcggaagcacttcctgatggagaacatcaacaacgagaacaagggctccatcaacctgaagcggaagcacatcacctacaacaacctgtccgagaagacctccaagcagatggccctggaggaggacaccgacgacgccgagggctacctgaactccggcaactccggcgccctgaagaagcacttctgcgacatccggcacctggacgactgggccaagtcccagctgatcgagatgctgaagcaggccgccgccctggtgatcaccgtgatgtacaccgacggctccacccagctgggcgccgaccagacccccgtgtcctccgtgcggggcatcgtggtgctggtgaagcggcaggccgagggcggccacggctgccccgacgcccccgcctgcggccccgtgctggagggcttcgtgtccgacgacccctgcatctacatccagatcgagcactccgccatctgggaccaggagcaggaggcccaccagcagttcgcccggaacgtgctgttccagaccatgaagtgcaagtgccccgtgatctgcttcaacgccaaggacttcgtgcggatcgtgctgcagttcttcggcaacgacggctcctggaagcacgtggccgacttcatcggcctggacccccggatcgccgcctggctgatcgacccctccgacgccaccccctccttcgaggacctggtggagaagtactgcgagaagtccatcaccgtgaaggtgaactccacctacggcaactcctcccggaacatcgtgaaccagaacgtgcgggagaacctgaagaccctgtaccggctgaccatggacctgtgctccaagctgaaggactacggcctgtggcagctgttccggaccctggagctgcccctgatccccatcctggccgtgatggagtcccacgccatccaggtgaacaaggaggagatggagaagacctccgccctgctgggcgcccggctgaaggagctggagcaggaggcccacttcgtggccggcgagcggttcctgatcacctccaacaaccagctgcgggagatcctgttcggcaagctgaagctgcacctgctgtcccagcggaactccctgccccggaccggcctgcagaagtacccctccacctccgaggccgtgctgaacgccctgcgggacctgcaccccctgcccaagatcatcctggagtaccggcaggtgcacaagatcaagtccaccttcgtggacggcctgctggcctgcatgaagaagggctccatctcctccacctggaaccagaccggcaccgtgaccggccggctgtccgccaagcaccccaacatccagggcatctccaagcaccccatccagatcaccacccccaagaacttcaagggcaaggaggacaagatcctgaccatctccccccgggccatgttcgtgtcctccaagggccacaccttcctggccgccgacttctcccagatcgagctgcggatcctgacccacctgtccggcgaccccgagctgctgaagctgttccaggagtccgagcgggacgacgtgttctccaccctgacctcccagtggaaggacgtgcccgtggagcaggtgacccacgccgaccgggagcagaccaagaaggtggtgtacgccgtggtgtacggcgccggcaaggagcggctggccgcctgcctgggcgtgcccatccaggaggccgcccagttcctggagtccttcctgcagaagtacaagaagatcaaggacttcgcccgggccgccatcgcccagtgccaccagaccggctgcgtggtgtccatcatgggccggcggcggcccctgccccggatccacgcccacgaccagcagctgcgggcccaggccgagcggcaggccgtgaacttcgtggtgcagggctccgccgccgacctgtgcaagctggccatgatccacgtgttcaccgccgtggccgcctcccacaccctgaccgcccggctggtggcccagatccacgacgagctgctgttcgaggtggaggacccccagatccccgagtgcgccgccctggtgcggcggaccatggagtccctggagcaggtgcaggccctggagctgcagctgcaggtgcccctgaaggtgtccctgtccgccggccggtcctggggccacctggtgcccctgcaggaggcctggggccccccccccggcccctgccggaccgagtccccctccaactccctggccgcccccggctcccccgcctccacccagcccccccccctgcacttctccccctccttctgcctgtccggcggctcctccggcggctccaagcggaccgccgacggctccgagttcgagtcccccaagaagaagcggaaggtgtccggcggctcctccggcggctccgacaagaagtactccatcggcctggacatcggcaccaactccgtgggctgggccgtgatcaccgacgagtacaaggtgccctccaagaagttcaaggtgctgggcaacaccgaccggcactccatcaagaagaacctgatcggcgccctgctgttcgactccggcgagaccgccgaggccacccggctgaagcggaccgcccggcggcggtacacccggcggaagaaccggatctgctacctgcaggagatcttctccaacgagatggccaaggtggacgactccttcttccaccggctggaggagtccttcctggtggaggaggacaagaagcacgagcggcaccccatcttcggcaacatcgtggacgaggtggcctaccacgagaagtaccccaccatctaccacctgcggaagaagctggtggactccaccgacaaggccgacctgcggctgatctacctggccctggcccacatgatcaagttccggggccacttcctgatcgagggcgacctgaaccccgacaactccgacgtggacaagctgttcatccagctggtgcagacctacaaccagctgttcgaggagaaccccatcaacgcctccggcgtggacgccaaggccatcctgtccgcccggctgtccaagtcccggcggctggagaacctgatcgcccagctgcccggcgagaagaagaacggcctgttcggcaacctgatcgccctgtccctgggcctgacccccaacttcaagtccaacttcgacctggccgaggacgccaagctgcagctgtccaaggacacctacgacgacgacctggacaacctgctggcccagatcggcgaccagtacgccgacctgttcctggccgccaagaacctgtccgacgccatcctgctgtccgacatcctgcgggtgaacaccgagatcaccaaggcccccctgtccgcctccatgatcaagcggtacgacgagcaccaccaggacctgaccctgctgaaggccctggtgcggcagcagctgcccgagaagtacaaggagatcttcttcgaccagtccaagaacggctacgccggctacatcgacggcggcgcctcccaggaggagttctacaagttcatcaagcccatcctggagaagatggacggcaccgaggagctgctggtgaagctgaaccgggaggacctgctgcggaagcagcggaccttcgacaacggctccatcccccaccagatccacctgggcgagctgcacgccatcctgcggcggcaggaggacttctaccccttcctgaaggacaaccgggagaagatcgagaagatcctgaccttccggatcccctactacgtgggccccctggcccggggcaactcccggttcgcctggatgacccggaagtccgaggagaccatcaccccctggaacttcgaggaggtggtggacaagggcgcctccgcccagtccttcatcgagcggatgaccaacttcgacaagaacctgcccaacgagaaggtgctgcccaagcactccctgctgtacgagtacttcaccgtgtacaacgagctgaccaaggtgaagtacgtgaccgagggcatgcggaagcccgccttcctgtccggcgagcagaagaaggccatcgtggacctgctgttcaagaccaaccggaaggtgaccgtgaagcagctgaaggaggactacttcaagaagatcgagtgcttcgactccgtggagatctccggcgtggaggaccggttcaacgcctccctgggcacctaccacgacctgctgaagatcatcaaggacaaggacttcctggacaacgaggagaacgaggacatcctggaggacatcgtgctgaccctgaccctgttcgaggaccgggagatgatcgaggagcggctgaagacctacgcccacctgttcgacgacaaggtgatgaagcagctgaagcggcggcggtacaccggctggggccggctgtcccggaagctgatcaacggcatccgggacaagcagtccggcaagaccatcctggacttcctgaagtccgacggcttcgccaaccggaacttcatgcagctgatccacgacgactccctgaccttcaaggaggacatccagaaggcccaggtgtccggccagggcgactccctgcacgagcacatcgccaacctggccggctcccccgccatcaagaagggcatcctgcagaccgtgaaggtggtggacgagctggtgaaggtgatgggccggcacaagcccgagaacatcgtgatcgagatggcccgggagaaccagaccacccagaagggccagaagaactcccgggagcggatgaagcggatcgaggagggcatcaaggagctgggctcccagatcctgaaggagcaccccgtggagaacacccagctgcagaacgagaagctgtacctgtactacctgcagaacggccgggacatgtacgtggaccaggagctggacatcaaccggctgtccgactacgacgtggacgccatcgtgccccagtccttcctgaaggacgactccatcgacaacaaggtgctgacccggtccgacaagaaccggggcaagtccgacaacgtgccctccgaggaggtggtgaagaagatgaagaactactggcggcagctgctgaacgccaagctgatcacccagcggaagttcgacaacctgaccaaggccgagcggggcggcctgtccgagctggacaaggccggcttcatcaagcggcagctggtggagacccggcagatcaccaagcacgtggcccagatcctggactcccggatgaacaccaagtacgacgagaacgacaagctgatccgggaggtgaaggtgatcaccctgaagtccaagctggtgtccgacttccggaaggacttccagttctacaaggtgcgggagatcaacaactaccaccacgcccacgacgcctacctgaacgccgtggtgggcaccgccctgatcaagaagtaccccaagctggagtccgagttcgtgtacggcgactacaaggtgtacgacgtgcggaagatgatcgccaagtccgagcaggagatcggcaaggccaccgccaagtacttcttctactccaacatcatgaacttcttcaagaccgagatcaccctggccaacggcgagatccggaagcggcccctgatcgagaccaacggcgagaccggcgagatcgtgtgggacaagggccgggacttcgccaccgtgcggaaggtgctgtccatgccccaggtgaacatcgtgaagaagaccgaggtgcagaccggcggcttctccaaggagtccatcctgcccaagcggaactccgacaagctgatcgcccggaagaaggactgggaccccaagaagtacggcggcttcgactcccccaccgtggcctactccgtgctggtggtggccaaggtggagaagggcaagtccaagaagctgaagtccgtgaaggagctgctgggcatcaccatcatggagcggtcctccttcgagaagaaccccatcgacttcctggaggccaagggctacaaggaggtgaagaaggacctgatcatcaagctgcccaagtactccctgttcgagctggagaacggccggaagcggatgctggcctccgccggcgagctgcagaagggcaacgagctggccctgccctccaagtacgtgaacttcctgtacctggcctcccactacgagaagctgaagggctcccccgaggacaacgagcagaagcagctgttcgtggagcagcacaagcactacctggacgagatcatcgagcagatctccgagttctccaagcgggtgatcctggccgacgccaacctggacaaggtgctgtccgcctacaacaagcaccgggacaagcccatccgggagcaggccgagaacatcatccacctgttcaccctgaccaacctgggcgcccccgccgccttcaagtacttcgacaccaccatcgaccggaagcggtacacctccaccaaggaggtgctggacgccaccctgatccaccagtccatcaccggcctgtacgagacccggatcgacctgtcccagctgggcggcgactccggcggctccaagcggaccgccgacggctccgagttcgagtcccccaagaagaagcggaaggtgtagctagcaccagcctcaagaacacccgaatggagtctctaagctacataataccaacttacactttacaaaatgttgtcccccaaaatgtagccattcgtatctgctcctaataaaaagaaagtttcttcacattctctcgagaaaaaaaaaaaatggaaaaaaaaaaaacggaaaaaaaaaaaaggtaaaaaaaaaaaatataaaaaaaaaaaacataaaaaaaaaaaacgaaaaaaaaaaaacgtaaaaaaaaaaaactcaaaaaaaaaaaagataaaaaaaaaaaacctaaaaaaaaaaaatgtaaaaaaaaaaaagggaaaaaaaaaaaacgcaaaaaaaaaaaacacaaaaaaaaaaaatgcaaaaaaaaaaaatcgaaaaaaaaaaaatctaaaaaaaaaaaacgaaaaaaaaaaaacccaaaaaaaaaaaagacaaaaaaaaaaaatagaaaaaaaaaaagttaaaaaaaaaaaactgaaaaaaaaaaaatttaaaaaaaaaaaatctag

SEQ ID NO: 1093 - RNA, 6972 nt, synthetic construct
  misc_feature 1..6972: note = Synthetic
  source 1..6972: mol_type = other RNA
atggagaactacgaggccctggtgggcttcgacctgtgcaacacccccctgtcctccgtggcccagaagatcatgtccgccatgcactccggcgacctggtggactccaagacctggggcaagtccaccgagaccatggaggtgatcaacaagtcctccgtgaagtactccgtgcagctggaggaccggaagacccagtcccccgagaagaaggacctgaagtccctgcggtcccagacctcccggggctccgccaagctgtccccccagtccttctccgtgcggctgaccgaccagctgtccgccgaccagaagcagaagtccatctcctccctgaccctgtcctcctgcctgatcccccagtacaaccaggaggcctccgtgctgcagaagaagggccacaagcggaagcacttcctgatggagaacatcaacaacgagaacaagggctccatcaacctgaagcggaagcacatcacctacaacaacctgtccgagaagacctccaagcagatggccctggaggaggacaccgacgacgccgagggctacctgaactccggcaactccggcgccctgaagaagcacttctgcgacatccggcacctggacgactgggccaagtcccagctgatcgagatgctgaagcaggccgccgccctggtgatcaccgtgatgtacaccgacggctccacccagctgggcgccgaccagacccccgtgtcctccgtgcggggcatcgtggtgctggtgaagcggcaggccgagggcggccacggctgccccgacgcccccgcctgcggccccgtgctggagggcttcgtgtccgacgacccctgcatctacatccagatcgagcactccgccatctgggaccaggagcaggaggcccaccagcagttcgcccggaacgtgctgttccagaccatgaagtgcaagtgccccgtgatctgcttcaacgccaaggacttcgtgcggatcgtgctgcagttcttcggcaacgacggctcctggaagcacgtggccgacttcatcggcctggacccccggatcgccgcctggctgatcgacccctccgacgccaccccctccttcgaggacctggtggagaagtactgcgagaagtccatcaccgtgaaggtgaactccacctacggcaactcctcccggaacatcgtgaaccagaacgtgcgggagaacctgaagaccctgtaccggctgaccatggacctgtgctccaagctgaaggactacggcctgtggcagctgttccggaccctggagctgcccctgatccccatcctggccgtgatggagtcccacgccatccaggtgaacaaggaggagatggagaagacctccgccctgctgggcgcccggctgaaggagctggagcaggaggcccacttcgtggccggcgagcggttcctgatcacctccaacaaccagctgcgggagatcctgttcggcaagctgaagctgcacctgctgtcccagcggaactccctgccccggaccggcctgcagaagtacccctccacctccgaggccgtgctgaacgccctgcgggacctgcaccccctgcccaagatcatcctggagtaccggcaggtgcacaagatcaagtccaccttcgtggacggcctgctggcctgcatgaagaagggctccatctcctccacctggaaccagaccggcaccgtgaccggccggctgtccgccaagcaccccaacatccagggcatctccaagcaccccatccagatcaccacccccaagaacttcaagggcaaggaggacaagatcctgaccatctccccccgggccatgttcgtgtcctccaagggccacaccttcctggccgccgacttctcccagatcgagctgcggatcctgacccacctgtccggcgaccccgagctgctgaagctgttccaggagtccgagcgggacgacgtgttctccaccctgacctcccagtggaaggacgtgcccgtggagcaggtgacccacgccgaccgggagcagaccaagaaggtggtgtacgccgtggtgtacggcgccggcaaggagcggctggccgcctgcctgggcgtgcccatccaggaggccgcccagttcctggagtccttcctgcagaagtacaagaagatcaaggacttcgcccgggccgccatcgcccagtgccaccagaccggctgcgtggtgtccatcatgggccggcggcggcccctgccccggatccacgcccacgaccagcagctgcgggcccaggccgagcggcaggccgtgaacttcgtggtgcagggctccgccgccgacctgtgcaagctggccatgatccacgtgttcaccgccgtggccgcctcccacaccctgaccgcccggctggtggcccagatccacgacgagctgctgttcgaggtggaggacccccagatccccgagtgcgccgccctggtgcggcggaccatggagtccctggagcaggtgcaggccctggagctgcagctgcaggtgcccctgaaggtgtccctgtccgccggccggtcctggggccacctggtgcccctgcaggaggcctggggccccccccccggcccctgccggaccgagtccccctccaactccctggccgcccccggctcccccgcctccacccagcccccccccctgcacttctccccctccttctgcctgtccggcggctcctccggcggctccaagcggaccgccgacggctccgagttcgagtcccccaagaagaagcggaaggtgtccggcggctcctccggcggctccgacaagaagtactccatcggcctggacatcggcaccaactccgtgggctgggccgtgatcaccgacgagtacaaggtgccctccaagaagttcaaggtgctgggcaacaccgaccggcactccatcaagaagaacctgatcggcgccctgctgttcgactccggcgagaccgccgaggccacccggctgaagcggaccgcccggcggcggtacacccggcggaagaaccggatctgctacctgcaggagatcttctccaacgagatggccaaggtggacgactccttcttccaccggctggaggagtccttcctggtggaggaggacaagaagcacgagcggcaccccatcttcggcaacatcgtggacgaggtggcctaccacgagaagtaccccaccatctaccacctgcggaagaagctggtggactccaccgacaaggccgacctgcggctgatctacctggccctggcccacatgatcaagttccggggccacttcctgatcgagggcgacctgaaccccgacaactccgacgtggacaagctgttcatccagctggtgcagacctacaaccagctgttcgaggagaaccccatcaacgcctccggcgtggacgccaaggccatcctgtccgcccggctgtccaagtcccggcggctggagaacctgatcgcccagctgcccggcgagaagaagaacggcctgttcggcaacctgatcgccctgtccctgggcctgacccccaacttcaagtccaacttcgacctggccgaggacgccaagctgcagctgtccaaggacacctacgacgacgacctggacaacctgctggcccagatcggcgaccagtacgccgacctgttcctggccgccaagaacctgtccgacgccatcctgctgtccgacatcctgcgggtgaacaccgagatcaccaaggcccccctgtccgcctccatgatcaagcggtacgacgagcaccaccaggacctgaccctgctgaaggccctggtgcggcagcagctgcccgagaagtacaaggagatcttcttcgaccagtccaagaacggctacgccggctacatcgacggcggcgcctcccaggaggagttctacaagttcatcaagcccatcctggagaagatggacggcaccgaggagctgctggtgaagctgaaccgggaggacctgctgcggaagcagcggaccttcgacaacggctccatcccccaccagatccacctgggcgagctgcacgccatcctgcggcggcaggaggacttctaccccttcctgaaggacaaccgggagaagatcgagaagatcctgaccttccggatcccctactacgtgggccccctggcccggggcaactcccggttcgcctggatgacccggaagtccgaggagaccatcaccccctggaacttcgaggaggtggtggacaagggcgcctccgcccagtccttcatcgagcggatgaccaacttcgacaagaacctgcccaacgagaaggtgctgcccaagcactccctgctgtacgagtacttcaccgtgtacaacgagctgaccaaggtgaagtacgtgaccgagggcatgcggaagcccgccttcctgtccggcgagcagaagaaggccatcgtggacctgctgttcaagaccaaccggaaggtgaccgtgaagcagctgaaggaggactacttcaagaagatcgagtgcttcgactccgtggagatctccggcgtggaggaccggttcaacgcctccctgggcacctaccacgacctgctgaagatcatcaaggacaaggacttcctggacaacgaggagaacgaggacatcctggaggacatcgtgctgaccctgaccctgttcgaggaccgggagatgatcgaggagcggctgaagacctacgcccacctgttcgacgacaaggtgatgaagcagctgaagcggcggcggtacaccggctggggccggctgtcccggaagctgatcaacggcatccgggacaagcagtccggcaagaccatcctggacttcctgaagtccgacggcttcgccaaccggaacttcatgcagctgatccacgacgactccctgaccttcaaggaggacatccagaaggcccaggtgtccggccagggcgactccctgcacgagcacatcgccaacctggccggctcccccgccatcaagaagggcatcctgcagaccgtgaaggtggtggacgagctggtgaaggtgatgggccggcacaagcccgagaacatcgtgatcgagatggcccgggagaaccagaccacccagaagggccagaagaactcccgggagcggatgaagcggatcgaggagggcatcaaggagctgggctcccagatcctgaaggagcaccccgtggagaacacccagctgcagaacgagaagctgtacctgtactacctgcagaacggccgggacatgtacgtggaccaggagctggacatcaaccggctgtccgactacgacgtggacgccatcgtgccccagtccttcctgaaggacgactccatcgacaacaaggtgctgacccggtccgacaagaaccggggcaagtccgacaacgtgccctccgaggaggtggtgaagaagatgaagaactactggcggcagctgctgaacgccaagctgatcacccagcggaagttcgacaacctgaccaaggccgagcggggcggcctgtccgagctggacaaggccggcttcatcaagcggcagctggtggagacccggcagatcaccaagcacgtggcccagatcctggactcccggatgaacaccaagtacgacgagaacgacaagctgatccgggaggtgaaggtgatcaccctgaagtccaagctggtgtccgacttccggaaggacttccagttctacaaggtgcgggagatcaacaactaccaccacgcccacgacgcctacctgaacgccgtggtgggcaccgccctgatcaagaagtaccccaagctggagtccgagttcgtgtacggcgactacaaggtgtacgacgtgcggaagatgatcgccaagtccgagcaggagatcggcaaggccaccgccaagtacttcttctactccaacatcatgaacttcttcaagaccgagatcaccctggccaacggcgagatccggaagcggcccctgatcgagaccaacggcgagaccggcgagatcgtgtgggacaagggccgggacttcgccaccgtgcggaaggtgctgtccatgccccaggtgaacatcgtgaagaagaccgaggtgcagaccggcggcttctccaaggagtccatcctgcccaagcggaactccgacaagctgatcgcccggaagaaggactgggaccccaagaagtacggcggcttcgactcccccaccgtggcctactccgtgctggtggtggccaaggtggagaagggcaagtccaagaagctgaagtccgtgaaggagctgctgggcatcaccatcatggagcggtcctccttcgagaagaaccccatcgacttcctggaggccaagggctacaaggaggtgaagaaggacctgatcatcaagctgcccaagtactccctgttcgagctggagaacggccggaagcggatgctggcctccgccggcgagctgcagaagggcaacgagctggccctgccctccaagtacgtgaacttcctgtacctggcctcccactacgagaagctgaagggctcccccgaggacaacgagcagaagcagctgttcgtggagcagcacaagcactacctggacgagatcatcgagcagatctccgagttctccaagcgggtgatcctggccgacgccaacctggacaaggtgctgtccgcctacaacaagcaccgggacaagcccatccgggagcaggccgagaacatcatccacctgttcaccctgaccaacctgggcgcccccgccgccttcaagtacttcgacaccaccatcgaccggaagcggtacacctccaccaaggaggtgctggacgccaccctgatccaccagtccatcaccggcctgtacgagacccggatcgacctgtcccagctgggcggcgactccggcggctccaagcggaccgccgacggctccgagttcgagtcccccaagaagaagcggaaggtgtag

SEQ ID NO: 1094 - protein, 2323 aa, synthetic construct
  REGION 1..2323: note = Synthetic
MENYEALVGFDLCNTPLSSVAQKIMSAMHSGDLVDSKTWGKSTETMEVINKSSVKYSVQLEDRKTQSPEKKDLKSLRSQTSRGSAKLSPQSFSVRLTDQLSADQKQKSISSLTLSSCLIPQYNQEASVLQKKGHKRKHFLMENINNENKGSINLKRKHITYNNLSEKTSKQMALEEDTDDAEGYLNSGNSGALKKHFCDIRHLDDWAKSQLIEMLKQAAALVITVMYTDGSTQLGADQTPVSSVRGIVVLVKRQAEGGHGCPDAPACGPVLEGFVSDDPCIYIQIEHSAIWDQEQEAHQQFARNVLFQTMKCKCPVICFNAKDFVRIVLQFFGNDGSWKHVADFIGLDPRIAAWLIDPSDATPSFEDLVEKYCEKSITVKVNSTYGNSSRNIVNQNVRENLKTLYRLTMDLCSKLKDYGLWQLFRTLELPLIPILAVMESHAIQVNKEEMEKTSALLGARLKELEQEAHFVAGERFLITSNNQLREILFGKLKLHLLSQRNSLPRTGLQKYPSTSEAVLNALRDLHPLPKIILEYRQVHKIKSTFVDGLLACMKKGSISSTWNQTGTVTGRLSAKHPNIQGISKHPIQITTPKNFKGKEDKILTISPRAMFVSSKGHTFLAADFSQIELRILTHLSGDPELLKLFQESERDDVFSTLTSQWKDVPVEQVTHADREQTKKVVYAVVYGAGKERLAACLGVPIQEAAQFLESFLQKYKKIKDFARAAIAQCHQTGCVVSIMGRRRPLPRIHAHDQQLRAQAERQAVNFVVQGSAADLCKLAMIHVFTAVAASHTLTARLVAQIHDELLFEVEDPQIPECAALVRRTMESLEQVQALELQLQVPLKVSLSAGRSWGHLVPLQEAWGPPPGPCRTESPSNSLAAPGSPASTQPPPLHFSPSFCLSGGSSGGSKRTADGSEFESPKKKRKVSGGSSGGSDKKYSIGLDIGTNSVGWAVITDEYKVPSKKFKVLGNTDRHSIKKNLIGALLFDSGETAEATRLKRTARRRYTRRKNRICYLQEIFSNEMAKVDDSFFHRLEESFLVEEDKKHERHPIFGNIVDEVAYHEKYPTIYHLRKKLVDSTDKADLRLIYLALAHMIKFRGHFLIEGDLNPDNSDVDKLFIQLVQTYNQLFEENPINASGVDAKAILSARLSKSRRLENLIAQLPGEKKNGLFGNLIALSLGLTPNFKSNFDLAEDAKLQLSKDTYDDDLDNLLAQIGDQYADLFLAAKNLSDAILLSDILRVNTEITKAPLSASMIKRYDEHHQDLTLLKALVRQQLPEKYKEIFFDQSKNGYAGYIDGGASQEEFYKFIKPILEKMDGTEELLVKLNREDLLRKQRTFDNGSIPHQIHLGELHAILRRQEDFYPFLKDNREKIEKILTFRIPYYVGPLARGNSRFAWMTRKSEETITPWNFEEVVDKGASAQSFIERMTNFDKNLPNEKVLPKHSLLYEYFTVYNELTKVKYVTEGMRKPAFLSGEQKKAIVDLLFKTNRKVTVKQLKEDYFKKIECFDSVEISGVEDRFNASLGTYHDLLKIIKDKDFLDNEENEDILEDIVLTLTLFEDREMIEERLKTYAHLFDDKVMKQLKRRRYTGWGRLSRKLINGIRDKQSGKTILDFLKSDGFANRNFMQLIHDDSLTFKEDIQKAQVSGQGDSLHEHIANLAGSPAIKKGILQTVKVVDELVKVMGRHKPENIVIEMARENQTTQKGQKNSRERMKRIEEGIKELGSQILKEHPVENTQLQNEKLYLYYLQNGRDMYVDQELDINRLSDYDVDAIVPQSFLKDDSIDNKVLTRSDKNRGKSDNVPSEEVVKKMKNYWRQLLNAKLITQRKFDNLTKAERGGLSELDKAGFIKRQLVETRQITKHVAQILDSRMNTKYDENDKLIREVKVITLKSKLVSDFRKDFQFYKVREINNYHHAHDAYLNAVVGTALIKKYPKLESEFVYGDYKVYDVRKMIAKSEQEIGKATAKYFFYSNIMNFFKTEITLANGEIRKRPLIETNGETGEIVWDKGRDFATVRKVLSMPQVNIVKKTEVQTGGFSKESILPKRNSDKLIARKKDWDPKKYGGFDSPTVAYSVLVVAKVEKGKSKKLKSVKELLGITIMERSSFEKNPIDFLEAKGYKEVKKDLIIKLPKYSLFELENGRKRMLASAGELQKGNELALPSKYVNFLYLASHYEKLKGSPEDNEQKQLFVEQHKHYLDEIIEQISEFSKRVILADANLDKVLSAYNKHRDKPIREQAENIIHLFTLTNLGAPAAFKYFDTTIDRKRYTSTKEVLDATLIHQSITGLYETRIDLSQLGGDSGGSKRTADGSEFESPKKKRKV

SEQ ID NO: 1095 - RNA, 7522 nt, synthetic construct
  misc_feature 1..7522: note = Synthetic
  source 1..7522: mol_type = other RNA
gggaagctcagaataaacgctcaactttggccggatctgccaccatgaagcggaccgccgacggctccgagttcgagtcccccaagaagaagcggaaggtggacaagaagtactccatcggcctggacatcggcaccaactccgtgggctgggccgtgatcaccgacgagtacaaggtgccctccaagaagttcaaggtgctgggcaacaccgaccggcactccatcaagaagaacctgatcggcgccctgctgttcgactccggcgagaccgccgaggccacccggctgaagcggaccgcccggcggcggtacacccggcggaagaaccggatctgctacctgcaggagatcttctccaacgagatggccaaggtggacgactccttcttccaccggctggaggagtccttcctggtggaggaggacaagaagcacgagcggcaccccatcttcggcaacatcgtggacgaggtggcctaccacgagaagtaccccaccatctaccacctgcggaagaagctggtggactccaccgacaaggccgacctgcggctgatctacctggccctggcccacatgatcaagttccggggccacttcctgatcgagggcgacctgaaccccgacaactccgacgtggacaagctgttcatccagctggtgcagacctacaaccagctgttcgaggagaaccccatcaacgcctccggcgtggacgccaaggccatcctgtccgcccggctgtccaagtcccggcggctggagaacctgatcgcccagctgcccggcgagaagaagaacggcctgttcggcaacctgatcgccctgtccctgggcctgacccccaacttcaagtccaacttcgacctggccgaggacgccaagctgcagctgtccaaggacacctacgacgacgacctggacaacctgctggcccagatcggcgaccagtacgccgacctgttcctggccgccaagaacctgtccgacgccatcctgctgtccgacatcctgcgggtgaacaccgagatcaccaaggcccccctgtccgcctccatgatcaagcggtacgacgagcaccaccaggacctgaccctgctgaaggccctggtgcggcagcagctgcccgagaagtacaaggagatcttcttcgaccagtccaagaacggctacgccggctacatcgacggcggcgcctcccaggaggagttctacaagttcatcaagcccatcctggagaagatggacggcaccgaggagctgctggtgaagctgaaccgggaggacctgctgcggaagcagcggaccttcgacaacggctccatcccccaccagatccacctgggcgagctgcacgccatcctgcggcggcaggaggacttctaccccttcctgaaggacaaccgggagaagatcgagaagatcctgaccttccggatcccctactacgtgggccccctggcccggggcaactcccggttcgcctggatgacccggaagtccgaggagaccatcaccccctggaacttcgaggaggtggtggacaagggcgcctccgcccagtccttcatcgagcggatgaccaacttcgacaagaacctgcccaacgagaaggtgctgcccaagcactccctgctgtacgagtacttcaccgtgtacaacgagctgaccaaggtgaagtacgtgaccgagggcatgcggaagcccgccttcctgtccggcgagcagaagaaggccatcgtggacctgctgttcaagaccaaccggaaggtgaccgtgaagcagctgaaggaggactacttcaagaagatcgagtgcttcgactccgtggagatctccggcgtggaggaccggttcaacgcctccctgggcacctaccacgacctgctgaagatcatcaaggacaaggacttcctggacaacgaggagaacgaggacatcctggaggacatcgtgctgaccctgaccctgttcgaggaccgggagatgatcgaggagcggctgaagacctacgcccacctgttcgacgacaaggtgatgaagcagctgaagcggcggcggtacaccggctggggccggctgtcccggaagctgatcaacggcatccgggacaagcagtccggcaagaccatcctggacttcctgaagtccgacggcttcgccaaccggaacttcatgcagctgatccacgacgactccctgaccttcaaggaggacatccagaaggcccaggtgtccggccagggcgactccctgcacgagcacatcgccaacctggccggctcccccgccatcaagaagggcatcctgcagaccgtgaaggtggtggacgagctggtgaaggtgatgggccggcacaagcccgagaacatcgtgatcgagatggcccgggagaaccagaccacccagaagggccagaagaactcccgggagcggatgaagcggatcgaggagggcatcaaggagctgggctcccagatcctgaaggagcaccccgtggagaacacccagctgcagaacgagaagctgtacctgtactacctgcagaacggccgggacatgtacgtggaccaggagctggacatcaaccggctgtccgactacgacgtggacgccatcgtgccccagtccttcctgaaggacgactccatcgacaacaaggtgctgacccggtccgacaagaaccggggcaagtccgacaacgtgccctccgaggaggtggtgaagaagatgaagaactactggcggcagctgctgaacgccaagctgatcacccagcggaagttcgacaacctgaccaaggccgagcggggcggcctgtccgagctggacaaggccggcttcatcaagcggcagctggtggagacccggcagatcaccaagcacgtggcccagatcctggactcccggatgaacaccaagtacgacgagaacgacaagctgatccgggaggtgaaggtgatcaccctgaagtccaagctggtgtccgacttccggaaggacttccagttctacaaggtgcgggagatcaacaactaccaccacgcccacgacgcctacctgaacgccgtggtgggcaccgccctgatcaagaagtaccccaagctggagtccgagttcgtgtacggcgactacaaggtgtacgacgtgcggaagatgatcgccaagtccgagcaggagatcggcaaggccaccgccaagtacttcttctactccaacatcatgaacttcttcaagaccgagatcaccctggccaacggcgagatccggaagcggcccctgatcgagaccaacggcgagaccggcgagatcgtgtgggacaagggccgggacttcgccaccgtgcggaaggtgctgtccatgccccaggtgaacatcgtgaagaagaccgaggtgcagaccggcggcttctccaaggagtccatcctgcccaagcggaactccgacaagctgatcgcccggaagaaggactgggaccccaagaagtacggcggcttcgactcccccaccgtggcctactccgtgctggtggtggccaaggtggagaagggcaagtccaagaagctgaagtccgtgaaggagctgctgggcatcaccatcatggagcggtcctccttcgagaagaaccccatcgacttcctggaggccaagggctacaaggaggtgaagaaggacctgatcatcaagctgcccaagtactccctgttcgagctggagaacggccggaagcggatgctggcctccgccggcgagctgcagaagggcaacgagctggccctgccctccaagtacgtgaacttcctgtacctggcctcccactacgagaagctgaagggctcccccgaggacaacgagcagaagcagctgttcgtggagcagcacaagcactacctggacgagatcatcgagcagatctccgagttctccaagcgggtgatcctggccgacgccaacctggacaaggtgctgtccgcctacaacaagcaccgggacaagcccatccgggagcaggccgagaacatcatccacctgttcaccctgaccaacctgggcgcccccgccgccttcaagtacttcgacaccaccatcgaccggaagcggtacacctccaccaaggaggtgctggacgccaccctgatccaccagtccatcaccggcctgtacgagacccggatcgacctgtcccagctgggcggcgactccggcggctcctccggcggctccaagcggaccgccgacggctccgagttcgagtcccccaagaagaagcggaaggtgtccggcggctcctccggcggctccatggagaactacgaggccctggtgggcttcgacctgtgcaacacccccctgtcctccgtggcccagaagatcatgtccgccatgcactccggcgacctggtggactccaagacctggggcaagtccaccgagaccatggaggtgatcaacaagtcctccgtgaagtactccgtgcagctggaggaccggaagacccagtcccccgagaagaaggacctgaagtccctgcggtcccagacctcccggggctccgccaagctgtccccccagtccttctccgtgcggctgaccgaccagctgtccgccgaccagaagcagaagtccatctcctccctgaccctgtcctcctgcctgatcccccagtacaaccaggaggcctccgtgctgcagaagaagggccacaagcggaagcacttcctgatggagaacatcaacaacgagaacaagggctccatcaacctgaagcggaagcacatcacctacaacaacctgtccgagaagacctccaagcagatggccctggaggaggacaccgacgacgccgagggctacctgaactccggcaactccggcgccctgaagaagcacttctgcgacatccggcacctggacgactgggccaagtcccagctgatcgagatgctgaagcaggccgccgccctggtgatcaccgtgatgtacaccgacggctccacccagctgggcgccgaccagacccccgtgtcctccgtgcggggcatcgtggtgctggtgaagcggcaggccgagggcggccacggctgccccgacgcccccgcctgcggccccgtgctggagggcttcgtgtccgacgacccctgcatctacatccagatcgagcactccgccatctgggaccaggagcaggaggcccaccagcagttcgcccggaacgtgctgttccagaccatgaagtgcaagtgccccgtgatctgcttcaacgccaaggacttcgtgcggatcgtgctgcagttcttcggcaacgacggctcctggaagcacgtggccgacttcatcggcctggacccccggatcgccgcctggctgatcgacccctccgacgccaccccctccttcgaggacctggtggagaagtactgcgagaagtccatcaccgtgaaggtgaactccacctacggcaactcctcccggaacatcgtgaaccagaacgtgcgggagaacctgaagaccctgtaccggctgaccatggacctgtgctccaagctgaaggactacggcctgtggcagctgttccggaccctggagctgcccctgatccccatcctggccgtgatggagtcccacgccatccaggtgaacaaggaggagatggagaagacctccgccctgctgggcgcccggctgaaggagctggagcaggaggcccacttcgtggccggcgagcggttcctgatcacctccaacaaccagctgcgggagatcctgttcggcaagctgaagctgcacctgctgtcccagcggaactccctgccccggaccggcctgcagaagtacccctccacctccgaggccgtgctgaacgccctgcgggacctgcaccccctgcccaagatcatcctggagtaccggcaggtgcacaagatcaagtccaccttcgtggacggcctgctggcctgcatgaagaagggctccatctcctccacctggaaccagaccggcaccgtgaccggccggctgtccgccaagcaccccaacatccagggcatctccaagcaccccatccagatcaccacccccaagaacttcaagggcaaggaggacaagatcctgaccatctccccccgggccatgttcgtgtcctccaagggccacaccttcctggccgccgacttctcccagatcgagctgcggatcctgacccacctgtccggcgaccccgagctgctgaagctgttccaggagtccgagcgggacgacgtgttctccaccctgacctcccagtggaaggacgtgcccgtggagcaggtgacccacgccgaccgggagcagaccaagaaggtggtgtacgccgtggtgtacggcgccggcaaggagcggctggccgcctgcctgggcgtgcccatccaggaggccgcccagttcctggagtccttcctgcagaagtacaagaagatcaaggacttcgcccgggccgccatcgcccagtgccaccagaccggctgcgtggtgtccatcatgggccggcggcggcccctgccccggatccacgcccacgaccagcagctgcgggcccaggccgagcggcaggccgtgaacttcgtggtgcagggctccgccgccgacctgtgcaagctggccatgatccacgtgttcaccgccgtggccgcctcccacaccctgaccgcccggctggtggcccagatccacgacgagctgctgttcgaggtggaggacccccagatccccgagtgcgccgccctggtgcggcggaccatggagtccctggagcaggtgcaggccctggagctgcagctgcaggtgcccctgaaggtgtccctgtccgccggccggtcctggggccacctggtgcccctgcaggaggcctggggccccccccccggcccctgccggaccgagtccccctccaactccctggccgcccccggctcccccgcctccacccagcccccccccctgcacttctccccctccttctgcctgtagctagcaccagcctcaagaacacccgaatggagtctctaagctacataataccaacttacactttacaaaatgttgtcccccaaaatgtagccattcgtatctgctcctaataaaaagaaagtttcttcacattctctcgagaaaaaaaaaaaatggaaaaaaaaaaaacggaaaaaaaaaaaaggtaaaaaaaaaaaatataaaaaaaaaaaacataaaaaaaaaaaacgaaaaaaaaaaaacgtaaaaaaaaaaaactcaaaaaaaaaaaagataaaaaaaaaaaacctaaaaaaaaaaaatgtaaaaaaaaaaaagggaaaaaaaaaaaacgcaaaaaaaaaaaacacaaaaaaaaaaaatgcaaaaaaaaaaaatcgaaaaaaaaaaaatctaaaaaaaaaaaacgaaaaaaaaaaaacccaaaaaaaaaaaagacaaaaaaaaaaaatagaaaaaaaaaaagttaaaaaaaaaaaactgaaaaaaaaaaaatttaaaaaaaaaaaatctag

SEQ ID NO: 1096 - RNA, 6963 nt, synthetic construct
  misc_feature 1..6963: note = Synthetic
  source 1..6963: mol_type = other RNA
atgaagcggaccgccgacggctccgagttcgagtcccccaagaagaagcggaaggtggacaagaagtactccatcggcctggacatcggcaccaactccgtgggctgggccgtgatcaccgacgagtacaaggtgccctccaagaagttcaaggtgctgggcaacaccgaccggcactccatcaagaagaacctgatcggcgccctgctgttcgactccggcgagaccgccgaggccacccggctgaagcggaccgcccggcggcggtacacccggcggaagaaccggatctgctacctgcaggagatcttctccaacgagatggccaaggtggacgactccttcttccaccggctggaggagtccttcctggtggaggaggacaagaagcacgagcggcaccccatcttcggcaacatcgtggacgaggtggcctaccacgagaagtaccccaccatctaccacctgcggaagaagctggtggactccaccgacaaggccgacctgcggctgatctacctggccctggcccacatgatcaagttccggggccacttcctgatcgagggcgacctgaaccccgacaactccgacgtggacaagctgttcatccagctggtgcagacctacaaccagctgttcgaggagaaccccatcaacgcctccggcgtggacgccaaggccatcctgtccgcccggctgtccaagtcccggcggctggagaacctgatcgcccagctgcccggcgagaagaagaacggcctgttcggcaacctgatcgccctgtccctgggcctgacccccaacttcaagtccaacttcgacctggccgaggacgccaagctgcagctgtccaaggacacctacgacgacgacctggacaacctgctggcccagatcggcgaccagtacgccgacctgttcctggccgccaagaacctgtccgacgccatcctgctgtccgacatcctgcgggtgaacaccgagatcaccaaggcccccctgtccgcctccatgatcaagcggtacgacgagcaccaccaggacctgaccctgctgaaggccctggtgcggcagcagctgcccgagaagtacaaggagatcttcttcgaccagtccaagaacggctacgccggctacatcgacggcggcgcctcccaggaggagttctacaagttcatcaagcccatcctggagaagatggacggcaccgaggagctgctggtgaagctgaaccgggaggacctgctgcggaagcagcggaccttcgacaacggctccatcccccaccagatccacctgggcgagctgcacgccatcctgcggcggcaggaggacttctaccccttcctgaaggacaaccgggagaagatcgagaagatcctgaccttccggatcccctactacgtgggccccctggcccggggcaactcccggttcgcctggatgacccggaagtccgaggagaccatcaccccctggaacttcgaggaggtggtggacaagggcgcctccgcccagtccttcatcgagcggatgaccaacttcgacaagaacctgcccaacgagaaggtgctgcccaagcactccctgctgtacgagtacttcaccgtgtacaacgagctgaccaaggtgaagtacgtgaccgagggcatgcggaagcccgccttcctgtccggcgagcagaagaaggccatcgtggacctgctgttcaagaccaaccggaaggtgaccgtgaagcagctgaaggaggactacttcaagaagatcgagtgcttcgactccgtggagatctccggcgtggaggaccggttcaacgcctccctgggcacctaccacgacctgctgaagatcatcaaggacaaggacttcctggacaacgaggagaacgaggacatcctggaggacatcgtgctgaccctgaccctgttcgaggaccgggagatgatcgaggagcggctgaagacctacgcccacctgttcgacgacaaggtgatgaagcagctgaagcggcggcggtacaccggctggggccggctgtcccggaagctgatcaacggcatccgggacaagcagtccggcaagaccatcctggacttcctgaagtccgacggcttcgccaaccggaacttcatgcagctgatccacgacgactccctgaccttcaaggaggacatccagaaggcccaggtgtccggccagggcgactccctgcacgagcacatcgccaacctggccggctcccccgccatcaagaagggcatcctgcagaccgtgaaggtggtggacgagctggtgaaggtgatgggccggcacaagcccgagaacatcgtgatcgagatggcccgggagaaccagaccacccagaagggccagaagaactcccgggagcggatgaagcggatcgaggagggcatcaaggagctgggctcccagatcctgaaggagcaccccgtggagaacacccagctgcagaacgagaagctgtacctgtactacctgcagaacggccgggacatgtacgtggaccaggagctggacatcaaccggctgtccgactacgacgtggacgccatcgtgccccagtccttcctgaaggacgactccatcgacaacaaggtgctgacccggtccgacaagaaccggggcaagtccgacaacgtgccctccgaggaggtggtgaagaagatgaagaactactggcggcagctgctgaacgccaagctgatcacccagcggaagttcgacaacctgaccaaggccgagcggggcggcctgtccgagctggacaaggccggcttcatcaagcggcagctggtggagacccggcagatcaccaagcacgtggcccagatcctggactcccggatgaacaccaagtacgacgagaacgacaagctgatccgggaggtgaaggtgatcaccctgaagtccaagctggtgtccgacttccggaaggacttccagttctacaaggtgcgggagatcaacaactaccaccacgcccacgacgcctacctgaacgccgtggtgggcaccgccctgatcaagaagtaccccaagctggagtccgagttcgtgtacggcgactacaaggtgtacgacgtgcggaagatgatcgccaagtccgagcaggagatcggcaaggccaccgccaagtacttcttctactccaacatcatgaacttcttcaagaccgagatcaccctggccaacggcgagatccggaagcggcccctgatcgagaccaacggcgagaccggcgagatcgtgtgggacaagggccgggacttcgccaccgtgcggaaggtgctgtccatgccccaggtgaacatcgtgaagaagaccgaggtgcagaccggcggcttctccaaggagtccatcctgcccaagcggaactccgacaagctgatcgcccggaagaaggactgggaccccaagaagtacggcggcttcgactcccccaccgtggcctactccgtgctggtggtggccaaggtggagaagggcaagtccaagaagctgaagtccgtgaaggagctgctgggcatcaccatcatggagcggtcctccttcgagaagaaccccatcgacttcctggaggccaagggctacaaggaggtgaagaaggacctgatcatcaagctgcccaagtactccctgttcgagctggagaacggccggaagcggatgctggcctccgccggcgagctgcagaagggcaacgagctggccctgccctccaagtacgtgaacttcctgtacctggcctcccactacgagaagctgaagggctcccccgaggacaacgagcagaagcagctgttcgtggagcagcacaagcactacctggacgagatcatcgagcagatctccgagttctccaagcgggtgatcctggccgacgccaacctggacaaggtgctgtccgcctacaacaagcaccgggacaagcccatccgggagcaggccgagaacatcatccacctgttcaccctgaccaacctgggcgcccccgccgccttcaagtacttcgacaccaccatcgaccggaagcggtacacctccaccaaggaggtgctggacgccaccctgatccaccagtccatcaccggcctgtacgagacccggatcgacctgtcccagctgggcggcgactccggcggctcctccggcggctccaagcggaccgccgacggctccgagttcgagtcccccaagaagaagcggaaggtgtccggcggctcctccggcggctccatggagaactacgaggccctggtgggcttcgacctgtgcaacacccccctgtcctccgtggcccagaagatcatgtccgccatgcactccggcgacctggtggactccaagacctggggcaagtccaccgagaccatggaggtgatcaacaagtcctccgtgaagtactccgtgcagctggaggaccggaagacccagtcccccgagaagaaggacctgaagtccctgcggtcccagacctcccggggctccgccaagctgtccccccagtccttctccgtgcggctgaccgaccagctgtccgccgaccagaagcagaagtccatctcctccctgaccctgtcctcctgcctgatcccccagtacaaccaggaggcctccgtgctgcagaagaagggccacaagcggaagcacttcctgatggagaacatcaacaacgagaacaagggctccatcaacctgaagcggaagcacatcacctacaacaacctgtccgagaagacctccaagcagatggccctggaggaggacaccgacgacgccgagggctacctgaactccggcaactccggcgccctgaagaagcacttctgcgacatccggcacctggacgactgggccaagtcccagctgatcgagatgctgaagcaggccgccgccctggtgatcaccgtgatgtacaccgacggctccacccagctgggcgccgaccagacccccgtgtcctccgtgcggggcatcgtggtgctggtgaagcggcaggccgagggcggccacggctgccccgacgcccccgcctgcggccccgtgctggagggcttcgtgtccgacgacccctgcatctacatccagatcgagcactccgccatctgggaccaggagcaggaggcccaccagcagttcgcccggaacgtgctgttccagaccatgaagtgcaagtgccccgtgatctgcttcaacgccaaggacttcgtgcggatcgtgctgcagttcttcggcaacgacggctcctggaagcacgtggccgacttcatcggcctggacccccggatcgccgcctggctgatcgacccctccgacgccaccccctccttcgaggacctggtggagaagtactgcgagaagtccatcaccgtgaaggtgaactccacctacggcaactcctcccggaacatcgtgaaccagaacgtgcgggagaacctgaagaccctgtaccggctgaccatggacctgtgctccaagctgaaggactacggcctgtggcagctgttccggaccctggagctgcccctgatccccatcctggccgtgatggagtcccacgccatccaggtgaacaaggaggagatggagaagacctccgccctgctgggcgcccggctgaaggagctggagcaggaggcccacttcgtggccggcgagcggttcctgatcacctccaacaaccagctgcgggagatcctgttcggcaagctgaagctgcacctgctgtcccagcggaactccctgccccggaccggcctgcagaagtacccctccacctccgaggccgtgctgaacgccctgcgggacctgcaccccctgcccaagatcatcctggagtaccggcaggtgcacaagatcaagtccaccttcgtggacggcctgctggcctgcatgaagaagggctccatctcctccacctggaaccagaccggcaccgtgaccggccggctgtccgccaagcaccccaacatccagggcatctccaagcaccccatccagatcaccacccccaagaacttcaagggcaaggaggacaagatcctgaccatctccccccgggccatgttcgtgtcctccaagggccacaccttcctggccgccgacttctcccagatcgagctgcggatcctgacccacctgtccggcgaccccgagctgctgaagctgttccaggagtccgagcgggacgacgtgttctccaccctgacctcccagtggaaggacgtgcccgtggagcaggtgacccacgccgaccgggagcagaccaagaaggtggtgtacgccgtggtgtacggcgccggcaaggagcggctggccgcctgcctgggcgtgcccatccaggaggccgcccagttcctggagtccttcctgcagaagtacaagaagatcaaggacttcgcccgggccgccatcgcccagtgccaccagaccggctgcgtggtgtccatcatgggccggcggcggcccctgccccggatccacgcccacgaccagcagctgcgggcccaggccgagcggcaggccgtgaacttcgtggtgcagggctccgccgccgacctgtgcaagctggccatgatccacgtgttcaccgccgtggccgcctcccacaccctgaccgcccggctggtggcccagatccacgacgagctgctgttcgaggtggaggacccccagatccccgagtgcgccgccctggtgcggcggaccatggagtccctggagcaggtgcaggccctggagctgcagctgcaggtgcccctgaaggtgtccctgtccgccggccggtcctggggccacctggtgcccctgcaggaggcctggggccccccccccggcccctgccggaccgagtccccctccaactccctggccgcccccggctcccccgcctccacccagcccccccccctgcacttctccccctccttctgcctgtag

SEQ ID NO: 1097 - protein, 2320 aa, synthetic construct
  REGION 1..2320: note = Synthetic
MKRTADGSEFESPKKKRKVDKKYSIGLDIGTNSVGWAVITDEYKVPSKKFKVLGNTDRHSIKKNLIGALLFDSGETAEATRLKRTARRRYTRRKNRICYLQEIFSNEMAKVDDSFFHRLEESFLVEEDKKHERHPIFGNIVDEVAYHEKYPTIYHLRKKLVDSTDKADLRLIYLALAHMIKFRGHFLIEGDLNPDNSDVDKLFIQLVQTYNQLFEENPINASGVDAKAILSARLSKSRRLENLIAQLPGEKKNGLFGNLIALSLGLTPNFKSNFDLAEDAKLQLSKDTYDDDLDNLLAQIGDQYADLFLAAKNLSDAILLSDILRVNTEITKAPLSASMIKRYDEHHQDLTLLKALVRQQLPEKYKEIFFDQSKNGYAGYIDGGASQEEFYKFIKPILEKMDGTEELLVKLNREDLLRKQRTFDNGSIPHQIHLGELHAILRRQEDFYPFLKDNREKIEKILTFRIPYYVGPLARGNSRFAWMTRKSEETITPWNFEEVVDKGASAQSFIERMTNFDKNLPNEKVLPKHSLLYEYFTVYNELTKVKYVTEGMRKPAFLSGEQKKAIVDLLFKTNRKVTVKQLKEDYFKKIECFDSVEISGVEDRFNASLGTYHDLLKIIKDKDFLDNEENEDILEDIVLTLTLFEDREMIEERLKTYAHLFDDKVMKQLKRRRYTGWGRLSRKLINGIRDKQSGKTILDFLKSDGFANRNFMQLIHDDSLTFKEDIQKAQVSGQGDSLHEHIANLAGSPAIKKGILQTVKVVDELVKVMGRHKPENIVIEMARENQTTQKGQKNSRERMKRIEEGIKELGSQILKEHPVENTQLQNEKLYLYYLQNGRDMYVDQELDINRLSDYDVDAIVPQSFLKDDSIDNKVLTRSDKNRGKSDNVPSEEVVKKMKNYWRQLLNAKLITQRKFDNLTKAERGGLSELDKAGFIKRQLVETRQITKHVAQILDSRMNTKYDENDKLIREVKVITLKSKLVSDFRKDFQFYKVREINNYHHAHDAYLNAVVGTALIKKYPKLESEFVYGDYKVYDVRKMIAKSEQEIGKATAKYFFYSNIMNFFKTEITLANGEIRKRPLIETNGETGEIVWDKGRDFATVRKVLSMPQVNIVKKTEVQTGGFSKESILPKRNSDKLIARKKDWDPKKYGGFDSPTVAYSVLVVAKVEKGKSKKLKSVKELLGITIMERSSFEKNPIDFLEAKGYKEVKKDLIIKLPKYSLFELENGRKRMLASAGELQKGNELALPSKYVNFLYLASHYEKLKGSPEDNEQKQLFVEQHKHYLDEIIEQISEFSKRVILADANLDKVLSAYNKHRDKPIREQAENIIHLFTLTNLGAPAAFKYFDTTIDRKRYTSTKEVLDATLIHQSITGLYETRIDLSQLGGDSGGSSGGSKRTADGSEFESPKKKRKVSGGSSGGSMENYEALVGFDLCNTPLSSVAQKIMSAMHSGDLVDSKTWGKSTETMEVINKSSVKYSVQLEDRKTQSPEKKDLKSLRSQTSRGSAKLSPQSFSVRLTDQLSADQKQKSISSLTLSSCLIPQYNQEASVLQKKGHKRKHFLMENINNENKGSINLKRKHITYNNLSEKTSKQMALEEDTDDAEGYLNSGNSGALKKHFCDIRHLDDWAKSQLIEMLKQAAALVITVMYTDGSTQLGADQTPVSSVRGIVVLVKRQAEGGHGCPDAPACGPVLEGFVSDDPCIYIQIEHSAIWDQEQEAHQQFARNVLFQTMKCKCPVICFNAKDFVRIVLQFFGNDGSWKHVADFIGLDPRIAAWLIDPSDATPSFEDLVEKYCEKSITVKVNSTYGNSSRNIVNQNVRENLKTLYRLTMDLCSKLKDYGLWQLFRTLELPLIPILAVMESHAIQVNKEEMEKTSALLGARLKELEQEAHFVAGERFLITSNNQLREILFGKLKLHLLSQRNSLPRTGLQKYPSTSEAVLNALRDLHPLPKIILEYRQVHKIKSTFVDGLLACMKKGSISSTWNQTGTVTGRLSAKHPNIQGISKHPIQITTPKNFKGKEDKILTISPRAMFVSSKGHTFLAADFSQIELRILTHLSGDPELLKLFQESERDDVFSTLTSQWKDVPVEQVTHADREQTKKVVYAVVYGAGKERLAACLGVPIQEAAQFLESFLQKYKKIKDFARAAIAQCHQTGCVVSIMGRRRPLPRIHAHDQQLRAQAERQAVNFVVQGSAADLCKLAMIHVFTAVAASHTLTARLVAQIHDELLFEVEDPQIPECAALVRRTMESLEQVQALELQLQVPLKVSLSAGRSWGHLVPLQEAWGPPPGPCRTESPSNSLAAPGSPASTQPPPLHFSPSFCL

SEQ ID NO: 1098 - DNA, 2784 bp, synthetic construct
  misc_feature 1..2784: note = Synthetic
  source 1..2784: mol_type = other DNA
atggtgcagatcccccagaaccccctgatcctggtggacggctcctcctacctgtaccgggcctaccacgccttcccccccctgaccaactccgccggcgagcccaccggcgccatgtacggcgtgctgaacatgctgcggtccctgatcatgcagtacaagcccacccacgccgccgtggtgttcgacgccaagggcaagaccttccgggacgagctgttcgagcactacaagtcccaccggccccccatgcccgacgacctgcgggcccagatcgagcccctgcacgccatggtgaaggccatgggcctgcccctgctggccgtgtccggcgtggaggccgacgacgtgatcggcaccctggcccgggaggccgagaaggccggccggcccgtgctgatctccaccggcgacaaggacatggcccagctggtgacccccaacatcaccctgatcaacaccatgaccaacaccatcctgggccccgaggaggtggtgaacaagtacggcgtgccccccgagctgatcatcgacttcctggccctgatgggcgactcctccgacaacatccccggcgtgcccggcgtgggcgagaagaccgcccaggccctgctgcagggcctgggcggcctggacaccctgtacgccgagcccgagaagatcgccggcctgtccttccggggcgccaagaccatggccgccaagctggagcagaacaaggaggtggcctacctgtcctaccagctggccaccatcaagaccgacgtggagctggagctgacctgcgagcagctggaggtgcagcagcccgccgccgaggagctgctgggcctgttcaagaagtacgagttcaagcggtggaccgccgacgtggaggccggcaagtggctgcaggccaagggcgccaagcccgccgccaagccccaggagacctccgtggccgacgaggcccccgaggtgaccgccaccgtgatctcctacgacaactacgtgaccatcctggacgaggagaccctgaaggcctggatcgccaagctggagaaggcccccgtgttcgccttcgacaccgagaccgactccctggacaacatctccgccaacctggtgggcctgtccttcgccatcgagcccggcgtggccgcctacatccccgtggcccacgactacctggacgcccccgaccagatctcccgggagcgggccctggagctgctgaagcccctgctggaggacgagaaggccctgaaggtgggccagaacctgaagtacgaccggggcatcctggccaactacggcatcgagctgcggggcatcgccttcgacaccatgctggagtcctacatcctgaactccgtggccggccggcacgacatggactccctggccgagcggtggctgaagcacaagaccatcaccttcgaggagatcgccggcaagggcaagaaccagctgaccttcaaccagatcgccctggaggaggccggccggtacgccgccgaggacgccgacgtgaccctgcagctgcacctgaagatgtggcccgacctgcagaagcacaagggccccctgaacgtgttcgagaacatcgagatgcccctggtgcccgtgctgtcccggatcgagcggaacggcgtgaagatcgaccccaaggtgctgcacaaccactccgaggagctgaccctgcggctggccgagctggagaagaaggcccacgagatcgccggcgaggagttcaacctgtcctccaccaagcagctgcagaccatcctgttcgagaagcagggcatcaagcccctgaagaagacccccggcggcgccccctccacctccgaggaggtgctggaggagctggccctggactaccccctgcccaaggtgatcctggagtaccggggcctggccaagctgaagtccacctacaccgacaagctgcccctgatgatcaaccccaagaccggccgggtgcacacctcctaccaccaggccgtgaccgccaccggccggctgtcctccaccgaccccaacctgcagaacatccccgtgcggaacgaggagggccggcggatccggcaggccttcatcgcccccgaggactacgtgatcgtgtccgccgactactcccagatcgagctgcggatcatggcccacctgtcccgggacaagggcctgctgaccgccttcgccgagggcaaggacatccaccgggccaccgccgccgaggtgttcggcctgcccctggagaccgtgacctccgagcagcggcggtccgccaaggccatcaacttcggcctgatctacggcatgtccgccttcggcctggcccggcagctgaacatcccccggaaggaggcccagaagtacatggacctgtacttcgagcggtaccccggcgtgctggagtacatggagcggacccgggcccaggccaaggagcagggctacgtggagaccctggacggccggcggctgtacctgcccgacatcaagtcctccaacggcgcccggcgggccgccgccgagcgggccgccatcaacgcccccatgcagggcaccgccgccgacatcatcaagcgggccatgatcgccgtggacgcctggctgcaggccgagcagccccgggtgcggatgatcatgcaggtgcacgacgagctggtgttcgaggtgcacaaggacgacgtggacgccgtggccaagcagatccaccagctgatggagaactgcacccggctggacgtgcccctgctggtggaggtgggctccggcgagaactgggaccaggcccac

SEQ ID NO: 1099 - protein, 928 aa, synthetic construct [sequence omitted]

SEQ ID NO: 1100 - RNA, 7606 nt, synthetic construct
  misc_feature 1..7606: note = Synthetic
  source 1..7606: mol_type = other RNA
gggaagctcagaataaacgctcaactttggccggatctgccaccatgaagcggaccgccgacggctccgagttcgagtcccccaagaagaagcggaaggtggacaagaagtactccatcggcctggacatcggcaccaactccgtgggctgggccgtgatcaccgacgagtacaaggtgccctccaagaagttcaaggtgctgggcaacaccgaccggcactccatcaagaagaacctgatcggcgccctgctgttcgactccggcgagaccgccgaggccacccggctgaagcggaccgcccggcggcggtacacccggcggaagaaccggatctgctacctgcaggagatcttctccaacgagatggccaaggtggacgactccttcttccaccggctggaggagtccttcctggtggaggaggacaagaagcacgagcggcaccccatcttcggcaacatcgtggacgaggtggcctaccacgagaagtaccccaccatctaccacctgcggaagaagctggtggactccaccgacaaggccgacctgcggctgatctacctggccctggcccacatgatcaagttccggggccacttcctgatcgagggcgacctgaaccccgacaactccgacgtggacaagctgttcatccagctggtgcagacctacaaccagctgttcgaggagaaccccatcaacgcctccggcgtggacgccaaggccatcctgtccgcccggctgtccaagtcccggcggctggagaacctgatcgcccagctgcccggcgagaagaagaacggcctgttcggcaacctgatcgccctgtccctgggcctgacccccaacttcaagtccaacttcgacctggccgaggacgccaagctgcagctgtccaaggacacctacgacgacgacctggacaacctgctggcccagatcggcgaccagtacgccgacctgttcctggccgccaagaacctgtccgacgccatcctgctgtccgacatcctgcgggtgaacaccgagatcaccaaggcccccctgtccgcctccatgatcaagcggtacgacgagcaccaccaggacctgaccctgctgaaggccctggtgcggcagcagctgcccgagaagtacaaggagatcttcttcgaccagtccaagaacggctacgccggctacatcgacggcggcgcctcccaggaggagttctacaagttcatcaagcccatcctggagaagatggacggcaccgaggagctgctggtgaagctgaaccgggaggacctgctgcggaagcagcggaccttcgacaacggctccatcccccaccagatccacctgggcgagctgcacgccatcctgcggcggcaggaggacttctaccccttcctgaaggacaaccgggagaagatcgagaagatcctgaccttccggatcccctactacgtgggccccctggcccggggcaactcccggttcgcctggatgacccggaagtccgaggagaccatcaccccctggaacttcgaggaggtggtggacaagggcgcctccgcccagtccttcatcgagcggatgaccaacttcgacaagaacctgcccaacgagaaggtgctgcccaagcactccctgctgtacgagtacttcaccgtgtacaacgagctgaccaaggtgaagtacgtgaccgagggcatgcggaagcccgccttcctgtccggcgagcagaagaaggccatcgtggacctgctgttcaagaccaaccggaaggtgaccgtgaagcagctgaaggaggactacttcaagaagatcgagtgcttcgactccgtggagatctccggcgtggaggaccggttcaacgcctccctgggcacctaccacgacctgctgaagatcatcaaggacaaggacttcctggacaacgaggagaacgaggacatcctggaggacatcgtgctgaccctgaccctgttcgaggaccgggagatgatcgaggagcggctgaagacctacgcccacctgttcgacgacaaggtgatgaagcagctgaagcggcggcggtacaccggctggggccggctgtcccggaagctgatcaacggcatccgggacaagcagtccggcaagaccatcctggacttcctgaagtccgacggcttcgccaaccggaacttcatgcagctgatccacgacgactccctgaccttcaaggaggacatccagaaggcccaggtgtccggccagggcgactccctgcacgagcacatcgccaacctggccggctcccccgccatcaagaagggcatcctgcagaccgtgaaggtggtggacgagctggtgaaggtgatgggccggcacaagcccgagaacatcgtgatcgagatggcccgggagaaccagaccacccagaagggccagaagaactcccgggagcggatgaagcggatcgaggagggcatcaaggagctgggctcccagatcctgaaggagcaccccgtggagaacacccagctgcagaacgagaagctgtacctgtactacctgcagaacggccgggacatgtacgtggaccaggagctggacatcaaccggctgtccgactacgacgtggacgccatcgtgccccagtccttcctgaaggacgactccatcgacaacaaggtgctgacccggtccgacaagaaccggggcaagtccgacaacgtgccctccgaggaggtggtgaagaagatgaagaactactggcggcagctgctgaacgccaagctgatcacccagcggaagttcgacaacctgaccaaggccgagcggggcggcctgtccgagctggacaaggccggcttcatcaagcggcagctggtggagacccggcagatcaccaagcacgtggcccagatcctggactcccggatgaacaccaagtacgacgagaacgacaagctgatccgggaggtgaaggtgatcaccctgaagtccaagctggtgtccgacttccggaaggacttccagttctacaaggtgcgggagatcaacaactaccaccacgcccacgacgcctacctgaacgccgtggtgggcaccgccctgatcaagaagtaccccaagctggagtccgagttcgtgtacggcgactacaaggtgtacgacgtgcggaagatgatcgccaagtccgagcaggagatcggcaaggccaccgccaagtacttcttctactccaacatcatgaacttcttcaagaccgagatcaccctggccaacggcgagatccggaagcggcccctgatcgagaccaacggcgagaccggcgagatcgtgtgggacaagggccgggacttcgccaccgtgcggaaggtgctgtccatgccccaggtgaacatcgtgaagaagaccgaggtgcagaccggcggcttctccaaggagtccatcctgcccaagcggaactccgacaagctgatcgcccggaagaaggactgggaccccaagaagtacggcggcttcgactcccccaccgtggcctactccgtgctggtggtggccaaggtggagaagggcaagtccaagaagctgaagtccgtgaaggagctgctgggcatcaccatcatggagcggtcctccttcgagaagaaccccatcgacttcctggaggccaagggctacaaggaggtgaagaaggacctgatcatcaagctgcccaagtactccctgttcgagctggagaacggccggaagcggatgctggcctccgccggcgagctgcagaagggcaacgagctggccctgccctccaagtacgtgaacttcctgtacctggcctcccactacgagaagctgaagggctcccccgaggacaacgagcagaagcagctgttcgtggagcagcacaagcactacctggacgagatcatcgagcagatctccgagttctccaagcgggtgatcctggccgacgccaacctggacaaggtgctgtccgcctacaacaagcaccgggacaagcccatccgggagcaggccgagaacatcatccacctgttcaccctgaccaacctgggcgcccccgccgccttcaagtacttcgacaccaccatcgaccggaagcggtacacctccaccaaggaggtgctggacgccaccctgatccaccagtccatcaccggcctgtacgagacccggatcgacctgtcccagctgggcggcgactccggcggctcctccggcggctccaagcggaccgccgacggctccgagttcgagtcccccaagaagaagcggaaggtgtccggcggctcctccggcggctccatggtgcagatcccccagaaccccctgatcctggtggacggctcctcctacctgtaccgggcctaccacgccttcccccccctgaccaactccgccggcgagcccaccggcgccatgtacggcgtgctgaacatgctgcggtccctgatcatgcagtacaagcccacccacgccgccgtggtgttcgacgccaagggcaagaccttccgggacgagctgttcgagcactacaagtcccaccggccccccatgcccgacgacctgcgggcccagatcgagcccctgcacgccatggtgaaggccatgggcctgcccctgctggccgtgtccggcgtggaggccgacgacgtgatcggcaccctggcccgggaggccgagaaggccggccggcccgtgctgatctccaccggcgacaaggacatggcccagctggtgacccccaacatcaccctgatcaacaccatgaccaacaccatcctgggccccgaggaggtggtgaacaagtacggcgtgccccccgagctgatcatcgacttcctggccctgatgggcgactcctccgacaacatccccggcgtgcccggcgtgggcgagaagaccgcccaggccctgctgcagggcctgggcggcctggacaccctgtacgccgagcccgagaagatcgccggcctgtccttccggggcgccaagaccatggccgccaagctggagcagaacaaggaggtggcctacctgtcctaccagctggccaccatcaagaccgacgtggagctggagctgacctgcgagcagctggaggtgcagcagcccgccgccgaggagctgctgggcctgttcaagaagtacgagttcaagcggtggaccgccgacgtggaggccggcaagtggctgcaggccaagggcgccaagcccgccgccaagccccaggagacctccgtggccgacgaggcccccgaggtgaccgccaccgtgatctcctacgacaactacgtgaccatcctggacgaggagaccctgaaggcctggatcgccaagctggagaaggcccccgtgttcgccttcgacaccgagaccgactccctggacaacatctccgccaacctggtgggcctgtccttcgccatcgagcccggcgtggccgcctacatccccgtggcccacgactacctggacgcccccgaccagatctcccgggagcgggccctggagctgctgaagcccctgctggaggacgagaaggccctgaaggtgggccagaacctgaagtacgaccggggcatcctggccaactacggcatcgagctgcggggcatcgccttcgacaccatgctggagtcctacatcctgaactccgtggccggccggcacgacatggactccctggccgagcggtggctgaagcacaagaccatcaccttcgaggagatcgccggcaagggcaagaaccagctgaccttcaaccagatcgccctggaggaggccggccggtacgccgccgaggacgccgacgtgaccctgcagctgcacctgaagatgtggcccgacctgcagaagcacaagggccccctgaacgtgttcgagaacatcgagatgcccctggtgcccgtgctgtcccggatcgagcggaacggcgtgaagatcgaccccaaggtgctgcacaaccactccgaggagctgaccctgcggctggccgagctggagaagaaggcccacgagatcgccggcgaggagttcaacctgtcctccaccaagcagctgcagaccatcctgttcgagaagcagggcatcaagcccctgaagaagacccccggcggcgccccctccacctccgaggaggtgctggaggagctggccctggactaccccctgcccaaggtgatcctggagtaccggggcctggccaagctgaagtccacctacaccgacaagctgcccctgatgatcaaccccaagaccggccgggtgcacacctcctaccaccaggccgtgaccgccaccggccggctgtcctccaccgaccccaacctgcagaacatccccgtgcggaacgaggagggccggcggatccggcaggccttcatcgcccccgaggactacgtgatcgtgtccgccgactactcccagatcgagctgcggatcatggcccacctgtcccgggacaagggcctgctgaccgccttcgccgagggcaaggacatccaccgggccaccgccgccgaggtgttcggcctgcccctggagaccgtgacctccgagcagcggcggtccgccaaggccatcaacttcggcctgatctacggcatgtccgccttcggcctggcccggcagctgaacatcccccggaaggaggcccagaagtacatggacctgtacttcgagcggtaccccggcgtgctggagtacatggagcggacccgggcccaggccaaggagcagggctacgtggagaccctggacggccggcggctgtacctgcccgacatcaagtcctccaacggcgcccggcgggccgccgccgagcgggccgccatcaacgcccccatgcagggcaccgccgccgacatcatcaagcgggccatgatcgccgtggacgcctggctgcaggccgagcagccccgggtgcggatgatcatgcaggtgcacgacgagctggtgttcgaggtgcacaaggacgacgtggacgccgtggccaagcagatccaccagctgatggagaactgcacccggctggacgtgcccctgctggtggaggtgggctccggcgagaactgggaccaggcccactagctagcaccagcctcaagaacacccgaatggagtctctaagctacataataccaacttacactttacaaaatgttgtcccccaaaatgtagccattcgtatctgctcctaataaaaagaaagtttcttcacattctctcgagaaaaaaaaaaaatggaaaaaaaaaaaacggaaaaaaaaaaaaggtaaaaaaaaaaaatataaaaaaaaaaaacataaaaaaaaaaaacgaaaaaaaaaaaacgtaaaaaaaaaaaactcaaaaaaaaaaaagataaaaaaaaaaaacctaaaaaaaaaaaatgtaaaaaaaaaaaagggaaaaaaaaaaaacgcaaaaaaaaaaaacacaaaaaaaaaaaatgcaaaaaaaaaaaatcgaaaaaaaaaaaatctaaaaaaaaaaaacgaaaaaaaaaaaacccaaaaaaaaaaaagacaaaaaaaaaaaatagaaaaaaaaaaagttaaaaaaaaaaaactgaaaaaaaaaaaatttaaaaaaaaaaaatctag

SEQ ID NO: 1101 - RNA, 7047 nt, synthetic construct
  misc_feature 1..7047: note = Synthetic
  source 1..7047: mol_type = other RNA
atgaagcggaccgccgacggctccgagttcgagtcccccaagaagaagcggaaggtggacaagaagtactccatcggcctggacatcggcaccaactccgtgggctgggccgtgatcaccgacgagtacaaggtgccctccaagaagttcaaggtgctgggcaacaccgaccggcactccatcaagaagaacctgatcggcgccctgctgttcgactccggcgagaccgccgaggccacccggctgaagcggaccgcccggcggcggtacacccggcggaagaaccggatctgctacctgcaggagatcttctccaacgagatggccaaggtggacgactccttcttccaccggctggaggagtccttcctggtggaggaggacaagaagcacgagcggcaccccatcttcggcaacatcgtggacgaggtggcctaccacgagaagtaccccaccatctaccacctgcggaagaagctggtggactccaccgacaaggccgacctgcggctgatctacctggccctggcccacatgatcaagttccggggccacttcctgatcgagggcgacctgaaccccgacaactccgacgtggacaagctgttcatccagctggtgcagacctacaaccagctgttcgaggagaaccccatcaacgcctccggcgtggacgccaaggccatcctgtccgcccggctgtccaagtcccggcggctggagaacctgatcgcccagctgcccggcgagaagaagaacggcctgttcggcaacctgatcgccctgtccctgggcctgacccccaacttcaagtccaacttcgacctggccgaggacgccaagctgcagctgtccaaggacacctacgacgacgacctggacaacctgctggcccagatcggcgaccagtacgccgacctgttcctggccgccaagaacctgtccgacgccatcctgctgtccgacatcctgcgggtgaacaccgagatcaccaaggcccccctgtccgcctccatgatcaagcggtacgacgagcaccaccaggacctgaccctgctgaaggccctggtgcggcagcagctgcccgagaagtacaaggagatcttcttcgaccagtccaagaacggctacgccggctacatcgacggcggcgcctcccaggaggagttctacaagttcatcaagcccatcctggagaagatggacggcaccgaggagctgctggtgaagctgaaccgggaggacctgctgcggaagcagcggaccttcgacaacggctccatcccccaccagatccacctgggcgagctgcacgccatcctgcggcggcaggaggacttctaccccttcctgaaggacaaccgggagaagatcgagaagatcctgaccttccggatcccctactacgtgggccccctggcccggggcaactcccggttcgcctggatgacccggaagtccgaggagaccatcaccccctggaacttcgaggaggtggtggacaagggcgcctccgcccagtccttcatcgagcggatgaccaacttcgacaagaacctgcccaacgagaaggtgctgcccaagcactccctgctgtacgagtacttcaccgtgtacaacgagctgaccaaggtgaagtacgtgaccgagggcatgcggaagcccgccttcctgtccggcgagcagaagaaggccatcgtggacctgctgttcaagaccaaccggaaggtgaccgtgaagcagctgaaggaggactacttcaagaagatcgagtgcttcgactccgtggagatctccggcgtggaggaccggttcaacgcctccctgggcacctaccacgacctgctgaagatcatcaaggacaaggacttcctggacaacgaggagaacgaggacatcctggaggacatcgtgctgaccctgaccctgttcgaggaccgggagatgatcgaggagcggctgaagacctacgcccacctgttcgacgacaaggtgatgaagcagctgaagcggcggcggtacaccggctggggccggctgtcccggaagctgatcaacggcatccgggacaagcagtccggcaagaccatcctggacttcctgaagtccgacggcttcgccaaccggaacttcatgcagctgatccacgacgactccctgaccttcaaggaggacatccagaaggcccaggtgtccggccagggcgactccctgcacgagcacatcgccaacctggccggctcccccgccatcaagaagggcatcctgcagaccgtgaaggtggtggacgagctggtgaaggtgatgggccggcacaagcccgagaacatcgtgatcgagatggcccgggagaaccagaccacccagaagggccagaagaactcccgggagcggatgaagcggatcgaggagggcatcaaggagctgggctcccagatcctgaaggagcaccccgtggagaacacccagctgcagaacgagaagctgtacctgtactacctgcagaacggccgggacatgtacgtggaccaggagctggacatcaaccggctgtccgactacgacgtggacgccatcgtgccccagtccttcctgaaggacgactccatcgacaacaaggtgctgacccggtccgacaagaaccggggcaagtccgacaacgtgccctccgaggaggtggtgaagaagatgaagaactactggcggcagctgctgaacgccaagctgatcacccagcggaagttcgacaacctgaccaaggccgagcggggcggcctgtccgagctggacaaggccggcttcatcaagcggcagctggtggagacccggcagatcaccaagcacgtggcccagatcctggactcccggatgaacaccaagtacgacgagaacgacaagctgatccgggaggtgaaggtgatcaccctgaagtccaagctggtgtccgacttccggaaggacttccagttctacaaggtgcgggagatcaacaactaccaccacgcccacgacgcctacctgaacgccgtggtgggcaccgccctgatcaagaagtaccccaagctggagtccgagttcgtgtacggcgactacaaggtgtacgacgtgcggaagatgatcgccaagtccgagcaggagatcggcaaggccaccgccaagtacttcttctactccaacatcatgaacttcttcaagaccgagatcaccctggccaacggcgagatccggaagcggcccctgatcgagaccaacggcgagaccggcgagatcgtgtgggacaagggccgggacttcgccaccgtgcggaaggtgctgtccatgccccaggtgaacatcgtgaagaagaccgaggtgcagaccggcggcttctccaaggagtccatcctgcccaagcggaactccgacaagctgatcgcccggaagaaggactgggaccccaagaagtacggcggcttcgactcccccaccgtggcctactccgtgctggtggtggccaaggtggagaagggcaagtccaagaagctgaagtccgtgaaggagctgctgggcatcaccatcatggagcggtcctccttcgagaagaaccccatcgacttcctggaggccaagggctacaaggaggtgaagaaggacctgatcatcaagctgcccaagtactccctgttcgagctggagaacggccggaagcggatgctggcctccgccggcgagctgcagaagggcaacgagctggccctgccctccaagtacgtgaacttcctgtacctggcctcccactacgagaagctgaagggctcccccgaggacaacgagcagaagcagctgttcgtggagcagcacaagcactacctggacgagatcatcgagcagatctccgagttctccaagcgggtgatcctggccgacgccaacctggacaaggtgctgtccgcctacaacaagcaccgggacaagcccatccgggagcaggccgagaacatcatccacctgttcaccctgaccaacctgggcgcccccgccgccttcaagtacttcgacaccaccatcgaccggaagcggtacacctccaccaaggaggtgctggacgccaccctgatccaccagtccatcaccggcctgtacgagacccggatcgacctgtcccagctgggcggcgactccggcggctcctccggcggctccaagcggaccgccgacggctccgagttcgagtcccccaagaagaagcggaaggtgtccggcggctcctccggcggctccatggtgcagatcccccagaaccccctgatcctggtggacggctcctcctacctgtaccgggcctaccacgccttcccccccctgaccaactccgccggcgagcccaccggcgccatgtacggcgtgctgaacatgctgcggtccctgatcatgcagtacaagcccacccacgccgccgtggtgttcgacgccaagggcaagaccttccgggacgagctgttcgagcactacaagtcccaccggccccccatgcccgacgacctgcgggcccagatcgagcccctgcacgccatggtgaaggccatgggcctgcccctgctggccgtgtccggcgtggaggccgacgacgtgatcggcaccctggcccgggaggccgagaaggccggccggcccgtgctgatctccaccggcgacaaggacatggcccagctggtgacccccaacatcaccctgatcaacaccatgaccaacaccatcctgggccccgaggaggtggtgaacaagtacggcgtgccccccgagctgatcatcgacttcctggccctgatgggcgactcctccgacaacatccccggcgtgcccggcgtgggcgagaagaccgcccaggccctgctgcagggcctgggcggcctggacaccctgtacgccgagcccgagaagatcgccggcctgtccttccggggcgccaagaccatggccgccaagctggagcagaacaaggaggtggcctacctgtcctaccagctggccaccatcaagaccgacgtggagctggagctgacctgcgagcagctggaggtgcagcagcccgccgccgaggagctgctgggcctgttcaagaagtacgagttcaagcggtggaccgccgacgtggaggccggcaagtggctgcaggccaagggcgccaagcccgccgccaagccccaggagacctccgtggccgacgaggcccccgaggtgaccgccaccgtgatctcctacgacaactacgtgaccatcctggacgaggagaccctgaaggcctggatcgccaagctggagaaggcccccgtgttcgccttcgacaccgagaccgactccctggacaacatctccgccaacctggtgggcctgtccttcgccatcgagcccggcgtggccgcctacatccccgtggcccacgactacctggacgcccccgaccagatctcccgggagcgggccctggagctgctgaagcccctgctggaggacgagaaggccctgaaggtgggccagaacctgaagtacgaccggggcatcctggccaactacggcatcgagctgcggggcatcgccttcgacaccatgctggagtcctacatcctgaactccgtggccggccggcacgacatggactccctggccgagcggtggctgaagcacaagaccatcaccttcgaggagatcgccggcaagggcaagaaccagctgaccttcaaccagatcgccctggaggaggccggccggtacgccgccgaggacgccgacgtgaccctgcagctgcacctgaagatgtggcccgacctgcagaagcacaagggccccctgaacgtgttcgagaacatcgagatgcccctggtgcccgtgctgtcccggatcgagcggaacggcgtgaagatcgaccccaaggtgctgcacaaccactccgaggagctgaccctgcggctggccgagctggagaagaaggcccacgagatcgccggcgaggagttcaacctgtcctccaccaagcagctgcagaccatcctgttcgagaagcagggcatcaagcccctgaagaagacccccggcggcgccccctccacctccgaggaggtgctggaggagctggccctggactaccccctgcccaaggtgatcctggagtaccggggcctggccaagctgaagtccacctacaccgacaagctgcccctgatgatcaaccccaagaccggccgggtgcacacctcctaccaccaggccgtgaccgccaccggccggctgtcctccaccgaccccaacctgcagaacatccccgtgcggaacgaggagggccggcggatccggcaggccttcatcgcccccgaggactacgtgatcgtgtccgccgactactcccagatcgagctgcggatcatggcccacctgtcccgggacaagggcctgctgaccgccttcgccgagggcaaggacatccaccgggccaccgccgccgaggtgttcggcctgcccctggagaccgtgacctccgagcagcggcggtccgccaaggccatcaacttcggcctgatctacggcatgtccgccttcggcctggcccggcagctgaacatcccccggaaggaggcccagaagtacatggacctgtacttcgagcggtaccccggcgtgctggagtacatggagcggacccgggcccaggccaaggagcagggctacgtggagaccctggacggccggcggctgtacctgcccgacatcaagtcctccaacggcgcccggcgggccgccgccgagcgggccgccatcaacgcccccatgcagggcaccgccgccgacatcatcaagcgggccatgatcgccgtggacgcctggctgcaggccgagcagccccgggtgcggatgatcatgcaggtgcacgacgagctggtgttcgaggtgcacaaggacgacgtggacgccgtggccaagcagatccaccagctgatggagaactgcacccggctggacgtgcccctgctggtggaggtgggctccggcgagaactgggaccaggcccactag

SEQ ID NO: 1102 - protein, 2348 aa, synthetic construct
  REGION 1..2348: note = Synthetic
MKRTADGSEFESPKKKRKVDKKYSIGLDIGTNSVGWAVITDEYKVPSKKFKVLGNTDRHSIKKNLIGALLFDSGETAEATRLKRTARRRYTRRKNRICYLQEIFSNEMAKVDDSFFHRLEESFLVEEDKKHERHPIFGNIVDEVAYHEKYPTIYHLRKKLVDSTDKADLRLIYLALAHMIKFRGHFLIEGDLNPDNSDVDKLFIQLVQTYNQLFEENPINASGVDAKAILSARLSKSRRLENLIAQLPGEKKNGLFGNLIALSLGLTPNFKSNFDLAEDAKLQLSKDTYDDDLDNLLAQIGDQYADLFLAAKNLSDAILLSDILRVNTEITKAPLSASMIKRYDEHHQDLTLLKALVRQQLPEKYKEIFFDQSKNGYAGYIDGGASQEEFYKFIKPILEKMDGTEELLVKLNREDLLRKQRTFDNGSIPHQIHLGELHAILRRQEDFYPFLKDNREKIEKILTFRIPYYVGPLARGNSRFAWMTRKSEETITPWNFEEVVDKGASAQSFIERMTNFDKNLPNEKVLPKHSLLYEYFTVYNELTKVKYVTEGMRKPAFLSGEQKKAIVDLLFKTNRKVTVKQLKEDYFKKIECFDSVEISGVEDRFNASLGTYHDLLKIIKDKDFLDNEENEDILEDIVLTLTLFEDREMIEERLKTYAHLFDDKVMKQLKRRRYTGWGRLSRKLINGIRDKQSGKTILDFLKSDGFANRNFMQLIHDDSLTFKEDIQKAQVSGQGDSLHEHIANLAGSPAIKKGILQTVKVVDELVKVMGRHKPENIVIEMARENQTTQKGQKNSRERMKRIEEGIKELGSQILKEHPVENTQLQNEKLYLYYLQNGRDMYVDQELDINRLSDYDVDAIVPQSFLKDDSIDNKVLTRSDKNRGKSDNVPSEEVVKKMKNYWRQLLNAKLITQRKFDNLTKAERGGLSELDKAGFIKRQLVETRQITKHVAQILDSRMNTKYDENDKLIREVKVITLKSKLVSDFRKDFQFYKVREINNYHHAHDAYLNAVVGTALIKKYPKLESEFVYGDYKVYDVRKMIAKSEQEIGKATAKYFFYSNIMNFFKTEITLANGEIRKRPLIETNGETGEIVWDKGRDFATVRKVLSMPQVNIVKKTEVQTGGFSKESILPKRNSDKLIARKKDWDPKKYGGFDSPTVAYSVLVVAKVEKGKSKKLKSVKELLGITIMERSSFEKNPIDFLEAKGYKEVKKDLIIKLPKYSLFELENGRKRMLASAGELQKGNELALPSKYVNFLYLASHYEKLKGSPEDNEQKQLFVEQHKHYLDEIIEQISEFSKRVILADANLDKVLSAYNKHRDKPIREQAENIIHLFTLTNLGAPAAFKYFDTTIDRKRYTSTKEVLDATLIHQSITGLYETRIDLSQLGGDSGGSSGGSKRTADGSEFESPKKKRKVSGGSSGGSMVQIPQNPLILVDGSSYLYRAYHAFPPLTNSAGEPTGAMYGVLNMLRSLIMQYKPTHAAVVFDAKGKTFRDELFEHYKSHRPPMPDDLRAQIEPLHAMVKAMGLPLLAVSGVEADDVIGTLAREAEKAGRPVLISTGDKDMAQLVTPNITLINTMTNTILGPEEVVNKYGVPPELIIDFLALMGDSSDNIPGVPGVGEKTAQALLQGLGGLDTLYAEPEKIAGLSFRGAKTMAAKLEQNKEVAYLSYQLATIKTDVELELTCEQLEVQQPAAEELLGLFKKYEFKRWTADVEAGKWLQAKGAKPAAKPQETSVADEAPEVTATVISYDNYVTILDEETLKAWIAKLEKAPVFAFDTETDSLDNISANLVGLSFAIEPGVAAYIPVAHDYLDAPDQISRERALELLKPLLEDEKALKVGQNLKYDRGILANYGIELRGIAFDTMLESYILNSVAGRHDMDSLAERWLKHKTITFEEIAGKGKNQLTFNQIALEEAGRYAAEDADVTLQLHLKMWPDLQKHKGPLNVFENIEMPLVPVLSRIERNGVKIDPKVLHNHSEELTLRLAELEKKAHEIAGEEFNLSSTKQLQTILFEKQGIKPLKKTPGGAPSTSEEVLEELALDYPLPKVILEYRGLAKLKSTYTDKLPLMINPKTGRVHTSYHQAVTATGRLSSTDPNLQNIPVRNEEGRRIRQAFIAPEDYVIVSADYSQIELRIMAHLSRDKGLLTAFAEGKDIHRATAAEVFGLPLETVTSEQRRSAKAINFGLIYGMSAFGLARQLNIPRKEAQKYMDLYFERYPGVLEYMERTRAQAKEQGYVETLDGRRLYLPDIKSSNGARRAAAERAAINAPMQGTAADIIKRAMIAVDAWLQAEQPRVRMIMQVHDELVFEVHKDDVDAVAKQIHQLMENCTRLDVPLLVEVGSGENWDQAH

SEQ ID NO: 1103 - DNA, 1815 bp, synthetic construct
  misc_feature 1..1815: note = Synthetic
  source 1..1815: mol_type = other DNA
gtgatctcctacgacaactacgtgaccatcctggacgaggagaccctgaaggcctggatcgccaagctggagaaggcccccgtgttcgccttcgccaccgccaccgactccctggacaacatctccgccaacctggtgggcctgtccttcgccatcgagcccggcgtggccgcctacatccccgtggcccacgactacctggacgcccccgaccagatctcccgggagcgggccctggagctgctgaagcccctgctggaggacgagaaggccctgaaggtgggccagaacctgaagtacgaccggggcatcctggccaactacggcatcgagctgcggggcatcgccttcgacaccatgctggagtcctacatcctgaactccgtggccggccggcacgacatggactccctggccgagcggtggctgaagcacaagaccatcaccttcgaggagatcgccggcaagggcaagaaccagctgaccttcaaccagatcgccctggaggaggccggccggtacgccgccgaggacgccgacgtgaccctgcagctgcacctgaagatgtggcccgacctgcagaagcacaagggccccctgaacgtgttcgagaacatcgagatgcccctggtgcccgtgctgtcccggatcgagcggaacggcgtgaagatcgaccccaaggtgctgcacaaccactccgaggagctgaccctgcggctggccgagctggagaagaaggcccacgagatcgccggcgaggagttcaacctgtcctccaccaagcagctgcagaccatcctgttcgagaagcagggcatcaagcccctgaagaagacccccggcggcgccccctccacctccgaggaggtgctggaggagctggccctggactaccccctgcccaaggtgatcctggagtaccggggcctggccaagctgaagtccacctacaccgacaagctgcccctgatgatcaaccccaagaccggccgggtgcacacctcctaccaccaggccgtgaccgccaccggccggctgtcctccaccgaccccaacctgcagaacatccccgtgcggaacgaggagggccggcggatccggcaggccttcatcgcccccgaggactacgtgatcgtgtccgccgactactcccagatcgagctgcggatcatggcccacctgtcccgggacaagggcctgctgaccgccttcgccgagggcaaggacatccaccgggccaccgccgccgaggtgttcggcctgcccctggagaccgtgacctccgagcagcggcggtccgccaaggccatcaacttcggcctgatctacggcatgtccgccttcggcctggcccggcagctgaacatcccccggaaggaggcccagaagtacatggacctgtacttcgagcggtaccccggcgtgctggagtacatggagcggacccgggcccaggccaaggagcagggctacgtggagaccctggacggccggcggctgtacctgcccgacatcaagtcctccaacggcgcccggcgggccgccgccgagcgggccgccatcaacgcccccatgcagggcaccgccgccgacatcatcaagcgggccatgatcgccgtggacgcctggctgcaggccgagcagccccgggtgcggatgatcatgcaggtgcacgacgagctggtgttcgaggtgcacaaggacgacgtggacgccgtggccaagcagatccaccagctgatggagaactgcacccggctggacgtgcccctgctggtggaggtgggctccggcgagaactgggaccaggcccac

SEQ ID NO: 1104 - protein, 605 aa, synthetic construct
  REGION 1..605: note = Synthetic
VISYDNYVTILDEETLKAWIAKLEKAPVFAFATATDSLDNISANLVGLSFAIEPGVAAYIPVAHDYLDAPDQISRERALELLKPLLEDEKALKVGQNLKYDRGILANYGIELRGIAFDTMLESYILNSVAGRHDMDSLAERWLKHKTITFEEIAGKGKNQLTFNQIALEEAGRYAAEDADVTLQLHLKMWPDLQKHKGPLNVFENIEMPLVPVLSRIERNGVKIDPKVLHNHSEELTLRLAELEKKAHEIAGEEFNLSSTKQLQTILFEKQGIKPLKKTPGGAPSTSEEVLEELALDYPLPKVILEYRGLAKLKSTYTDKLPLMINPKTGRVHTSYHQAVTATGRLSSTDPNLQNIPVRNEEGRRIRQAFIAPEDYVIVSADYSQIELRIMAHLSRDKGLLTAFAEGKDIHRATAAEVFGLPLETVTSEQRRSAKAINFGLIYGMSAFGLARQLNIPRKEAQKYMDLYFERYPGVLEYMERTRAQAKEQGYVETLDGRRLYLPDIKSSNGARRAAAERAAINAPMQGTAADIIKRAMIAVDAWLQAEQPRVRMIMQVHDELVFEVHKDDVDAVAKQIHQLMENCTRLDVPLLVEVGSGENWDQAH

SEQ ID NO: 1105 - RNA, 2506 nt, synthetic construct
  misc_feature 1..2506: note = Synthetic
  source 1..2506: mol_type = other RNA
gggaagctcagaataaacgctcaactttggccggatctgccaccatggtgatctcctacgacaactacgtgaccatcctggacgaggagaccctgaaggcctggatcgccaagctggagaaggcccccgtgttcgccttcgccaccgccaccgactccctggacaacatctccgccaacctggtgggcctgtccttcgccatcgagcccggcgtggccgcctacatccccgtggcccacgactacctggacgcccccgaccagatctcccgggagcgggccctggagctgctgaagcccctgctggaggacgagaaggccctgaaggtgggccagaacctgaagtacgaccggggcatcctggccaactacggcatcgagctgcggggcatcgccttcgacaccatgctggagtcctacatcctgaactccgtggccggccggcacgacatggactccctggccgagcggtggctgaagcacaagaccatcaccttcgaggagatcgccggcaagggcaagaaccagctgaccttcaaccagatcgccctggaggaggccggccggtacgccgccgaggacgccgacgtgaccctgcagctgcacctgaagatgtggcccgacctgcagaagcacaagggccccctgaacgtgttcgagaacatcgagatgcccctggtgcccgtgctgtcccggatcgagcggaacggcgtgaagatcgaccccaaggtgctgcacaaccactccgaggagctgaccctgcggctggccgagctggagaagaaggcccacgagatcgccggcgaggagttcaacctgtcctccaccaagcagctgcagaccatcctgttcgagaagcagggcatcaagcccctgaagaagacccccggcggcgccccctccacctccgaggaggtgctggaggagctggccctggactaccccctgcccaaggtgatcctggagtaccggggcctggccaagctgaagtccacctacaccgacaagctgcccctgatgatcaaccccaagaccggccgggtgcacacctcctaccaccaggccgtgaccgccaccggccggctgtcctccaccgaccccaacctgcagaacatccccgtgcggaacgaggagggccggcggatccggcaggccttcatcgcccccgaggactacgtgatcgtgtccgccgactactcccagatcgagctgcggatcatggcccacctgtcccgggacaagggcctgctgaccgccttcgccgagggcaaggacatccaccgggccaccgccgccgaggtgttcggcctgcccctggagaccgtgacctccgagcagcggcggtccgccaaggccatcaacttcggcctgatctacggcatgtccgccttcggcctggcccggcagctgaacatcccccggaaggaggcccagaagtacatggacctgtacttcgagcggtaccccggcgtgctggagtacatggagcggacccgggcccaggccaaggagcagggctacgtggagaccctggacggccggcggctgtacctgcccgacatcaagtcctccaacggcgcccggcgggccgccgccgagcgggccgccatcaacgcccccatgcagggcaccgccgccgacatcatcaagcgggccatgatcgccgtggacgcctggctgcaggccgagcagccccgggtgcggatgatcatgcaggtgcacgacgagctggtgttcgaggtgcacaaggacgacgtggacgccgtggccaagcagatccaccagctgatggagaactgcacccggctggacgtgcccctgctggtggaggtgggctccggcgagaactgggaccaggcccacggcggcggctccggcaagcggaccgccgacggctccggcggcggctcccccaagaagaagcggaaggtgtccgagtccgccacccccgagtccgtgtccggctggcggctgttcaagaagatctcctagctagcaccagcctcaagaacacccgaatggagtctctaagctacataataccaacttacactttacaaaatgttgtcccccaaaatgtagccattcgtatctgctcctaataaaaagaaagtttcttcacattctctcgagaaaaaaaaaaaatggaaaaaaaaaaaacggaaaaaaaaaaaaggtaaaaaaaaaaaatataaaaaaaaaaaacataaaaaaaaaaaacgaaaaaaaaaaaacgtaaaaaaaaaaaactcaaaaaaaaaaaagataaaaaaaaaaaacctaaaaaaaaaaaatgtaaaaaaaaaaaagggaaaaaaaaaaaacgcaaaaaaaaaaaacacaaaaaaaaaaaatgcaaaaaaaaaaaatcgaaaaaaaaaaaatctaaaaaaaaaaaacgaaaaaaaaaaaacccaaaaaaaaaaaagacaaaaaaaaaaaatagaaaaaaaaaaagttaaaaaaaaaaaactgaaaaaaaaaaaatttaaaaaaaaaaaatctag

SEQ ID NO: 1106 - RNA, 1947 nt, synthetic construct
  misc_feature 1..1947: note = Synthetic
  source 1..1947: mol_type = other RNA
atggtgatctcctacgacaactacgtgaccatcctggacgaggagaccctgaaggcctggatcgccaagctggagaaggcccccgtgttcgccttcgccaccgccaccgactccctggacaacatctccgccaacctggtgggcctgtccttcgccatcgagcccggcgtggccgcctacatccccgtggcccacgactacctggacgcccccgaccagatctcccgggagcgggccctggagctgctgaagcccctgctggaggacgagaaggccctgaaggtgggccagaacctgaagtacgaccggggcatcctggccaactacggcatcgagctgcggggcatcgccttcgacaccatgctggagtcctacatcctgaactccgtggccggccggcacgacatggactccctggccgagcggtggctgaagcacaagaccatcaccttcgaggagatcgccggcaagggcaagaaccagctgaccttcaaccagatcgccctggaggaggccggccggtacgccgccgaggacgccgacgtgaccctgcagctgcacctgaagatgtggcccgacctgcagaagcacaagggccccctgaacgtgttcgagaacatcgagatgcccctggtgcccgtgctgtcccggatcgagcggaacggcgtgaagatcgaccccaaggtgctgcacaaccactccgaggagctgaccctgcggctggccgagctggagaagaaggcccacgagatcgccggcgaggagttcaacctgtcctccaccaagcagctgcagaccatcctgttcgagaagcagggcatcaagcccctgaagaagacccccggcggcgccccctccacctccgaggaggtgctggaggagctggccctggactaccccctgcccaaggtgatcctggagtaccggggcctggccaagctgaagtccacctacaccgacaagctgcccctgatgatcaaccccaagaccggccgggtgcacacctcctaccaccaggccgtgaccgccaccggccggctgtcctccaccgaccccaacctgcagaacatccccgtgcggaacgaggagggccggcggatccggcaggccttcatcgcccccgaggactacgtgatcgtgtccgccgactactcccagatcgagctgcggatcatggcccacctgtcccgggacaagggcctgctgaccgccttcgccgagggcaaggacatccaccgggccaccgccgccgaggtgttcggcctgcccctggagaccgtgacctccgagcagcggcggtccgccaaggccatcaacttcggcctgatctacggcatgtccgccttcggcctggcccggcagctgaacatcccccggaaggaggcccagaagtacatggacctgtacttcgagcggtaccccggcgtgctggagtacatggagcggacccgggcccaggccaaggagcagggctacgtggagaccctggacggccggcggctgtacctgcccgacatcaagtcctccaacggcgcccggcgggccgccgccgagcgggccgccatcaacgcccccatgcagggcaccgccgccgacatcatcaagcgggccatgatcgccgtggacgcctggctgcaggccgagcagccccgggtgcggatgatcatgcaggtgcacgacgagctggtgttcgaggtgcacaaggacgacgtggacgccgtggccaagcagatccaccagctgatggagaactgcacccggctggacgtgcccctgctggtggaggtgggctccggcgagaactgggaccaggcccacggcggcggctccggcaagcggaccgccgacggctccggcggcggctcccccaagaagaagcggaaggtgtccgagtccgccacccccgagtccgtgtccggctggcggctgttcaagaagatctcctag

SEQ ID NO: 1107 - protein, 648 aa, synthetic construct
  REGION 1..648: note = Synthetic
MVISYDNYVTILDEETLKAWIAKLEKAPVFAFATATDSLDNISANLVGLSFAIEPGVAAYIPVAHDYLDAPDQISRERALELLKPLLEDEKALKVGQNLKYDRGILANYGIELRGIAFDTMLESYILNSVAGRHDMDSLAERWLKHKTITFEEIAGKGKNQLTFNQIALEEAGRYAAEDADVTLQLHLKMWPDLQKHKGPLNVFENIEMPLVPVLSRIERNGVKIDPKVLHNHSEELTLRLAELEKKAHEIAGEEFNLSSTKQLQTILFEKQGIKPLKKTPGGAPSTSEEVLEELALDYPLPKVILEYRGLAKLKSTYTDKLPLMINPKTGRVHTSYHQAVTATGRLSSTDPNLQNIPVRNEEGRRIRQAFIAPEDYVIVSADYSQIELRIMAHLSRDKGLLTAFAEGKDIHRATAAEVFGLPLETVTSEQRRSAKAINFGLIYGMSAFGLARQLNIPRKEAQKYMDLYFERYPGVLEYMERTRAQAKEQGYVETLDGRRLYLPDIKSSNGARRAAAERAAINAPMQGTAADIIKRAMIAVDAWLQAEQPRVRMIMQVHDELVFEVHKDDVDAVAKQIHQLMENCTRLDVPLLVEVGSGENWDQAHGGGSGKRTADGSGGGSPKKKRKVSESATPESVSGWRLFKKIS

SEQ ID NO: 1108 - RNA, 1887 nt, synthetic construct
  misc_feature 1..1887: note = Synthetic
  source 1..1887: mol_type = other RNA
atggtgatctcctacgacaactacgtgaccatcctggacgaggagaccctgaaggcctggatcgccaagctggagaaggcccccgtgttcgccttcgccaccgccaccgactccctggacaacatctccgccaacctggtgggcctgtccttcgccatcgagcccggcgtggccgcctacatccccgtggcccacgactacctggacgcccccgaccagatctcccgggagcgggccctggagctgctgaagcccctgctggaggacgagaaggccctgaaggtgggccagaacctgaagtacgaccggggcatcctggccaactacggcatcgagctgcggggcatcgccttcgacaccatgctggagtcctacatcctgaactccgtggccggccggcacgacatggactccctggccgagcggtggctgaagcacaagaccatcaccttcgaggagatcgccggcaagggcaagaaccagctgaccttcaaccagatcgccctggaggaggccggccggtacgccgccgaggacgccgacgtgaccctgcagctgcacctgaagatgtggcccgacctgcagaagcacaagggccccctgaacgtgttcgagaacatcgagatgcccctggtgcccgtgctgtcccggatcgagcggaacggcgtgaagatcgaccccaaggtgctgcacaaccactccgaggagctgaccctgcggctggccgagctggagaagaaggcccacgagatcgccggcgaggagttcaacctgtcctccaccaagcagctgcagaccatcctgttcgagaagcagggcatcaagcccctgaagaagacccccggcggcgccccctccacctccgaggaggtgctggaggagctggccctggactaccccctgcccaaggtgatcctggagtaccggggcctggccaagctgaagtccacctacaccgacaagctgcccctgatgatcaaccccaagaccggccgggtgcacacctcctaccaccaggccgtgaccgccaccggccggctgtcctccaccgaccccaacctgcagaacatccccgtgcggaacgaggagggccggcggatccggcaggccttcatcgcccccgaggactacgtgatcgtgtccgccgactactcccagatcgagctgcggatcatggcccacctgtcccgggacaagggcctgctgaccgccttcgccgagggcaaggacatccaccgggccaccgccgccgaggtgttcggcctgcccctggagaccgtgacctccgagcagcggcggtccgccaaggccatcaacttcggcctgatctacggcatgtccgccttcggcctggcccggcagctgaacatcccccggaaggaggcccagaagtacatggacctgtacttcgagcggtaccccggcgtgctggagtacatggagcggacccgggcccaggccaaggagcagggctacgtggagaccctggacggccggcggctgtacctgcccgacatcaagtcctccaacggcgcccggcgggccgccgccgagcgggccgccatcaacgcccccatgcagggcaccgccgccgacatcatcaagcgggccatgatcgccgtggacgcctggctgcaggccgagcagccccgggtgcggatgatcatgcaggtgcacgacgagctggtgttcgaggtgcacaaggacgacgtggacgccgtggccaagcagatccaccagctgatggagaactgcacccggctggacgtgcccctgctggtggaggtgggctccggcgagaactgggaccaggcccacggcggcggctccggcaagcggaccgccgacggctccggcggcggctcccccaagaagaagcggaaggtg

SEQ ID NO: 1109 - protein, 629 aa, synthetic construct
  REGION 1..629: note = Synthetic
MVISYDNYVTILDEETLKAWIAKLEKAPVFAFATATDSLDNISANLVGLSFAIEPGVAAYIPVAHDYLDAPDQISRERALELLKPLLEDEKALKVGQNLKYDRGILANYGIELRGIAFDTMLESYILNSVAGRHDMDSLAERWLKHKTITFEEIAGKGKNQLTFNQIALEEAGRYAAEDADVTLQLHLKMWPDLQKHKGPLNVFENIEMPLVPVLSRIERNGVKIDPKVLHNHSEELTLRLAELEKKAHEIAGEEFNLSSTKQLQTILFEKQGIKPLKKTPGGAPSTSEEVLEELALDYPLPKVILEYRGLAKLKSTYTDKLPLMINPKTGRVHTSYHQAVTATGRLSSTDPNLQNIPVRNEEGRRIRQAFIAPEDYVIVSADYSQIELRIMAHLSRDKGLLTAFAEGKDIHRATAAEVFGLPLETVTSEQRRSAKAINFGLIYGMSAFGLARQLNIPRKEAQKYMDLYFERYPGVLEYMERTRAQAKEQGYVETLDGRRLYLPDIKSSNGARRAAAERAAINAPMQGTAADIIKRAMIAVDAWLQAEQPRVRMIMQVHDELVFEVHKDDVDAVAKQIHQLMENCTRLDVPLLVEVGSGENWDQAHGGGSGKRTADGSGGGSPKKKRKV

SEQ ID NO: 1110 - RNA, 6733 nt, synthetic construct
  misc_feature 1..6733: note = Synthetic
  source 1..6733: mol_type = other RNA
gggaagctcagaataaacgctcaactttggccggatctgccaccatggacaagaagtactccatcggcctggacatcggcaccaactccgtgggctgggccgtgatcaccgacgagtacaaggtgccctccaagaagttcaaggtgctgggcaacaccgaccggcactccatcaagaagaacctgatcggcgccctgctgttcgactccggcgagaccgccgaggccacccggctgaagcggaccgcccggcggcggtacacccggcggaagaaccggatctgctacctgcaggagatcttctccaacgagatggccaaggtggacgactccttcttccaccggctggaggagtccttcctggtggaggaggacaagaagcacgagcggcaccccatcttcggcaacatcgtggacgaggtggcctaccacgagaagtaccccaccatctaccacctgcggaagaagctggtggactccaccgacaaggccgacctgcggctgatctacctggccctggcccacatgatcaagttccggggccacttcctgatcgagggcgacctgaaccccgacaactccgacgtggacaagctgttcatccagctggtgcagacctacaaccagctgttcgaggagaaccccatcaacgcctccggcgtggacgccaaggccatcctgtccgcccggctgtccaagtcccggcggctggagaacctgatcgcccagctgcccggcgagaagaagaacggcctgttcggcaacctgatcgccctgtccctgggcctgacccccaacttcaagtccaacttcgacctggccgaggacgccaagctgcagctgtccaaggacacctacgacgacgacctggacaacctgctggcccagatcggcgaccagtacgccgacctgttcctggccgccaagaacctgtccgacgccatcctgctgtccgacatcctgcgggtgaacaccgagatcaccaaggcccccctgtccgcctccatgatcaagcggtacgacgagcaccaccaggacctgaccctgctgaaggccctggtgcggcagcagctgcccgagaagtacaaggagatcttcttcgaccagtccaagaacggctacgccggctacatcgacggcggcgcctcccaggaggagttctacaagttcatcaagcccatcctggagaagatggacggcaccgaggagctgctggtgaagctgaaccgggaggacctgctgcggaagcagcggaccttcgacaacggctccatcccccaccagatccacctgggcgagctgcacgccatcctgcggcggcaggaggacttctaccccttcctgaaggacaaccgggagaagatcgagaagatcctgaccttccggatcccctactacgtgggccccctggcccggggcaactcccggttcgcctggatgacccggaagtccgaggagaccatcaccccctggaacttcgaggaggtggtggacaagggcgcctccgcccagtccttcatcgagcggatgaccaacttcgacaagaacctgcccaacgagaaggtgctgcccaagcactccctgctgtacgagtacttcaccgtgtacaacgagctgaccaaggtgaagtacgtgaccgagggcatgcggaagcccgccttcctgtccggcgagcagaagaaggccatcgtggacctgctgttcaagaccaaccggaaggtgaccgtgaagcagctgaaggaggactacttcaagaagatcgagtgcttcgactccgtggagatctccggcgtggaggaccggttcaacgcctccctgggcacctaccacgacctgctgaagatcatcaaggacaaggacttcctggacaacgaggagaacgaggacatcctggaggacatcgtgctgaccctgaccctgttcgaggaccgggagatgatcgaggagcggctgaagacctacgcccacctgttcgacgacaaggtgatgaagcagctgaagcggcggcggtacaccggctggggccggctgtcccggaagctgatcaacggcatccgggacaagcagtccggcaagaccatcctggacttcctgaagtccgacggcttcgccaaccggaacttcatgcagctgatccacgacgactccctgaccttcaaggaggacatccagaaggcccaggtgtccggccagggcgactccctgcacgagcacatcgccaacctggccggctcccccgccatcaagaagggcatcctgcagaccgtgaaggtggtggacgagctggtgaaggtgatgggccggcacaagcccgagaacatcgtgatcgagatggcccgggagaaccagaccacccagaagggccagaagaactcccgggagcggatgaagcggatcgaggagggcatcaaggagctgggctcccagatcctgaaggagcaccccgtggagaacacccagctgcagaacgagaagctgtacctgtactacctgcagaacggccgggacatgtacgtggaccaggagctggacatcaaccggctgtccgactacgacgtggacgccatcgtgccccagtccttcctgaaggacgactccatcgacaacaaggtgctgacccggtccgacaagaaccggggcaagtccgacaacgtgccctccgaggaggtggtgaagaagatgaagaactactggcggcagctgctgaacgccaagctgatcacccagcggaagttcgacaacctgaccaaggccgagcggggcggcctgtccgagctggacaaggccggcttcatcaagcggcagctggtggagacccggcagatcaccaagcacgtggcccagatcctggactcccggatgaacaccaagtacgacgagaacgacaagctgatccgggaggtgaaggtgatcaccctgaagtccaagctggtgtccgacttccggaaggacttccagttctacaaggtgcgggagatcaacaactaccaccacgcccacgacgcctacctgaacgccgtggtgggcaccgccctgatcaagaagtaccccaagctggagtccgagttcgtgtacggcgactacaaggtgtacgacgtgcggaagatgatcgccaagtccgagcaggagatcggcaaggccaccgccaagtacttcttctactccaacatcatgaacttcttcaagaccgagatcaccctggccaacggcgagatccggaagcggcccctgatcgagaccaacggcgagaccggcgagatcgtgtgggacaagggccgggacttcgccaccgtgcggaaggtgctgtccatgccccaggtgaacatcgtgaagaagaccgaggtgcagaccggcggcttctccaaggagtccatcctgcccaagcggaactccgacaagctgatcgcccggaagaaggactgggaccccaagaagtacggcggcttcgactcccccaccgtggcctactccgtgctggtggtggccaaggtggagaagggcaagtccaagaagctgaagtccgtgaaggagctgctgggcatcaccatcatggagcggtcctccttcgagaagaaccccatcgacttcctggaggccaagggctacaaggaggtgaagaaggacctgatcatcaagctgcccaagtactccctgttcgagctggagaacggccggaagcggatgctggcctccgccggcgagctgcagaagggcaacgagctggccctgccctccaagtacgtgaacttcctgtacctggcctcccactacgagaagctgaagggctcccccgaggacaacgagcagaagcagctgttcgtggagcagcacaagcactacctggacgagatcatcgagcagatctccgagttctccaagcgggtgatcctggccgacgccaacctggacaaggtgctgtccgcctacaacaagcaccgggacaagcccatccgggagcaggccgagaacatcatccacctgttcaccctgaccaacctgggcgcccccgccgccttcaagtacttcgacaccaccatcgaccggaagcggtacacctccaccaaggaggtgctggacgccaccctgatccaccagtccatcaccggcctgtacgagacccggatcgacctgtcccagctgggcggcgacggcgcccccgagtccgccaccgagtccggcggcacctccaccgagtccgagggctccgccggcacctccaccgagtccgagggctccgccggctccgccggctccacctccggctcctcctccggcgtgatctcctacgacaactacgtgaccatcctggacgaggagaccctgaaggcctggatcgccaagctggagaaggcccccgtgttcgccttcgccaccgccaccgactccctggacaacatctccgccaacctggtgggcctgtccttcgccatcgagcccggcgtggccgcctacatccccgtggcccacgactacctggacgcccccgaccagatctcccgggagcgggccctggagctgctgaagcccctgctggaggacgagaaggccctgaaggtgggccagaacctgaagtacgaccggggcatcctggccaactacggcatcgagctgcggggcatcgccttcgacaccatgctggagtcctacatcctgaactccgtggccggccggcacgacatggactccctggccgagcggtggctgaagcacaagaccatcaccttcgaggagatcgccggcaagggcaagaaccagctgaccttcaaccagatcgccctggaggaggccggccggtacgccgccgaggacgccgacgtgaccctgcagctgcacctgaagatgtggcccgacctgcagaagcacaagggccccctgaacgtgttcgagaacatcgagatgcccctggtgcccgtgctgtcccggatcgagcggaacggcgtgaagatcgaccccaaggtgctgcacaaccactccgaggagctgaccctgcggctggccgagctggagaagaaggcccacgagatcgccggcgaggagttcaacctgtcctccaccaagcagctgcagaccatcctgttcgagaagcagggcatcaagcccctgaagaagacccccggcggcgccccctccacctccgaggaggtgctggaggagctggccctggactaccccctgcccaaggtgatcctggagtaccggggcctggccaagctgaagtccacctacaccgacaagctgcccctgatgatcaaccccaagaccggccgggtgcacacctcctaccaccaggccgtgaccgccaccggccggctgtcctccaccgaccccaacctgcagaacatccccgtgcggaacgaggagggccggcggatccggcaggccttcatcgcccccgaggactacgtgatcgtgtccgccgactactcccagatcgagctgcggatcatggcccacctgtcccgggacaagggcctgctgaccgccttcgccgagggcaaggacatccaccgggccaccgccgccgaggtgttcggcctgcccctggagaccgtgacctccgagcagcggcggtccgccaaggccatcaacttcggcctgatctacggcatgtccgccttcggcctggcccggcagctgaacatcccccggaaggaggcccagaagtacatggacctgtacttcgagcggtaccccggcgtgctggagtacatggagcggacccgggcccaggccaaggagcagggctacgtggagaccctggacggccggcggctgtacctgcccgacatcaagtcctccaacggcgcccggcgggccgccgccgagcgggccgccatcaacgcccccatgcagggcaccgccgccgacatcatcaagcgggccatgatcgccgtggacgcctggctgcaggccgagcagccccgggtgcggatgatcatgcaggtgcacgacgagctggtgttcgaggtgcacaaggacgacgtggacgccgtggccaagcagatccaccagctgatggagaactgcacccggctggacgtgcccctgctggtggaggtgggctccggcgagaactgggaccaggcccacggcggcggctccggcaagcggaccgccgacggctccggcggcggctcccccaagaagaagcggaaggtgtccgagtccgccacccccgagtccgtgtccggctggcggctgttcaagaagatctcctagctagcaccagcctcaagaacacccgaatggagtctctaagctacataataccaacttacactttacaaaatgttgtcccccaaaatgtagccattcgtatctgctcctaataaaaagaaagtttcttcacattctctcgagaaaaaaaaaaaatggaaaaaaaaaaaacggaaaaaaaaaaaaggtaaaaaaaaaaaatataaaaaaaaaaaacataaaaaaaaaaaacgaaaaaaaaaaaacgtaaaaaaaaaaaactcaaaaaaaaaaaagataaaaaaaaaaaacctaaaaaaaaaaaatgtaaaaaaaaaaaagggaaaaaaaaaaaacgcaaaaaaaaaaaacacaaaaaaaaaaaatgcaaaaaaaaaaaatcgaaaaaaaaaaaatctaaaaaaaaaaaacgaaaaaaaaaaaacccaaaaaaaaaaaagacaaaaaaaaaaaatagaaaaaaaaaaagttaaaaaaaaaaaactgaaaaaaaaaaaatttaaaaaaaaaaaatctag

SEQ ID NO: 1111 - RNA, 6174 nt, synthetic construct
  misc_feature 1..6174: note = Synthetic
  source 1..6174: mol_type = other RNA
atggacaagaagtactccatcggcctggacatcggcaccaactccgtgggctgggccgtgatcaccgacgagtacaaggtgccctccaagaagttcaaggtgctgggcaacaccgaccggcactccatcaagaagaacctgatcggcgccctgctgttcgactccggcgagaccgccgaggccacccggctgaagcggaccgcccggcggcggtacacccggcggaagaaccggatctgctacctgcaggagatcttctccaacgagatggccaaggtggacgactccttcttccaccggctggaggagtccttcctggtggaggaggacaagaagcacgagcggcaccccatcttcggcaacatcgtggacgaggtggcctaccacgagaagtaccccaccatctaccacctgcggaagaagctggtggactccaccgacaaggccgacctgcggctgatctacctggccctggcccacatgatcaagttccggggccacttcctgatcgagggcgacctgaaccccgacaactccgacgtggacaagctgttcatccagctggtgcagacctacaaccagctgttcgaggagaaccccatcaacgcctccggcgtggacgccaaggccatcctgtccgcccggctgtccaagtcccggcggctggagaacctgatcgcccagctgcccggcgagaagaagaacggcctgttcggcaacctgatcgccctgtccctgggcctgacccccaacttcaagtccaacttcgacctggccgaggacgccaagctgcagctgtccaaggacacctacgacgacgacctggacaacctgctggcccagatcggcgaccagtacgccgacctgttcctggccgccaagaacctgtccgacgccatcctgctgtccgacatcctgcgggtgaacaccgagatcaccaaggcccccctgtccgcctccatgatcaagcggtacgacgagcaccaccaggacctgaccctgctgaaggccctggtgcggcagcagctgcccgagaagtacaaggagatcttcttcgaccagtccaagaacggctacgccggctacatcgacggcggcgcctcccaggaggagttctacaagttcatcaagcccatcctggagaagatggacggcaccgaggagctgctggtgaagctgaaccgggaggacctgctgcggaagcagcggaccttcgacaacggctccatcccccaccagatccacctgggcgagctgcacgccatcctgcggcggcaggaggacttctaccccttcctgaaggacaaccgggagaagatcgagaagatcctgaccttccggatcccctactacgtgggccccctggcccggggcaactcccggttcgcctggatgacccggaagtccgaggagaccatcaccccctggaacttcgaggaggtggtggacaagggcgcctccgcccagtccttcatcgagcggatgaccaacttcgacaagaacctgcccaacgagaaggtgctgcccaagcactccctgctgtacgagtacttcaccgtgtacaacgagctgaccaaggtgaagtacgtgaccgagggcatgcggaagcccgccttcctgtccggcgagcagaagaaggccatcgtggacctgctgttcaagaccaaccggaaggtgaccgtgaagcagctgaaggaggactacttcaagaagatcgagtgcttcgactccgtggagatctccggcgtggaggaccggttcaacgcctccctgggcacctaccacgacctgctgaagatcatcaaggacaaggacttcctggacaacgaggagaacgaggacatcctggaggacatcgtgctgaccctgaccctgttcgaggaccgggagatgatcgaggagcggctgaagacctacgcccacctgttcgacgacaaggtgatgaagcagctgaagcggcggcggtacaccggctggggccggctgtcccggaagctgatcaacggcatccgggacaagcagtccggcaagaccatcctggacttcctgaagtccgacggcttcgccaaccggaacttcatgcagctgatccacgacgactccctgaccttcaaggaggacatccagaaggcccaggtgtccggccagggcgactccctgcacgagcacatcgccaacctggccggctcccccgccatcaagaagggcatcctgcagaccgtgaaggtggtggacgagctggtgaaggtgatgggccggcacaagcccgagaacatcgtgatcgagatggcccgggagaaccagaccacccagaagggccagaagaactcccgggagcggatgaagcggatcgaggagggcatcaaggagctgggctcccagatcctgaaggagcaccccgtggagaacacccagctgcagaacgagaagctgtacctgtactacctgcagaacggccgggacatgtacgtggaccaggagctggacatcaaccggctgtccgactacgacgtggacgccatcgtgccccagtccttcctgaaggacgactccatcgacaacaaggtgctgacccggtccgacaagaaccggggcaagtccgacaacgtgccctccgaggaggtggtgaagaagatgaagaactactggcggcagctgctgaacgccaagctgatcacccagcggaagttcgacaacctgaccaaggccgagcggggcggcctgtccgagctggacaaggccggcttcatcaagcggcagctggtggagacccggcagatcaccaagcacgtggcccagatcctggactcccggatgaacaccaagtacgacgagaacgacaagctgatccgggaggtgaaggtgatcaccctgaagtccaagctggtgtccgacttccggaaggacttccagttctacaaggtgcgggagatcaacaactaccaccacgcccacgacgcctacctgaacgccgtggtgggcaccgccctgatcaagaagtaccccaagctggagtccgagttcgtgtacggcgactacaaggtgtacgacgtgcggaagatgatcgccaagtccgagcaggagatcggcaaggccaccgccaagtacttcttctactccaacatcatgaacttcttcaagaccgagatcaccctggccaacggcgagatccggaagcggcccctgatcgagaccaacggcgagaccggcgagatcgtgtgggacaagggccgggacttcgccaccgtgcggaaggtgctgtccatgccccaggtgaacatcgtgaagaagaccgaggtgcagaccggcggcttctccaaggagtccatcctgcccaagcggaactccgacaagctgatcgcccggaagaaggactgggaccccaagaagtacggcggcttcgactcccccaccgtggcctactccgtgctggtggtggccaaggtggagaagggcaagtccaagaagctgaagtccgtgaaggagctgctgggcatcaccatcatggagcggtcctccttcgagaagaaccccatcgacttcctggaggccaagggctacaaggaggtgaagaaggacctgatcatcaagctgcccaagtactccctgttcgagctggagaacggccggaagcggatgctggcctccgccggcgagctgcagaagggcaacgagctggccctgccctccaagtacgtgaacttcctgtacctggcctcccactacgagaagctgaagggctcccccgaggacaacgagcagaagcagctgttcgtggagcagcacaagcactacctggacgagatcatcgagcagatctccgagttctccaagcgggtgatcctggccgacgccaacctggacaaggtgctgtccgcctacaacaagcaccgggacaagcccatccgggagcaggccgagaacatcatccacctgttcaccctgaccaacctgggcgcccccgccgccttcaagtacttcgacaccaccatcgaccggaagcggtacacctccaccaaggaggtgctggacgccaccctgatccaccagtccatcaccggcctgtacgagacccggatcgacctgtcccagctgggcggcgacggcgcccccgagtccgccaccgagtccggcggcacctccaccgagtccgagggctccgccggcacctccaccgagtccgagggctccgccggctccgccggctccacctccggctcctcctccggcgtgatctcctacgacaactacgtgaccatcctggacgaggagaccctgaaggcctggatcgccaagctggagaaggcccccgtgttcgccttcgccaccgccaccgactccctggacaacatctccgccaacctggtgggcctgtccttcgccatcgagcccggcgtggccgcctacatccccgtggcccacgactacctggacgcccccgaccagatctcccgggagcgggccctggagctgctgaagcccctgctggaggacgagaaggccctgaaggtgggccagaacctgaagtacgaccggggcatcctggccaactacggcatcgagctgcggggcatcgccttcgacaccatgctggagtcctacatcctgaactccgtggccggccggcacgacatggactccctggccgagcggtggctgaagcacaagaccatcaccttcgaggagatcgccggcaagggcaagaaccagctgaccttcaaccagatcgccctggaggaggccggccggtacgccgccgaggacgccgacgtgaccctgcagctgcacctgaagatgtggcccgacctgcagaagcacaagggccccctgaacgtgttcgagaacatcgagatgcccctggtgcccgtgctgtcccggatcgagcggaacggcgtgaagatcgaccccaaggtgctgcacaaccactccgaggagctgaccctgcggctggccgagctggagaagaaggcccacgagatcgccggcgaggagttcaacctgtcctccaccaagcagctgcagaccatcctgttcgagaagcagggcatcaagcccctgaagaagacccccggcggcgccccctccacctccgaggaggtgctggaggagctggccctggactaccccctgcccaaggtgatcctggagtaccggggcctggccaagctgaagtccacctacaccgacaagctgcccctgatgatcaaccccaagaccggccgggtgcacacctcctaccaccaggccgtgaccgccaccggccggctgtcctccaccgaccccaacctgcagaacatccccgtgcggaacgaggagggccggcggatccggcaggccttcatcgcccccgaggactacgtgatcgtgtccgccgactactcccagatcgagctgcggatcatggcccacctgtcccgggacaagggcctgctgaccgccttcgccgagggcaaggacatccaccgggccaccgccgccgaggtgttcggcctgcccctggagaccgtgacctccgagcagcggcggtccgccaaggccatcaacttcggcctgatctacggcatgtccgccttcggcctggcccggcagctgaacatcccccggaaggaggcccagaagtacatggacctgtacttcgagcggtaccccggcgtgctggagtacatggagcggacccgggcccaggccaaggagcagggctacgtggagaccctggacggccggcggctgtacctgcccgacatcaagtcctccaacggcgcccggcgggccgccgccgagcgggccgccatcaacgcccccatgcagggcaccgccgccgacatcatcaagcgggccatgatcgccgtggacgcctggctgcaggccgagcagccccgggtgcggatgatcatgcaggtgcacgacgagctggtgttcgaggtgcacaaggacgacgtggacgccgtggccaagcagatccaccagctgatggagaactgcacccggctggacgtgcccctgctggtggaggtgggctccggcgagaactgggaccaggcccacggcggcggctccggcaagcggaccgccgacggctccggcggcggctcccccaagaagaagcggaaggtgtccgagtccgccacccccgagtccgtgtccggctggcggctgttcaagaagatctcctag

SEQ ID NO: 1112 - protein, 2057 aa, synthetic construct
  REGION 1..2057: note = Synthetic
MDKKYSIGLDIGTNSVGWAVITDEYKVPSKKFKVLGNTDRHSIKKNLIGALLFDSGETAEATRLKRTARRRYTRRKNRICYLQEIFSNEMAKVDDSFFHRLEESFLVEEDKKHERHPIFGNIVDEVAYHEKYPTIYHLRKKLVDSTDKADLRLIYLALAHMIKFRGHFLIEGDLNPDNSDVDKLFIQLVQTYNQLFEENPINASGVDAKAILSARLSKSRRLENLIAQLPGEKKNGLFGNLIALSLGLTPNFKSNFDLAEDAKLQLSKDTYDDDLDNLLAQIGDQYADLFLAAKNLSDAILLSDILRVNTEITKAPLSASMIKRYDEHHQDLTLLKALVRQQLPEKYKEIFFDQSKNGYAGYIDGGASQEEFYKFIKPILEKMDGTEELLVKLNREDLLRKQRTFDNGSIPHQIHLGELHAILRRQEDFYPFLKDNREKIEKILTFRIPYYVGPLARGNSRFAWMTRKSEETITPWNFEEVVDKGASAQSFIERMTNFDKNLPNEKVLPKHSLLYEYFTVYNELTKVKYVTEGMRKPAFLSGEQKKAIVDLLFKTNRKVTVKQLKEDYFKKIECFDSVEISGVEDRFNASLGTYHDLLKIIKDKDFLDNEENEDILEDIVLTLTLFEDREMIEERLKTYAHLFDDKVMKQLKRRRYTGWGRLSRKLINGIRDKQSGKTILDFLKSDGFANRNFMQLIHDDSLTFKEDIQKAQVSGQGDSLHEHIANLAGSPAIKKGILQTVKVVDELVKVMGRHKPENIVIEMARENQTTQKGQKNSRERMKRIEEGIKELGSQILKEHPVENTQLQNEKLYLYYLQNGRDMYVDQELDINRLSDYDVDAIVPQSFLKDDSIDNKVLTRSDKNRGKSDNVPSEEVVKKMKNYWRQLLNAKLITQRKFDNLTKAERGGLSELDKAGFIKRQLVETRQITKHVAQILDSRMNTKYDENDKLIREVKVITLKSKLVSDFRKDFQFYKVREINNYHHAHDAYLNAVVGTALIKKYPKLESEFVYGDYKVYDVRKMIAKSEQEIGKATAKYFFYSNIMNFFKTEITLANGEIRKRPLIETNGETGEIVWDKGRDFATVRKVLSMPQVNIVKKTEVQTGGFSKESILPKRNSDKLIARKKDWDPKKYGGFDSPTVAYSVLVVAKVEKGKSKKLKSVKELLGITIMERSSFEKNPIDFLEAKGYKEVKKDLIIKLPKYSLFELENGRKRMLASAGELQKGNELALPSKYVNFLYLASHYEKLKGSPEDNEQKQLFVEQHKHYLDEIIEQISEFSKRVILADANLDKVLSAYNKHRDKPIREQAENIIHLFTLTNLGAPAAFKYFDTTIDRKRYTSTKEVLDATLIHQSITGLYETRIDLSQLGGDGAPESATESGGTSTESEGSAGTSTESEGSAGSAGSTSGSSSGVISYDNYVTILDEETLKAWIAKLEKAPVFAFATATDSLDNISANLVGLSFAIEPGVAAYIPVAHDYLDAPDQISRERALELLKPLLEDEKALKVGQNLKYDRGILANYGIELRGIAFDTMLESYILNSVAGRHDMDSLAERWLKHKTITFEEIAGKGKNQLTFNQIALEEAGRYAAEDADVTLQLHLKMWPDLQKHKGPLNVFENIEMPLVPVLSRIERNGVKIDPKVLHNHSEELTLRLAELEKKAHEIAGEEFNLSSTKQLQTILFEKQGIKPLKKTPGGAPSTSEEVLEELALDYPLPKVILEYRGLAKLKSTYTDKLPLMINPKTGRVHTSYHQAVTATGRLSSTDPNLQNIPVRNEEGRRIRQAFIAPEDYVIVSADYSQIELRIMAHLSRDKGLLTAFAEGKDIHRATAAEVFGLPLETVTSEQRRSAKAINFGLIYGMSAFGLARQLNIPRKEAQKYMDLYFERYPGVLEYMERTRAQAKEQGYVETLDGRRLYLPDIKSSNGARRAAAERAAINAPMQGTAADIIKRAMIAVDAWLQAEQPRVRMIMQVHDELVFEVHKDDVDAVAKQIHQLMENCTRLDVPLLVEVGSGENWDQAHGGGSGKRTADGSGGGSPKKKRKVSESATPESVSGWRLFKKIS

SEQ ID NO: 1113 - RNA, 6114 nt, synthetic construct
  misc_feature 1..6114: note = Synthetic
  source 1..6114: mol_type = other RNA
atggacaagaagtactccatcggcctggacatcggcaccaactccgtgggctgggccgtgatcaccgacgagtacaaggtgccctccaagaagttcaaggtgctgggcaacaccgaccggcactccatcaagaagaacctgatcggcgccctgctgttcgactccggcgagaccgccgaggccacccggctgaagcggaccgcccggcggcggtacacccggcggaagaaccggatctgctacctgcaggagatcttctccaacgagatggccaaggtggacgactccttcttccaccggctggaggagtccttcctggtggaggaggacaagaagcacgagcggcaccccatcttcggcaacatcgtggacgaggtggcctaccacgagaagtaccccaccatctaccacctgcggaagaagctggtggactccaccgacaaggccgacctgcggctgatctacctggccctggcccacatgatcaagttccggggccacttcctgatcgagggcgacctgaaccccgacaactccgacgtggacaagctgttcatccagctggtgcagacctacaaccagctgttcgaggagaaccccatcaacgcctccggcgtggacgccaaggccatcctgtccgcccggctgtccaagtcccggcggctggagaacctgatcgcccagctgcccggcgagaagaagaacggcctgttcggcaacctgatcgccctgtccctgggcctgacccccaacttcaagtccaacttcgacctggccgaggacgccaagctgcagctgtccaaggacacctacgacgacgacctggacaacctgctggcccagatcggcgaccagtacgccgacctgttcctggccgccaagaacctgtccgacgccatcctgctgtccgacatcctgcgggtgaacaccgagatcaccaaggcccccctgtccgcctccatgatcaagcggtacgacgagcaccaccaggacctgaccctgctgaaggccctggtgcggcagcagctgcccgagaagtacaaggagatcttcttcgaccagtccaagaacggctacgccggctacatcgacggcggcgcctcccaggaggagttctacaagttcatcaagcccatcctggagaagatggacggcaccgaggagctgctggtgaagctgaaccgggaggacctgctgcggaagcagcggaccttcgacaacggctccatcccccaccagatccacctgggcgagctgcacgccatcctgcggcggcaggaggacttctaccccttcctgaaggacaaccgggagaagatcgagaagatcctgaccttccggatcccctactacgtgggccccctggcccggggcaactcccggttcgcctggatgacccggaagtccgaggagaccatcaccccctggaacttcgaggaggtggtggacaagggcgcctccgcccagtccttcatcgagcggatgaccaacttcgacaagaacctgcccaacgagaaggtgctgcccaagcactccctgctgtacgagtacttcaccgtgtacaacgagctgaccaaggtgaagtacgtgaccgagggcatgcggaagcccgccttcctgtccggcgagcagaagaaggccatcgtggacctgctgttcaagaccaaccggaaggtgaccgtgaagcagctgaaggaggactacttcaagaagatcgagtgcttcgactccgtggagatctccggcgtggaggaccggttcaacgcctccctgggcacctaccacgacctgctgaagatcatcaaggacaaggacttcctggacaacgaggagaacgaggacatcctggaggacatcgtgctgaccctgaccctgttcgaggaccgggagatgatcgaggagcggctgaagacctacgcccacctgttcgacgacaaggtgatgaagcagctgaagcggcggcggtacaccggctggggccggctgtcccggaagctgatcaacggcatccgggacaagcagtccggcaagaccatcctggacttcctgaagtccgacggcttcgccaaccggaacttcatgcagctgatccacgacgactccctgaccttcaaggaggacatccagaaggcccaggtgtccggccagggcgactccctgcacgagcacatcgccaacctggccggctcccccgccatcaagaagggcatcctgcagaccgtgaaggtggtggacgagctggtgaaggtgatgggccggcacaagcccgagaacatcgtgatcgagatggcccgggagaaccagaccacccagaagggccagaagaactcccgggagcggatgaagcggatcgaggagggcatcaaggagctgggctcccagatcctgaaggagcaccccgtggagaacacccagctgcagaacgagaagctgtacctgtactacctgcagaacggccgggacatgtacgtggaccaggagctggacatcaaccggctgtccgactacgacgtggacgccatcgtgccccagtccttcctgaaggacgactccatcgacaacaaggtgctgacccggtccgacaagaaccggggcaagtccgacaacgtgccctccgaggaggtggtgaagaagatgaagaactactggcggcagctgctgaacgccaagctgatcacccagcggaagttcgacaacctgaccaaggccgagcggggcggcctgtccgagctggacaaggccggcttcatcaagcggcagctggtggagacccggcagatcaccaagcacgtggcccagatcctggactcccggatgaacaccaagtacgacgagaacgacaagctgatccgggaggtgaaggtgatcaccctgaagtccaagctggtgtccgacttccggaaggacttccagttctacaaggtgcgggagatcaacaactaccaccacgcccacgacgcctacctgaacgccgtggtgggcaccgccctgatcaagaagtaccccaagctggagtccgagttcgtgtacggcgactacaaggtgtacgacgtgcggaagatgatcgccaagtccgagcaggagatcggcaaggccaccgccaagtacttcttctactccaacatcatgaacttcttcaagaccgagatcaccctggccaacggcgagatccggaagcggcccctgatcgagaccaacggcgagaccggcgagatcgtgtgggacaagggccgggacttcgccaccgtgcggaaggtgctgtccatgccccaggtgaacatcgtgaagaagaccgaggtgcagaccggcggcttctccaaggagtccatcctgcccaagcggaactccgacaagctgatcgcccggaagaaggactgggaccccaagaagtacggcggcttcgactcccccaccgtggcctactccgtgctggtggtggccaaggtggagaagggcaagtccaagaagctgaagtccgtgaaggagctgctgggcatcaccatcatggagcggtcctccttcgagaagaaccccatcgacttcctggaggccaagggctacaaggaggtgaagaaggacctgatcatcaagctgcccaagtactccctgttcgagctggagaacggccggaagcggatgctggcctccgccggcgagctgcagaagggcaacgagctggccctgccctccaagtacgtgaacttcctgtacctggcctcccactacgagaagctgaagggctcccccgaggacaacgagcagaagcagctgttcgtggagcagcacaagcactacctggacgagatcatcgagcagatctccgagttctccaagcgggtgatcctggccgacgccaacctggacaaggtgctgtccgcctacaacaagcaccgggacaagcccatccgggagcaggccgagaacatcatccacctgttcaccctgaccaacctgggcgcccccgccgccttcaagtacttcgacaccaccatcgaccggaagcggtacacctccaccaaggaggtgctggacgccaccctgatccaccagtccatcaccggcctgtacgagacccggatcgacctgtcccagctgggcggcgacggcgcccccgagtccgccaccgagtccggcggcacctccaccgagtccgagggctccgccggcacctccaccgagtccgagggctccgccggctccgccggctccacctccggctcctcctccggcgtgatctcctacgacaactacgtgaccatcctggacgaggagaccctgaaggcctggatcgccaagctggagaaggcccccgtgttcgccttcgccaccgccaccgactccctggacaacatctccgccaacctggtgggcctgtccttcgccatcgagcccggcgtggccgcctacatccccgtggcccacgactacctggacgcccccgaccagatctcccgggagcgggccctggagctgctgaagcccctgctggaggacgagaaggccctgaaggtgggccagaacctgaagtacgaccggggcatcctggccaactacggcatcgagctgcggggcatcgccttcgacaccatgctggagtcctacatcctgaactccgtggccggccggcacgacatggactccctggccgagcggtggctgaagcacaagaccatcaccttcgaggagatcgccggcaagggcaagaaccagctgaccttcaaccagatcgccctggaggaggccggccggtacgccgccgaggacgccgacgtgaccctgcagctgcacctgaagatgtggcccgacctgcagaagcacaagggccccctgaacgtgttcgagaacatcgagatgcccctggtgcccgtgctgtcccggatcgagcggaacggcgtgaagatcgaccccaaggtgctgcacaaccactccgaggagctgaccctgcggctggccgagctggagaagaaggcccacgagatcgccggcgaggagttcaacctgtcctccaccaagcagctgcagaccatcctgttcgagaagcagggcatcaagcccctgaagaagacccccggcggcgccccctccacctccgaggaggtgctggaggagctggccctggactaccccctgcccaaggtgatcctggagtaccggggcctggccaagctgaagtccacctacaccgacaagctgcccctgatgatcaaccccaagaccggccgggtgcacacctcctaccaccaggccgtgaccgccaccggccggctgtcctccaccgaccccaacctgcagaacatccccgtgcggaacgaggagggccggcggatccggcaggccttcatcgcccccgaggactacgtgatcgtgtccgccgactactcccagatcgagctgcggatcatggcccacctgtcccgggacaagggcctgctgaccgccttcgccgagggcaaggacatccaccgggccaccgccgccgaggtgttcggcctgcccctggagaccgtgacctccgagcagcggcggtccgccaaggccatcaacttcggcctgatctacggcatgtccgccttcggcctggcccggcagctgaacatcccccggaaggaggcccagaagtacatggacctgtacttcgagcggtaccccggcgtgctggagtacatggagcggacccgggcccaggccaaggagcagggctacgtggagaccctggacggccggcggctgtacctgcccgacatcaagtcctccaacggcgcccggcgggccgccgccgagcgggccgccatcaacgcccccatgcagggcaccgccgccgacatcatcaagcgggccatgatcgccgtggacgcctggctgcaggccgagcagccccgggtgcggatgatcatgcaggtgcacgacgagctggtgttcgaggtgcacaaggacgacgtggacgccgtggccaagcagatccaccagctgatggagaactgcacccggctggacgtgcccctgctggtggaggtgggctccggcgagaactgggaccaggcccacggcggcggctccggcaagcggaccgccgacggctccggcggcggctcccccaagaagaagcggaaggtg

SEQ ID NO: 1114 - protein, 2038 aa, synthetic construct
  REGION 1..2038: note = Synthetic
MDKKYSIGLDIGTNSVGWAVITDEYKVPSKKFKVLGNTDRHSIKKNLIGALLFDSGETAEATRLKRTARRRYTRRKNRICYLQEIFSNEMAKVDDSFFHRLEESFLVEEDKKHERHPIFGNIVDEVAYHEKYPTIYHLRKKLVDSTDKADLRLIYLALAHMIKFRGHFLIEGDLNPDNSDVDKLFIQLVQTYNQLFEENPINASGVDAKAILSARLSKSRRLENLIAQLPGEKKNGLFGNLIALSLGLTPNFKSNFDLAEDAKLQLSKDTYDDDLDNLLAQIGDQYADLFLAAKNLSDAILLSDILRVNTEITKAPLSASMIKRYDEHHQDLTLLKALVRQQLPEKYKEIFFDQSKNGYAGYIDGGASQEEFYKFIKPILEKMDGTEELLVKLNREDLLRKQRTFDNGSIPHQIHLGELHAILRRQEDFYPFLKDNREKIEKILTFRIPYYVGPLARGNSRFAWMTRKSEETITPWNFEEVVDKGASAQSFIERMTNFDKNLPNEKVLPKHSLLYEYFTVYNELTKVKYVTEGMRKPAFLSGEQKKAIVDLLFKTNRKVTVKQLKEDYFKKIECFDSVEISGVEDRFNASLGTYHDLLKIIKDKDFLDNEENEDILEDIVLTLTLFEDREMIEERLKTYAHLFDDKVMKQLKRRRYTGWGRLSRKLINGIRDKQSGKTILDFLKSDGFANRNFMQLIHDDSLTFKEDIQKAQVSGQGDSLHEHIANLAGSPAIKKGILQTVKVVDELVKVMGRHKPENIVIEMARENQTTQKGQKNSRERMKRIEEGIKELGSQILKEHPVENTQLQNEKLYLYYLQNGRDMYVDQELDINRLSDYDVDAIVPQSFLKDDSIDNKVLTRSDKNRGKSDNVPSEEVVKKMKNYWRQLLNAKLITQRKFDNLTKAERGGLSELDKAGFIKRQLVETRQITKHVAQILDSRMNTKYDENDKLIREVKVITLKSKLVSDFRKDFQFYKVREINNYHHAHDAYLNAVVGTALIKKYPKLESEFVYGDYKVYDVRKMIAKSEQEIGKATAKYFFYSNIMNFFKTEITLANGEIRKRPLIETNGETGEIVWDKGRDFATVRKVLSMPQVNIVKKTEVQTGGFSKESILPKRNSDKLIARKKDWDPKKYGGFDSPTVAYSVLVVAKVEKGKSKKLKSVKELLGITIMERSSFEKNPIDFLEAKGYKEVKKDLIIKLPKYSLFELENGRKRMLASAGELQKGNELALPSKYVNFLYLASHYEKLKGSPEDNEQKQLFVEQHKHYLDEIIEQISEFSKRVILADANLDKVLSAYNKHRDKPIREQAENIIHLFTLTNLGAPAAFKYFDTTIDRKRYTSTKEVLDATLIHQSITGLYETRIDLSQLGGDGAPESATESGGTSTESEGSAGTSTESEGSAGSAGSTSGSSSGVISYDNYVTILDEETLKAWIAKLEKAPVFAFATATDSLDNISANLVGLSFAIEPGVAAYIPVAHDYLDAPDQISRERALELLKPLLEDEKALKVGQNLKYDRGILANYGIELRGIAFDTMLESYILNSVAGRHDMDSLAERWLKHKTITFEEIAGKGKNQLTFNQIALEEAGRYAAEDADVTLQLHLKMWPDLQKHKGPLNVFENIEMPLVPVLSRIERNGVKIDPKVLHNHSEELTLRLAELEKKAHEIAGEEFNLSSTKQLQTILFEKQGIKPLKKTPGGAPSTSEEVLEELALDYPLPKVILEYRGLAKLKSTYTDKLPLMINPKTGRVHTSYHQAVTATGRLSSTDPNLQNIPVRNEEGRRIRQAFIAPEDYVIVSADYSQIELRIMAHLSRDKGLLTAFAEGKDIHRATAAEVFGLPLETVTSEQRRSAKAINFGLIYGMSAFGLARQLNIPRKEAQKYMDLYFERYPGVLEYMERTRAQAKEQGYVETLDGRRLYLPDIKSSNGARRAAAERAAINAPMQGTAADIIKRAMIAVDAWLQAEQPRVRMIMQVHDELVFEVHKDDVDAVAKQIHQLMENCTRLDVPLLVEVGSGENWDQAHGGGSGKRTADGSGGGSPKKKRKV

SEQ ID NO: 1115 - DNA, 2565 bp, synthetic construct
  misc_feature 1..2565: note = Synthetic
  source 1..2565: mol_type = other DNA
atgaagatcgccgtggtggacaaggccctgaacaacacccggtacgacaagcacttccagctgtacggcgaggaggtggacgtgttccacatgtgcaacgagaagctgtccggccggctgctgaagaagcacatcaccatcggcacccccgagaaccccttcgaccccaacgactacgacttcgtgatcctggtgggcgccgagcccttcctgtacttcgccggcaagaagggcatcggcgactacaccggcaagcgggtggagtacaacggctacgccaactggatcgcctccatctcccccgcccagctgcacttcaagcccgagatgaagcccgtgttcgacgccaccgtggagaacatccacgacatcatcaacggccgggagaagatcgccaaggccggcgactaccggcccatcaccgaccccgacgaggccgaggagtacatcaagatggtgtacaacatggtgatcggccccgtggccttcgactccgagacctccgccctgtactgccgggacggctacctgctgggcgtgtccatctcccaccaggagtaccagggcgtgtacatcgactccgactgcctgaccgaggtggccgtgtactacctgcagaagatcctggactccgagaaccacaccatcgtgttccacaacctgaagttcgacatgcacttctacaagtaccacctgggcctgaccttcgacaaggcccacaaggagcggcggctgcacgacaccatgctgcagcactacgtgctggacgagcggcggggcacccacggcctgaagtccctggccatgaagtacaccgacatgggcgactacgacttcgagctggacaagttcaaggacgactactgcaaggcccacaagatcaagaaggaggacttcacctacgacctgatccccttcgacatcatgtggccctacgccgccaaggacaccgacgccaccatccggctgcacaacttcttcctgcccaagatcgagaagaacgagaagctgtgctccctgtactacgacgtgctgatgcccggctgcgtgttcctgcagcgggtggaggaccggggcgtgcccatctccatcgaccggctgaaggaggcccagtaccagctgacccacaacctgaacaaggcccgggagaagctgtacacctaccccgaggtgaagcagctggagcaggaccagaacgaggccttcaaccccaactccgtgaagcagctgcgggtgctgctgttcgactacgtgggcctgacccccaccggcaagctgaccgacaccggcgccgactccaccgacgccgaggccctgaacgagctggccacccagcaccccatcgccaagaccctgctggagatccggaagctgaccaagctgatctccacctacgtggagaagatcctgctgtccatcgacgccgacggctgcatccggaccggcttccacgagcacatgaccacctccggccggctgtcctcctccggcaagctgaacctgcagcagctgccccgggacgagtccatcatcaagggctgcgtggtggccccccccggctaccgggtgatcgcctgggacctgaccaccgccgaggtgtactacgccgccgtgctgtccggcgaccggaacatgcagcaggtgttcatcaacatgcggaacgagcccgacaagtaccccgacttccactccaacatcgcccacatggtgttcaagctgcagtgcgagccccgggacgtgaagaagctgttccccgccctgcggcaggccgccaaggccatcaccttcggcatcctgtacggctccggccccgccaaggtggcccactccgtgaacgaggccctgctggagcaggccgccaagaccggcgagcccttcgtggagtgcaccgtggccgacgccaaggagtacatcgagacctacttcggccagttcccccagctgaagcggtggatcgacaagtgccacgaccagatcaagaaccacggcttcatctactcccacttcggccggaagcggcggctgcacaacatccactccgaggaccggggcgtgcagggcgaggagatccggtccggcttcaacgccatcatccagtccgcctcctccgactccctgctgctgggcgccgtggacgccgacaacgagatcatctccctgggcctggagcaggagatgaagatcgtgatgctggtgcacgactccgtggtggccatcgtgcgggaggacctgatcgaccagtacaacgagatcctgatccggaacatccagaaggaccggggcatctccatccccggctgccccatcggcatcgactccgactccgaggccggcggctcccgggactactcctgcggcaagatgaagaagcagcacccctccatcgcctgcatcgacgacgacgagtacacccggtacgtgaagggcgtgctgctggacgccgagttcgagtacaagaagctggccgccatggacaaggagcaccccgaccactccaagtacaaggacgacaagttcatcgccgtgtgcaaggacctggacaacgtgaagcggatcctgggcgcc

SEQ ID NO: 1116 - protein, 855 aa, synthetic construct
  REGION 1..855: note = Synthetic
MKIAVVDKALNNTRYDKHFQLYGEEVDVFHMCNEKLSGRLLKKHITIGTPENPFDPNDYDFVILVGAEPFLYFAGKKGIGDYTGKRVEYNGYANWIASISPAQLHFKPEMKPVFDATVENIHDIINGREKIAKAGDYRPITDPDEAEEYIKMVYNMVIGPVAFDSETSALYCRDGYLLGVSISHQEYQGVYIDSDCLTEVAVYYLQKILDSENHTIVFHNLKFDMHFYKYHLGLTFDKAHKERRLHDTMLQHYVLDERRGTHGLKSLAMKYTDMGDYDFELDKFKDDYCKAHKIKKEDFTYDLIPFDIMWPYAAKDTDATIRLHNFFLPKIEKNEKLCSLYYDVLMPGCVFLQRVEDRGVPISIDRLKEAQYQLTHNLNKAREKLYTYPEVKQLEQDQNEAFNPNSVKQLRVLLFDYVGLTPTGKLTDTGADSTDAEALNELATQHPIAKTLLEIRKLTKLISTYVEKILLSIDADGCIRTGFHEHMTTSGRLSSSGKLNLQQLPRDESIIKGCVVAPPGYRVIAWDLTTAEVYYAAVLSGDRNMQQVFINMRNEPDKYPDFHSNIAHMVFKLQCEPRDVKKLFPALRQAAKAITFGILYGSGPAKVAHSVNEALLEQAAKTGEPFVECTVADAKEYIETYFGQFPQLKRWIDKCHDQIKNHGFIYSHFGRKRRLHNIHSEDRGVQGEEIRSGFNAIIQSASSDSLLLGAVDADNEIISLGLEQEMKIVMLVHDSVVAIVREDLIDQYNEILIRNIQKDRGISIPGCPIGIDSDSEAGGSRDYSCGKMKKQHPSIACIDDDEYTRYVKGVLLDAEFEYKKLAAMDKEHPDHSKYKDDKFIAVCKDLDNVKRILGA

SEQ ID NO: 1117 - RNA, 3253 nt, synthetic construct
  misc_feature 1..3253: note = Synthetic
  source 1..3253: mol_type = other RNA
gggaagctcagaataaacgctcaactttggccggatctgccaccatgaagatcgccgtggtggacaaggccctgaacaacacccggtacgacaagcacttccagctgtacggcgaggaggtggacgtgttccacatgtgcaacgagaagctgtccggccggctgctgaagaagcacatcaccatcggcacccccgagaaccccttcgaccccaacgactacgacttcgtgatcctggtgggcgccgagcccttcctgtacttcgccggcaagaagggcatcggcgactacaccggcaagcgggtggagtacaacggctacgccaactggatcgcctccatctcccccgcccagctgcacttcaagcccgagatgaagcccgtgttcgacgccaccgtggagaacatccacgacatcatcaacggccgggagaagatcgccaaggccggcgactaccggcccatcaccgaccccgacgaggccgaggagtacatcaagatggtgtacaacatggtgatcggccccgtggccttcgcctccgccacctccgccctgtactgccgggacggctacctgctgggcgtgtccatctcccaccaggagtaccagggcgtgtacatcgactccgactgcctgaccgaggtggccgtgtactacctgcagaagatcctggactccgagaaccacaccatcgtgttccacaacctgaagttcgacatgcacttctacaagtaccacctgggcctgaccttcgacaaggcccacaaggagcggcggctgcacgacaccatgctgcagcactacgtgctggacgagcggcggggcacccacggcctgaagtccctggccatgaagtacaccgacatgggcgactacgacttcgagctggacaagttcaaggacgactactgcaaggcccacaagatcaagaaggaggacttcacctacgacctgatccccttcgacatcatgtggccctacgccgccaaggacaccgacgccaccatccggctgcacaacttcttcctgcccaagatcgagaagaacgagaagctgtgctccctgtactacgacgtgctgatgcccggctgcgtgttcctgcagcgggtggaggaccggggcgtgcccatctccatcgaccggctgaaggaggcccagtaccagctgacccacaacctgaacaaggcccgggagaagctgtacacctaccccgaggtgaagcagctggagcaggaccagaacgaggccttcaaccccaactccgtgaagcagctgcgggtgctgctgttcgactacgtgggcctgacccccaccggcaagctgaccgacaccggcgccgactccaccgacgccgaggccctgaacgagctggccacccagcaccccatcgccaagaccctgctggagatccggaagctgaccaagctgatctccacctacgtggagaagatcctgctgtccatcgacgccgacggctgcatccggaccggcttccacgagcacatgaccacctccggccggctgtcctcctccggcaagctgaacctgcagcagctgccccgggacgagtccatcatcaagggctgcgtggtggccccccccggctaccgggtgatcgcctgggacctgaccaccgccgaggtgtactacgccgccgtgctgtccggcgaccggaacatgcagcaggtgttcatcaacatgcggaacgagcccgacaagtaccccgacttccactccaacatcgcccacatggtgttcaagctgcagtgcgagccccgggacgtgaagaagctgttccccgccctgcggcaggccgccaaggccatcaccttcggcatcctgtacggctccggccccgccaaggtggcccactccgtgaacgaggccctgctggagcaggccgccaagaccggcgagcccttcgtggagtgcaccgtggccgacgccaaggagtacatcgagacctacttcggccagttcccccagctgaagcggtggatcgacaagtgccacgaccagatcaagaaccacggcttcatctactcccacttcggccggaagcggcggctgcacaacatccactccgaggaccggggcgtgcagggcgaggagatccggtccggcttcaacgccatcatccagtccgcctcctccgactccctgctgctgggcgccgtggacgccgacaacgagatcatctccctgggcctggagcaggagatgaagatcgtgatgctggtgcacgactccgtggtggccatcgtgcgggaggacctgatcgaccagtacaacgagatcctgatccggaacatccagaaggaccggggcatctccatccccggctgccccatcggcatcgactccgactccgaggccggcggctcccgggactactcctgcggcaagatgaagaagcagcacccctccatcgcctgcatcgacgacgacgagtacacccggtacgtgaagggcgtgctgctggacgccgagttcgagtacaagaagctggccgccatggacaaggagcaccccgaccactccaagtacaaggacgacaagttcatcgccgtgtgcaaggacctggacaacgtgaagcggatcctgggcgccggcggcggctccggcaagcggaccgccgacggctccggcggcggctcccccaagaagaagcggaaggtgtccgagtccgccacccccgagtccgtgtccggctggcggctgttcaagaagatctcctagctagcaccagcctcaagaacacccgaatggagtctctaagctacataataccaacttacactttacaaaatgttgtcccccaaaatgtagccattcgtatctgctcctaataaaaagaaagtttcttcacattctctcgagaaaaaaaaaaaatggaaaaaaaaaaaacggaaaaaaaaaaaaggtaaaaaaaaaaaatataaaaaaaaaaaacataaaaaaaaaaaacgaaaaaaaaaaaacgtaaaaaaaaaaaactcaaaaaaaaaaaagataaaaaaaaaaaacctaaaaaaaaaaaatgtaaaaaaaaaaaagggaaaaaaaaaaaacgcaaaaaaaaaaaacacaaaaaaaaaaaatgcaaaaaaaaaaaatcgaaaaaaaaaaaatctaaaaaaaaaaaacgaaaaaaaaaaaacccaaaaaaaaaaaagacaaaaaaaaaaaatagaaaaaaaaaaagttaaaaaaaaaaaactgaaaaaaaaaaaatttaaaaaaaaaaaatctag

SEQ ID NO: 1118 - RNA, 2694 nt, synthetic construct
  misc_feature 1..2694: note = Synthetic
  source 1..2694: mol_type = other RNA
atgaagatcgccgtggtggacaaggccctgaacaacacccggtacgacaagcacttccagctgtacggcgaggaggtggacgtgttccacatgtgcaacgagaagctgtccggccggctgctgaagaagcacatcaccatcggcacccccgagaaccccttcgaccccaacgactacgacttcgtgatcctggtgggcgccgagcccttcctgtacttcgccggcaagaagggcatcggcgactacaccggcaagcgggtggagtacaacggctacgccaactggatcgcctccatctcccccgcccagctgcacttcaagcccgagatgaagcccgtgttcgacgccaccgtggagaacatccacgacatcatcaacggccgggagaagatcgccaaggccggcgactaccggcccatcaccgaccccgacgaggccgaggagtacatcaagatggtgtacaacatggtgatcggccccgtggccttcgcctccgccacctccgccctgtactgccgggacggctacctgctgggcgtgtccatctcccaccaggagtaccagggcgtgtacatcgactccgactgcctgaccgaggtggccgtgtactacctgcagaagatcctggactccgagaaccacaccatcgtgttccacaacctgaagttcgacatgcacttctacaagtaccacctgggcctgaccttcgacaaggcccacaaggagcggcggctgcacgacaccatgctgcagcactacgtgctggacgagcggcggggcacccacggcctgaagtccctggccatgaagtacaccgacatgggcgactacgacttcgagctggacaagttcaaggacgactactgcaaggcccacaagatcaagaaggaggacttcacctacgacctgatccccttcgacatcatgtggccctacgccgccaaggacaccgacgccaccatccggctgcacaacttcttcctgcccaagatcgagaagaacgagaagctgtgctccctgtactacgacgtgctgatgcccggctgcgtgttcctgcagcgggtggaggaccggggcgtgcccatctccatcgaccggctgaaggaggcccagtaccagctgacccacaacctgaacaaggcccgggagaagctgtacacctaccccgaggtgaagcagctggagcaggaccagaacgaggccttcaaccccaactccgtgaagcagctgcgggtgctgctgttcgactacgtgggcctgacccccaccggcaagctgaccgacaccggcgccgactccaccgacgccgaggccctgaacgagctggccacccagcaccccatcgccaagaccctgctggagatccggaagctgaccaagctgatctccacctacgtggagaagatcctgctgtccatcgacgccgacggctgcatccggaccggcttccacgagcacatgaccacctccggccggctgtcctcctccggcaagctgaacctgcagcagctgccccgggacgagtccatcatcaagggctgcgtggtggccccccccggctaccgggtgatcgcctgggacctgaccaccgccgaggtgtactacgccgccgtgctgtccggcgaccggaacatgcagcaggtgttcatcaacatgcggaacgagcccgacaagtaccccgacttccactccaacatcgcccacatggtgttcaagctgcagtgcgagccccgggacgtgaagaagctgttccccgccctgcggcaggccgccaaggccatcaccttcggcatcctgtacggctccggccccgccaaggtggcccactccgtgaacgaggccctgctggagcaggccgccaagaccggcgagcccttcgtggagtgcaccgtggccgacgccaaggagtacatcgagacctacttcggccagttcccccagctgaagcggtggatcgacaagtgccacgaccagatcaagaaccacggcttcatctactcccacttcggccggaagcggcggctgcacaacatccactccgaggaccggggcgtgcagggcgaggagatccggtccggcttcaacgccatcatccagtccgcctcctccgactccctgctgctgggcgccgtggacgccgacaacgagatcatctccctgggcctggagcaggagatgaagatcgtgatgctggtgcacgactccgtggtggccatcgtgcgggaggacctgatcgaccagtacaacgagatcctgatccggaacatccagaaggaccggggcatctccatccccggctgccccatcggcatcgactccgactccgaggccggcggctcccgggactactcctgcggcaagatgaagaagcagcacccctccatcgcctgcatcgacgacgacgagtacacccggtacgtgaagggcgtgctgctggacgccgagttcgagtacaagaagctggccgccatggacaaggagcaccccgaccactccaagtacaaggacgacaagttcatcgccgtgtgcaaggacctggacaacgtgaagcggatcctgggcgccggcggcggctccggcaagcggaccgccgacggctccggcggcggctcccccaagaagaagcggaaggtgtccgagtccgccacccccgagtccgtgtccggctggcggctgttcaagaagatctcctag

SEQ ID NO: 1119 - protein, 897 aa, synthetic construct
  REGION 1..897: note = Synthetic
MKIAVVDKALNNTRYDKHFQLYGEEVDVFHMCNEKLSGRLLKKHITIGTPENPFDPNDYDFVILVGAEPFLYFAGKKGIGDYTGKRVEYNGYANWIASISPAQLHFKPEMKPVFDATVENIHDIINGREKIAKAGDYRPITDPDEAEEYIKMVYNMVIGPVAFASATSALYCRDGYLLGVSISHQEYQGVYIDSDCLTEVAVYYLQKILDSENHTIVFHNLKFDMHFYKYHLGLTFDKAHKERRLHDTMLQHYVLDERRGTHGLKSLAMKYTDMGDYDFELDKFKDDYCKAHKIKKEDFTYDLIPFDIMWPYAAKDTDATIRLHNFFLPKIEKNEKLCSLYYDVLMPGCVFLQRVEDRGVPISIDRLKEAQYQLTHNLNKAREKLYTYPEVKQLEQDQNEAFNPNSVKQLRVLLFDYVGLTPTGKLTDTGADSTDAEALNELATQHPIAKTLLEIRKLTKLISTYVEKILLSIDADGCIRTGFHEHMTTSGRLSSSGKLNLQQLPRDESIIKGCVVAPPGYRVIAWDLTTAEVYYAAVLSGDRNMQQVFINMRNEPDKYPDFHSNIAHMVFKLQCEPRDVKKLFPALRQAAKAITFGILYGSGPAKVAHSVNEALLEQAAKTGEPFVECTVADAKEYIETYFGQFPQLKRWIDKCHDQIKNHGFIYSHFGRKRRLHNIHSEDRGVQGEEIRSGFNAIIQSASSDSLLLGAVDADNEIISLGLEQEMKIVMLVHDSVVAIVREDLIDQYNEILIRNIQKDRGISIPGCPIGIDSDSEAGGSRDYSCGKMKKQHPSIACIDDDEYTRYVKGVLLDAEFEYKKLAAMDKEHPDHSKYKDDKFIAVCKDLDNVKRILGAGGGSGKRTADGSGGGSPKKKRKVSESATPESVSGWRLFKKIS

SEQ ID NO: 1120 - RNA, 2634 nt, synthetic construct
  misc_feature 1..2634: note = Synthetic
  source 1..2634: mol_type = other RNA
atgaagatcgccgtggtggacaaggccctgaacaacacccggtacgacaagcacttccagctgtacggcgaggaggtggacgtgttccacatgtgcaacgagaagctgtccggccggctgctgaagaagcacatcaccatcggcacccccgagaaccccttcgaccccaacgactacgacttcgtgatcctggtgggcgccgagcccttcctgtacttcgccggcaagaagggcatcggcgactacaccggcaagcgggtggagtacaacggctacgccaactggatcgcctccatctcccccgcccagctgcacttcaagcccgagatgaagcccgtgttcgacgccaccgtggagaacatccacgacatcatcaacggccgggagaagatcgccaaggccggcgactaccggcccatcaccgaccccgacgaggccgaggagtacatcaagatggtgtacaacatggtgatcggccccgtggccttcgcctccgccacctccgccctgtactgccgggacggctacctgctgggcgtgtccatctcccaccaggagtaccagggcgtgtacatcgactccgactgcctgaccgaggtggccgtgtactacctgcagaagatcctggactccgagaaccacaccatcgtgttccacaacctgaagttcgacatgcacttctacaagtaccacctgggcctgaccttcgacaaggcccacaaggagcggcggctgcacgacaccatgctgcagcactacgtgctggacgagcggcggggcacccacggcctgaagtccctggccatgaagtacaccgacatgggcgactacgacttcgagctggacaagttcaaggacgactactgcaaggcccacaagatcaagaaggaggacttcacctacgacctgatccccttcgacatcatgtggccctacgccgccaaggacaccgacgccaccatccggctgcacaacttcttcctgcccaagatcgagaagaacgagaagctgtgctccctgtactacgacgtgctgatgcccggctgcgtgttcctgcagcgggtggaggaccggggcgtgcccatctccatcgaccggctgaaggaggcccagtaccagctgacccacaacctgaacaaggcccgggagaagctgtacacctaccccgaggtgaagcagctggagcaggaccagaacgaggccttcaaccccaactccgtgaagcagctgcgggtgctgctgttcgactacgtgggcctgacccccaccggcaagctgaccgacaccggcgccgactccaccgacgccgaggccctgaacgagctggccacccagcaccccatcgccaagaccctgctggagatccggaagctgaccaagctgatctccacctacgtggagaagatcctgctgtccatcgacgccgacggctgcatccggaccggcttccacgagcacatgaccacctccggccggctgtcctcctccggcaagctgaacctgcagcagctgccccgggacgagtccatcatcaagggctgcgtggtggccccccccggctaccgggtgatcgcctgggacctgaccaccgccgaggtgtactacgccgccgtgctgtccggcgaccggaacatgcagcaggtgttcatcaacatgcggaacgagcccgacaagtaccccgacttccactccaacatcgcccacatggtgttcaagctgcagtgcgagccccgggacgtgaagaagctgttccccgccctgcggcaggccgccaaggccatcaccttcggcatcctgtacggctccggccccgccaaggtggcccactccgtgaacgaggccctgctggagcaggccgccaagaccggcgagcccttcgtggagtgcaccgtggccgacgccaaggagtacatcgagacctacttcggccagttcccccagctgaagcggtggatcgacaagtgccacgaccagatcaagaaccacggcttcatctactcccacttcggccggaagcggcggctgcacaacatccactccgaggaccggggcgtgcagggcgaggagatccggtccggcttcaacgccatcatccagtccgcctcctccgactccctgctgctgggcgccgtggacgccgacaacgagatcatctccctgggcctggagcaggagatgaagatcgtgatgctggtgcacgactccgtggtggccatcgtgcgggaggacctgatcgaccagtacaacgagatcctgatccggaacatccagaaggaccggggcatctccatccccggctgccccatcggcatcgactccgactccgaggccggcggctcccgggactactcctgcggcaagatgaagaagcagcacccctccatcgcctgcatcgacgacgacgagtacacccggtacgtgaagggcgtgctgctggacgccgagttcgagtacaagaagctggccgccatggacaaggagcaccccgaccactccaagtacaaggacgacaagttcatcgccgtgtgcaaggacctggacaacgtgaagcggatcctgggcgccggcggcggctccggcaagcggaccgccgacggctccggcggcggctcccccaagaagaagcggaaggtg

SEQ ID NO: 1121 - protein, 878 aa, synthetic construct
  REGION 1..878: note = Synthetic
MKIAVVDKALNNTRYDKHFQLYGEEVDVFHMCNEKLSGRLLKKHITIGTPENPFDPNDYDFVILVGAEPFLYFAGKKGIGDYTGKRVEYNGYANWIASISPAQLHFKPEMKPVFDATVENIHDIINGREKIAKAGDYRPITDPDEAEEYIKMVYNMVIGPVAFASATSALYCRDGYLLGVSISHQEYQGVYIDSDCLTEVAVYYLQKILDSENHTIVFHNLKFDMHFYKYHLGLTFDKAHKERRLHDTMLQHYVLDERRGTHGLKSLAMKYTDMGDYDFELDKFKDDYCKAHKIKKEDFTYDLIPFDIMWPYAAKDTDATIRLHNFFLPKIEKNEKLCSLYYDVLMPGCVFLQRVEDRGVPISIDRLKEAQYQLTHNLNKAREKLYTYPEVKQLEQDQNEAFNPNSVKQLRVLLFDYVGLTPTGKLTDTGADSTDAEALNELATQHPIAKTLLEIRKLTKLISTYVEKILLSIDADGCIRTGFHEHMTTSGRLSSSGKLNLQQLPRDESIIKGCVVAPPGYRVIAWDLTTAEVYYAAVLSGDRNMQQVFINMRNEPDKYPDFHSNIAHMVFKLQCEPRDVKKLFPALRQAAKAITFGILYGSGPAKVAHSVNEALLEQAAKTGEPFVECTVADAKEYIETYFGQFPQLKRWIDKCHDQIKNHGFIYSHFGRKRRLHNIHSEDRGVQGEEIRSGFNAIIQSASSDSLLLGAVDADNEIISLGLEQEMKIVMLVHDSVVAIVREDLIDQYNEILIRNIQKDRGISIPGCPIGIDSDSEAGGSRDYSCGKMKKQHPSIACIDDDEYTRYVKGVLLDAEFEYKKLAAMDKEHPDHSKYKDDKFIAVCKDLDNVKRILGAGGGSGKRTADGSGGGSPKKKRKV

SEQ ID NO: 1122 - RNA, 7396 nt, synthetic construct
  misc_feature 1..7396: note = Synthetic
  source 1..7396: mol_type = other RNA
gggaagctcagaataaacgctcaactttggccggatctgccaccatgaagatcgccgtggtggacaaggccctgaacaacacccggtacgacaagcacttccagctgtacggcgaggaggtggacgtgttccacatgtgcaacgagaagctgtccggccggctgctgaagaagcacatcaccatcggcacccccgagaaccccttcgaccccaacgactacgacttcgtgatcctggtgggcgccgagcccttcctgtacttcgccggcaagaagggcatcggcgactacaccggcaagcgggtggagtacaacggctacgccaactggatcgcctccatctcccccgcccagctgcacttcaagcccgagatgaagcccgtgttcgacgccaccgtggagaacatccacgacatcatcaacggccgggagaagatcgccaaggccggcgactaccggcccatcaccgaccccgacgaggccgaggagtacatcaagatggtgtacaacatggtgatcggccccgtggccttcgactccgagacctccgccctgtactgccgggacggctacctgctgggcgtgtccatctcccaccaggagtaccagggcgtgtacatcgactccgactgcctgaccgaggtggccgtgtactacctgcagaagatcctggactccgagaaccacaccatcgtgttccacaacctgaagttcgacatgcacttctacaagtaccacctgggcctgaccttcgacaaggcccacaaggagcggcggctgcacgacaccatgctgcagcactacgtgctggacgagcggcggggcacccacggcctgaagtccctggccatgaagtacaccgacatgggcgactacgacttcgagctggacaagttcaaggacgactactgcaaggcccacaagatcaagaaggaggacttcacctacgacctgatccccttcgacatcatgtggccctacgccgccaaggacaccgacgccaccatccggctgcacaacttcttcctgcccaagatcgagaagaacgagaagctgtgctccctgtactacgacgtgctgatgcccggctgcgtgttcctgcagcgggtggaggaccggggcgtgcccatctccatcgaccggctgaaggaggcccagtaccagctgacccacaacctgaacaaggcccgggagaagctgtacacctaccccgaggtgaagcagctggagcaggaccagaacgaggccttcaaccccaactccgtgaagcagctgcgggtgctgctgttcgactacgtgggcctgacccccaccggcaagctgaccgacaccggcgccgactccaccgacgccgaggccctgaacgagctggccacccagcaccccatcgccaagaccctgctggagatccggaagctgaccaagctgatctccacctacgtggagaagatcctgctgtccatcgacgccgacggctgcatccggaccggcttccacgagcacatgaccacctccggccggctgtcctcctccggcaagctgaacctgcagcagctgccccgggacgagtccatcatcaagggctgcgtggtggccccccccggctaccgggtgatcgcctgggacctgaccaccgccgaggtgtactacgccgccgtgctgtccggcgaccggaacatgcagcaggtgttcatcaacatgcggaacgagcccgacaagtaccccgacttccactccaacatcgcccacatggtgttcaagctgcagtgcgagccccgggacgtgaagaagctgttccccgccctgcggcaggccgccaaggccatcaccttcggcatcctgtacggctccggccccgccaaggtggcccactccgtgaacgaggccctgctggagcaggccgccaagaccggcgagcccttcgtggagtgcaccgtggccgacgccaaggagtacatcgagacctacttcggccagttcccccagctgaagcggtggatcgacaagtgccacgaccagatcaagaaccacggcttcatctactcccacttcggccggaagcggcggctgcacaacatccactccgaggaccggggcgtgcagggcgaggagatccggtccggcttcaacgccatcatccagtccgcctcctccgactccctgctgctgggcgccgtggacgccgacaacgagatcatctccctgggcctggagcaggagatgaagatcgtgatgctggtgcacgactccgtggtggccatcgtgcgggaggacctgatcgaccagtacaacgagatcctgatccggaacatccagaaggaccggggcatctccatccccggctgccccatcggcatcgactccgactccgaggccggcggctcccgggactactcctgcggcaagatgaagaagcagcacccctccatcgcctgcatcgacgacgacgagtacacccggtacgtgaagggcgtgctgctggacgccgagttcgagtacaagaagctggccgccatggacaaggagcaccccgaccactccaagtacaaggacgacaagttcatcgccgtgtgcaaggacctggacaacgtgaagcggatcctgggcgcctccggcggctcctccggcggctccaagcggaccgccgacggctccgagttcgagtcccccaagaagaagcggaaggtgtccggcggctcctccggcggctccgacaagaagtactccatcggcctggacatcggcaccaactccgtgggctgggccgtgatcaccgacgagtacaaggtgccctccaagaagttcaaggtgctgggcaacaccgaccggcactccatcaagaagaacctgatcggcgccctgctgttcgactccggcgagaccgccgaggccacccggctgaagcggaccgcccggcggcggtacacccggcggaagaaccggatctgctacctgcaggagatcttctccaacgagatggccaaggtggacgactccttcttccaccggctggaggagtccttcctggtggaggaggacaagaagcacgagcggcaccccatcttcggcaacatcgtggacgaggtggcctaccacgagaagtaccccaccatctaccacctgcggaagaagctggtggactccaccgacaaggccgacctgcggctgatctacctggccctggcccacatgatcaagttccggggccacttcctgatcgagggcgacctgaaccccgacaactccgacgtggacaagctgttcatccagctggtgcagacctacaaccagctgttcgaggagaaccccatcaacgcctccggcgtggacgccaaggccatcctgtccgcccggctgtccaagtcccggcggctggagaacctgatcgcccagctgcccggcgagaagaagaacggcctgttcggcaacctgatcgccctgtccctgggcctgacccccaacttcaagtccaacttcgacctggccgaggacgccaagctgcagctgtccaaggacacctacgacgacgacctggacaacctgctggcccagatcggcgaccagtacgccgacctgttcctggccgccaagaacctgtccgacgccatcctgctgtccgacatcctgcgggtgaacaccgagatcaccaaggcccccctgtccgcctccatgatcaagcggtacgacgagcaccaccaggacctgaccctgctgaaggccctggtgcggcagcagctgcccgagaagtacaaggagatcttcttcgaccagtccaagaacggctacgccggctacatcgacggcggcgcctcccaggaggagttctacaagttcatcaagcccatcctggagaagatggacggcaccgaggagctgctggtgaagctgaaccgggaggacctgctgcggaagcagcggaccttcgacaacggctccatcccccaccagatccacctgggcgagctgcacgccatcctgcggcggcaggaggacttctaccccttcctgaaggacaaccgggagaagatcgagaagatcctgaccttccggatcccctactacgtgggccccctggcccggggcaactcccggttcgcctggatgacccggaagtccgaggagaccatcaccccctggaacttcgaggaggtggtggacaagggcgcctccgcccagtccttcatcgagcggatgaccaacttcgacaagaacctgcccaacgagaaggtgctgcccaagcactccctgctgtacgagtacttcaccgtgtacaacgagctgaccaaggtgaagtacgtgaccgagggcatgcggaagcccgccttcctgtccggcgagcagaagaaggccatcgtggacctgctgttcaagaccaaccggaaggtgaccgtgaagcagctgaaggaggactacttcaagaagatcgagtgcttcgactccgtggagatctccggcgtggaggaccggttcaacgcctccctgggcacctaccacgacctgctgaagatcatcaaggacaaggacttcctggacaacgaggagaacgaggacatcctggaggacatcgtgctgaccctgaccctgttcgaggaccgggagatgatcgaggagcggctgaagacctacgcccacctgttcgacgacaaggtgatgaagcagctgaagcggcggcggtacaccggctggggccggctgtcccggaagctgatcaacggcatccgggacaagcagtccggcaagaccatcctggacttcctgaagtccgacggcttcgccaaccggaacttcatgcagctgatccacgacgactccctgaccttcaaggaggacatccagaaggcccaggtgtccggccagggcgactccctgcacgagcacatcgccaacctggccggctcccccgccatcaagaagggcatcctgcagaccgtgaaggtggtggacgagctggtgaaggtgatgggccggcacaagcccgagaacatcgtgatcgagatggcccgggagaaccagaccacccagaagggccagaagaactcccgggagcggatgaagcggatcgaggagggcatcaaggagctgggctcccagatcctgaaggagcaccccgtggagaacacccagctgcagaacgagaagctgtacctgtactacctgcagaacggccgggacatgtacgtggaccaggagctggacatcaaccggctgtccgactacgacgtggacgccatcgtgccccagtccttcctgaaggacgactccatcgacaacaaggtgctgacccggtccgacaagaaccggggcaagtccgacaacgtgccctccgaggaggtggtgaagaagatgaagaactactggcggcagctgctgaacgccaagctgatcacccagcggaagttcgacaacctgaccaaggccgagcggggcggcctgtccgagctggacaaggccggcttcatcaagcggcagctggtggagacccggcagatcaccaagcacgtggcccagatcctggactcccggatgaacaccaagtacgacgagaacgacaagctgatccgggaggtgaaggtgatcaccctgaagtccaagctggtgtccgacttccggaaggacttccagttctacaaggtgcgggagatcaacaactaccaccacgcccacgacgcctacctgaacgccgtggtgggcaccgccctgatcaagaagtaccccaagctggagtccgagttcgtgtacggcgactacaaggtgtacgacgtgcggaagatgatcgccaagtccgagcaggagatcggcaaggccaccgccaagtacttcttctactccaacatcatgaacttcttcaagaccgagatcaccctggccaacggcgagatccggaagcggcccctgatcgagaccaacggcgagaccggcgagatcgtgtgggacaagggccgggacttcgccaccgtgcggaaggtgctgtccatgccccaggtgaacatcgtgaagaagaccgaggtgcagaccggcggcttctccaaggagtccatcctgcccaagcggaactccgacaagctgatcgcccggaagaaggactgggaccccaagaagtacggcggcttcgactcccccaccgtggcctactccgtgctggtggtggccaaggtggagaagggcaagtccaagaagctgaagtccgtgaaggagctgctgggcatcaccatcatggagcggtcctccttcgagaagaaccccatcgacttcctggaggccaagggctacaaggaggtgaagaaggacctgatcatcaagctgcccaagtactccctgttcgagctggagaacggccggaagcggatgctggcctccgccggcgagctgcagaagggcaacgagctggccctgccctccaagtacgtgaacttcctgtacctggcctcccactacgagaagctgaagggctcccccgaggacaacgagcagaagcagctgttcgtggagcagcacaagcactacctggacgagatcatcgagcagatctccgagttctccaagcgggtgatcctggccgacgccaacctggacaaggtgctgtccgcctacaacaagcaccgggacaagcccatccgggagcaggccgagaacatcatccacctgttcaccctgaccaacctgggcgcccccgccgccttcaagtacttcgacaccaccatcgaccggaagcggtacacctccaccaaggaggtgctggacgccaccctgatccaccagtccatcaccggcctgtacgagacccggatcgacctgtcccagctgggcggcgactccggcggctccaagcggaccgccgacggctccgagttcgagtcccccaagaagaagcggaaggtgtagctagcaccagcctcaagaacacccgaatggagtctctaagctacataataccaacttacactttacaaaatgttgtcccccaaaatgtagccattcgtatctgctcctaataaaaagaaagtttcttcacattctctcgagaaaaaaaaaaaatggaaaaaaaaaaaacggaaaaaaaaaaaaggtaaaaaaaaaaaatataaaaaaaaaaaacataaaaaaaaaaaacgaaaaaaaaaaaacgtaaaaaaaaaaaactcaaaaaaaaaaaagataaaaaaaaaaaacctaaaaaaaaaaaatgtaaaaaaaaaaaagggaaaaaaaaaaaacgcaaaaaaaaaaaacacaaaaaaaaaaaatgcaaaaaaaaaaaatcgaaaaaaaaaaaatctaaaaaaaaaaaacgaaaaaaaaaaaacccaaaaaaaaaaaagacaaaaaaaaaaaatagaaaaaaaaaaagttaaaaaaaaaaaactgaaaaaaaaaaaatttaaaaaaaaaaaatctag

SEQ ID NO: 1123 - RNA, 6837 nt, synthetic construct
  misc_feature 1..6837: note = Synthetic
  source 1..6837: mol_type = other RNA
atgaagatcgccgtggtggacaaggccctgaacaacacccggtacgacaagcacttccagctgtacggcgaggaggtggacgtgttccacatgtgcaacgagaagctgtccggccggctgctgaagaagcacatcaccatcggcacccccgagaaccccttcgaccccaacgactacgacttcgtgatcctggtgggcgccgagcccttcctgtacttcgccggcaagaagggcatcggcgactacaccggcaagcgggtggagtacaacggctacgccaactggatcgcctccatctcccccgcccagctgcacttcaagcccgagatgaagcccgtgttcgacgccaccgtggagaacatccacgacatcatcaacggccgggagaagatcgccaaggccggcgactaccggcccatcaccgaccccgacgaggccgaggagtacatcaagatggtgtacaacatggtgatcggccccgtggccttcgactccgagacctccgccctgtactgccgggacggctacctgctgggcgtgtccatctcccaccaggagtaccagggcgtgtacatcgactccgactgcctgaccgaggtggccgtgtactacctgcagaagatcctggactccgagaaccacaccatcgtgttccacaacctgaagttcgacatgcacttctacaagtaccacctgggcctgaccttcgacaaggcccacaaggagcggcggctgcacgacaccatgctgcagcactacgtgctggacgagcggcggggcacccacggcctgaagtccctggccatgaagtacaccgacatgggcgactacgacttcgagctggacaagttcaaggacgactactgcaaggcccacaagatcaagaaggaggacttcacctacgacctgatccccttcgacatcatgtggccctacgccgccaaggacaccgacgccaccatccggctgcacaacttcttcctgcccaagatcgagaagaacgagaagctgtgctccctgtactacgacgtgctgatgcccggctgcgtgttcctgcagcgggtggaggaccggggcgtgcccatctccatcgaccggctgaaggaggcccagtaccagctgacccacaacctgaacaaggcccgggagaagctgtacacctaccccgaggtgaagcagctggagcaggaccagaacgaggccttcaaccccaactccgtgaagcagctgcgggtgctgctgttcgactacgtgggcctgacccccaccggcaagctgaccgacaccggcgccgactccaccgacgccgaggccctgaacgagctggccacccagcaccccatcgccaagaccctgctggagatccggaagctgaccaagctgatctccacctacgtggagaagatcctgctgtccatcgacgccgacggctgcatccggaccggcttccacgagcacatgaccacctccggccggctgtcctcctccggcaagctgaacctgcagcagctgccccgggacgagtccatcatcaagggctgcgtggtggccccccccggctaccgggtgatcgcctgggacctgaccaccgccgaggtgtactacgccgccgtgctgtccggcgaccggaacatgcagcaggtgttcatcaacatgcggaacgagcccgacaagtaccccgacttccactccaacatcgcccacatggtgttcaagctgcagtgcgagccccgggacgtgaagaagctgttccccgccctgcggcaggccgccaaggccatcaccttcggcatcctgtacggctccggccccgccaaggtggcccactccgtgaacgaggccctgctggagcaggccgccaagaccggcgagcccttcgtggagtgcaccgtggccgacgccaaggagtacatcgagacctacttcggccagttcccccagctgaagcggtggatcgacaagtgccacgaccagatcaagaaccacggcttcatctactcccacttcggccggaagcggcggctgcacaacatccactccgaggaccggggcgtgcagggcgaggagatccggtccggcttcaacgccatcatccagtccgcctcctccgactccctgctgctgggcgccgtggacgccgacaacgagatcatctccctgggcctggagcaggagatgaagatcgtgatgctggtgcacgactccgtggtggccatcgtgcgggaggacctgatcgaccagtacaacgagatcctgatccggaacatccagaaggaccggggcatctccatccccggctgccccatcggcatcgactccgactccgaggccggcggctcccgggactactcctgcggcaagatgaagaagcagcacccctccatcgcctgcatcgacgacgacgagtacacccggtacgtgaagggcgtgctgctggacgccgagttcgagtacaagaagctggccgccatggacaaggagcaccccgaccactccaagtacaaggacgacaagttcatcgccgtgtgcaaggacctggacaacgtgaagcggatcctgggcgcctccggcggctcctccggcggctccaagcggaccgccgacggctccgagttcgagtcccccaagaagaagcggaaggtgtccggcggctcctccggcggctccgacaagaagtactccatcggcctggacatcggcaccaactccgtgggctgggccgtgatcaccgacgagtacaaggtgccctccaagaagttcaaggtgctgggcaacaccgaccggcactccatcaagaagaacctgatcggcgccctgctgttcgactccggcgagaccgccgaggccacccggctgaagcggaccgcccggcggcggtacacccggcggaagaaccggatctgctacctgcaggagatcttctccaacgagatggccaaggtggacgactccttcttccaccggctggaggagtccttcctggtggaggaggacaagaagcacgagcggcaccccatcttcggcaacatcgtggacgaggtggcctaccacgagaagtaccccaccatctaccacctgcggaagaagctggtggactccaccgacaaggccgacctgcggctgatctacctggccctggcccacatgatcaagttccggggccacttcctgatcgagggcgacctgaaccccgacaactccgacgtggacaagctgttcatccagctggtgcagacctacaaccagctgttcgaggagaaccccatcaacgcctccggcgtggacgccaaggccatcctgtccgcccggctgtccaagtcccggcggctggagaacctgatcgcccagctgcccggcgagaagaagaacggcctgttcggcaacctgatcgccctgtccctgggcctgacccccaacttcaagtccaacttcgacctggccgaggacgccaagctgcagctgtccaaggacacctacgacgacgacctggacaacctgctggcccagatcggcgaccagtacgccgacctgttcctggccgccaagaacctgtccgacgccatcctgctgtccgacatcctgcgggtgaacaccgagatcaccaaggcccccctgtccgcctccatgatcaagcggtacgacgagcaccaccaggacctgaccctgctgaaggccctggtgcggcagcagctgcccgagaagtacaaggagatcttcttcgaccagtccaagaacggctacgccggctacatcgacggcggcgcctcccaggaggagttctacaagttcatcaagcccatcctggagaagatggacggcaccgaggagctgctggtgaagctgaaccgggaggacctgctgcggaagcagcggaccttcgacaacggctccatcccccaccagatccacctgggcgagctgcacgccatcctgcggcggcaggaggacttctaccccttcctgaaggacaaccgggagaagatcgagaagatcctgaccttccggatcccctactacgtgggccccctggcccggggcaactcccggttcgcctggatgacccggaagtccgaggagaccatcaccccctggaacttcgaggaggtggtggacaagggcgcctccgcccagtccttcatcgagcggatgaccaacttcgacaagaacctgcccaacgagaaggtgctgcccaagcactccctgctgtacgagtacttcaccgtgtacaacgagctgaccaaggtgaagtacgtgaccgagggcatgcggaagcccgccttcctgtccggcgagcagaagaaggccatcgtggacctgctgttcaagaccaaccggaaggtgaccgtgaagcagctgaaggaggactacttcaagaagatcgagtgcttcgactccgtggagatctccggcgtggaggaccggttcaacgcctccctgggcacctaccacgacctgctgaagatcatcaaggacaaggacttcctggacaacgaggagaacgaggacatcctggaggacatcgtgctgaccctgaccctgttcgaggaccgggagatgatcgaggagcggctgaagacctacgcccacctgttcgacgacaaggtgatgaagcagctgaagcggcggcggtacaccggctggggccggctgtcccggaagctgatcaacggcatccgggacaagcagtccggcaagaccatcctggacttcctgaagtccgacggcttcgccaaccggaacttcatgcagctgatccacgacgactccctgaccttcaaggaggacatccagaaggcccaggtgtccggccagggcgactccctgcacgagcacatcgccaacctggccggctcccccgccatcaagaagggcatcctgcagaccgtgaaggtggtggacgagctggtgaaggtgatgggccggcacaagcccgagaacatcgtgatcgagatggcccgggagaaccagaccacccagaagggccagaagaactcccgggagcggatgaagcggatcgaggagggcatcaaggagctgggctcccagatcctgaaggagcaccccgtggagaacacccagctgcagaacgagaagctgtacctgtactacctgcagaacggccgggacatgtacgtggaccaggagctggacatcaaccggctgtccgactacgacgtggacgccatcgtgccccagtccttcctgaaggacgactccatcgacaacaaggtgctgacccggtccgacaagaaccggggcaagtccgacaacgtgccctccgaggaggtggtgaagaagatgaagaactactggcggcagctgctgaacgccaagctgatcacccagcggaagttcgacaacctgaccaaggccgagcggggcggcctgtccgagctggacaaggccggcttcatcaagcggcagctggtggagacccggcagatcaccaagcacgtggcccagatcctggactcccggatgaacaccaagtacgacgagaacgacaagctgatccgggaggtgaaggtgatcaccctgaagtccaagctggtgtccgacttccggaaggacttccagttctacaaggtgcgggagatcaacaactaccaccacgcccacgacgcctacctgaacgccgtggtgggcaccgccctgatcaagaagtaccccaagctggagtccgagttcgtgtacggcgactacaaggtgtacgacgtgcggaagatgatcgccaagtccgagcaggagatcggcaaggccaccgccaagtacttcttctactccaacatcatgaacttcttcaagaccgagatcaccctggccaacggcgagatccggaagcggcccctgatcgagaccaacggcgagaccggcgagatcgtgtgggacaagggccgggacttcgccaccgtgcggaaggtgctgtccatgccccaggtgaacatcgtgaagaagaccgaggtgcagaccggcggcttctccaaggagtccatcctgcccaagcggaactccgacaagctgatcgcccggaagaaggactgggaccccaagaagtacggcggcttcgactcccccaccgtggcctactccgtgctggtggtggccaaggtggagaagggcaagtccaagaagctgaagtccgtgaaggagctgctgggcatcaccatcatggagcggtcctccttcgagaagaaccccatcgacttcctggaggccaagggctacaaggaggtgaagaaggacctgatcatcaagctgcccaagtactccctgttcgagctggagaacggccggaagcggatgctggcctccgccggcgagctgcagaagggcaacgagctggccctgccctccaagtacgtgaacttcctgtacctggcctcccactacgagaagctgaagggctcccccgaggacaacgagcagaagcagctgttcgtggagcagcacaagcactacctggacgagatcatcgagcagatctccgagttctccaagcgggtgatcctggccgacgccaacctggacaaggtgctgtccgcctacaacaagcaccgggacaagcccatccgggagcaggccgagaacatcatccacctgttcaccctgaccaacctgggcgcccccgccgccttcaagtacttcgacaccaccatcgaccggaagcggtacacctccaccaaggaggtgctggacgccaccctgatccaccagtccatcaccggcctgtacgagacccggatcgacctgtcccagctgggcggcgactccggcggctccaagcggaccgccgacggctccgagttcgagtcccccaagaagaagcggaaggtgtag

SEQ ID NO: 1124 - protein, 2278 aa, synthetic construct
  REGION 1..2278: note = Synthetic
MKIAVVDKALNNTRYDKHFQLYGEEVDVFHMCNEKLSGRLLKKHITIGTPENPFDPNDYDFVILVGAEPFLYFAGKKGIGDYTGKRVEYNGYANWIASISPAQLHFKPEMKPVFDATVENIHDIINGREKIAKAGDYRPITDPDEAEEYIKMVYNMVIGPVAFDSETSALYCRDGYLLGVSISHQEYQGVYIDSDCLTEVAVYYLQKILDSENHTIVFHNLKFDMHFYKYHLGLTFDKAHKERRLHDTMLQHYVLDERRGTHGLKSLAMKYTDMGDYDFELDKFKDDYCKAHKIKKEDFTYDLIPFDIMWPYAAKDTDATIRLHNFFLPKIEKNEKLCSLYYDVLMPGCVFLQRVEDRGVPISIDRLKEAQYQLTHNLNKAREKLYTYPEVKQLEQDQNEAFNPNSVKQLRVLLFDYVGLTPTGKLTDTGADSTDAEALNELATQHPIAKTLLEIRKLTKLISTYVEKILLSIDADGCIRTGFHEHMTTSGRLSSSGKLNLQQLPRDESIIKGCVVAPPGYRVIAWDLTTAEVYYAAVLSGDRNMQQVFINMRNEPDKYPDFHSNIAHMVFKLQCEPRDVKKLFPALRQAAKAITFGILYGSGPAKVAHSVNEALLEQAAKTGEPFVECTVADAKEYIETYFGQFPQLKRWIDKCHDQIKNHGFIYSHFGRKRRLHNIHSEDRGVQGEEIRSGFNAIIQSASSDSLLLGAVDADNEIISLGLEQEMKIVMLVHDSVVAIVREDLIDQYNEILIRNIQKDRGISIPGCPIGIDSDSEAGGSRDYSCGKMKKQHPSIACIDDDEYTRYVKGVLLDAEFEYKKLAAMDKEHPDHSKYKDDKFIAVCKDLDNVKRILGASGGSSGGSKRTADGSEFESPKKKRKVSGGSSGGSDKKYSIGLDIGTNSVGWAVITDEYKVPSKKFKVLGNTDRHSIKKNLIGALLFDSGETAEATRLKRTARRRYTRRKNRICYLQEIFSNEMAKVDDSFFHRLEESFLVEEDKKHERHPIFGNIVDEVAYHEKYPTIYHLRKKLVDSTDKADLRLIYLALAHMIKFRGHFLIEGDLNPDNSDVDKLFIQLVQTYNQLFEENPINASGVDAKAILSARLSKSRRLENLIAQLPGEKKNGLFGNLIALSLGLTPNFKSNFDLAEDAKLQLSKDTYDDDLDNLLAQIGDQYADLFLAAKNLSDAILLSDILRVNTEITKAPLSASMIKRYDEHHQDLTLLKALVRQQLPEKYKEIFFDQSKNGYAGYIDGGASQEEFYKFIKPILEKMDGTEELLVKLNREDLLRKQRTFDNGSIPHQIHLGELHAILRRQEDFYPFLKDNREKIEKILTFRIPYYVGPLARGNSRFAWMTRKSEETITPWNFEEVVDKGASAQSFIERMTNFDKNLPNEKVLPKHSLLYEYFTVYNELTKVKYVTEGMRKPAFLSGEQKKAIVDLLFKTNRKVTVKQLKEDYFKKIECFDSVEISGVEDRFNASLGTYHDLLKIIKDKDFLDNEENEDILEDIVLTLTLFEDREMIEERLKTYAHLFDDKVMKQLKRRRYTGWGRLSRKLINGIRDKQSGKTILDFLKSDGFANRNFMQLIHDDSLTFKEDIQKAQVSGQGDSLHEHIANLAGSPAIKKGILQTVKVVDELVKVMGRHKPENIVIEMARENQTTQKGQKNSRERMKRIEEGIKELGSQILKEHPVENTQLQNEKLYLYYLQNGRDMYVDQELDINRLSDYDVDAIVPQSFLKDDSIDNKVLTRSDKNRGKSDNVPSEEVVKKMKNYWRQLLNAKLITQRKFDNLTKAERGGLSELDKAGFIKRQLVETRQITKHVAQILDSRMNTKYDENDKLIREVKVITLKSKLVSDFRKDFQFYKVREINNYHHAHDAYLNAVVGTALIKKYPKLESEFVYGDYKVYDVRKMIAKSEQEIGKATAKYFFYSNIMNFFKTEITLANGEIRKRPLIETNGETGEIVWDKGRDFATVRKVLSMPQVNIVKKTEVQTGGFSKESILPKRNSDKLIARKKDWDPKKYGGFDSPTVAYSVLVVAKVEKGKSKKLKSVKELLGITIMERSSFEKNPIDFLEAKGYKEVKKDLIIKLPKYSLFELENGRKRMLASAGELQKGNELALPSKYVNFLYLASHYEKLKGSPEDNEQKQLFVEQHKHYLDEIIEQISEFSKRVILADANLDKVLSAYNKHRDKPIREQAENIIHLFTLTNLGAPAAFKYFDTTIDRKRYTSTKEVLDATLIHQSITGLYETRIDLSQLGGDSGGSKRTADGSEFESPKKKRKV

SEQ ID NO: 1125 - RNA, 7444 nt, synthetic construct
  misc_feature 1..7444: note = Synthetic
  source 1..7444: mol_type = other RNA
gggaagctcagaataaacgctcaactttggccggatctgccaccatgaagatcgccgtggtggacaaggccctgaacaacacccggtacgacaagcacttccagctgtacggcgaggaggtggacgtgttccacatgtgcaacgagaagctgtccggccggctgctgaagaagcacatcaccatcggcacccccgagaaccccttcgaccccaacgactacgacttcgtgatcctggtgggcgccgagcccttcctgtacttcgccggcaagaagggcatcggcgactacaccggcaagcgggtggagtacaacggctacgccaactggatcgcctccatctcccccgcccagctgcacttcaagcccgagatgaagcccgtgttcgacgccaccgtggagaacatccacgacatcatcaacggccgggagaagatcgccaaggccggcgactaccggcccatcaccgaccccgacgaggccgaggagtacatcaagatggtgtacaacatggtgatcggccccgtggccttcgcctccgccacctccgccctgtactgccgggacggctacctgctgggcgtgtccatctcccaccaggagtaccagggcgtgtacatcgactccgactgcctgaccgaggtggccgtgtactacctgcagaagatcctggactccgagaaccacaccatcgtgttccacaacctgaagttcgacatgcacttctacaagtaccacctgggcctgaccttcgacaaggcccacaaggagcggcggctgcacgacaccatgctgcagcactacgtgctggacgagcggcggggcacccacggcctgaagtccctggccatgaagtacaccgacatgggcgactacgacttcgagctggacaagttcaaggacgactactgcaaggcccacaagatcaagaaggaggacttcacctacgacctgatccccttcgacatcatgtggccctacgccgccaaggacaccgacgccaccatccggctgcacaacttcttcctgcccaagatcgagaagaacgagaagctgtgctccctgtactacgacgtgctgatgcccggctgcgtgttcctgcagcgggtggaggaccggggcgtgcccatctccatcgaccggctgaaggaggcccagtaccagctgacccacaacctgaacaaggcccgggagaagctgtacacctaccccgaggtgaagcagctggagcaggaccagaacgaggccttcaaccccaactccgtgaagcagctgcgggtgctgctgttcgactacgtgggcctgacccccaccggcaagctgaccgacaccggcgccgactccaccgacgccgaggccctgaacgagctggccacccagcaccccatcgccaagaccctgctggagatccggaagctgaccaagctgatctccacctacgtggagaagatcctgctgtccatcgacgccgacggctgcatccggaccggcttccacgagcacatgaccacctccggccggctgtcctcctccggcaagctgaacctgcagcagctgccccgggacgagtccatcatcaagggctgcgtggtggccccccccggctaccgggtgatcgcctgggacctgaccaccgccgaggtgtactacgccgccgtgctgtccggcgaccggaacatgcagcaggtgttcatcaacatgcggaacgagcccgacaagtaccccgacttccactccaacatcgcccacatggtgttcaagctgcagtgcgagccccgggacgtgaagaagctgttccccgccctgcggcaggccgccaaggccatcaccttcggcatcctgtacggctccggccccgccaaggtggcccactccgtgaacgaggccctgctggagcaggccgccaagaccggcgagcccttcgtggagtgcaccgtggccgacgccaaggagtacatcgagacctacttcggccagttcccccagctgaagcggtggatcgacaagtgccacgaccagatcaagaaccacggcttcatctactcccacttcggccggaagcggcggctgcacaacatccactccgaggaccggggcgtgcagggcgaggagatccggtccggcttcaacgccatcatccagtccgcctcctccgactccctgctgctgggcgccgtggacgccgacaacgagatcatctccctgggcctggagcaggagatgaagatcgtgatgctggtgcacgactccgtggtggccatcgtgcgggaggacctgatcgaccagtacaacgagatcctgatccggaacatccagaaggaccggggcatctccatccccggctgccccatcggcatcgactccgactccgaggccggcggctcccgggactactcctgcggcaagatgaagaagcagcacccctccatcgcctgcatcgacgacgacgagtacacccggtacgtgaagggcgtgctgctggacgccgagttcgagtacaagaagctggccgccatggacaaggagcaccccgaccactccaagtacaaggacgacaagttcatcgccgtgtgcaaggacctggacaacgtgaagcggatcctgggcgccggcgcccccgagtccgccaccgagtccggcggcacctccaccgagtccgagggctccgccggcacctccaccgagtccgagggctccgccggctccgccggctccacctccggctcctcctccggcgacaagaagtactccatcggcctggacatcggcaccaactccgtgggctgggccgtgatcaccgacgagtacaaggtgccctccaagaagttcaaggtgctgggcaacaccgaccggcactccatcaagaagaacctgatcggcgccctgctgttcgactccggcgagaccgccgaggccacccggctgaagcggaccgcccggcggcggtacacccggcggaagaaccggatctgctacctgcaggagatcttctccaacgagatggccaaggtggacgactccttcttccaccggctggaggagtccttcctggtggaggaggacaagaagcacgagcggcaccccatcttcggcaacatcgtggacgaggtggcctaccacgagaagtaccccaccatctaccacctgcggaagaagctggtggactccaccgacaaggccgacctgcggctgatctacctggccctggcccacatgatcaagttccggggccacttcctgatcgagggcgacctgaaccccgacaactccgacgtggacaagctgttcatccagctggtgcagacctacaaccagctgttcgaggagaaccccatcaacgcctccggcgtggacgccaaggccatcctgtccgcccggctgtccaagtcccggcggctggagaacctgatcgcccagctgcccggcgagaagaagaacggcctgttcggcaacctgatcgccctgtccctgggcctgacccccaacttcaagtccaacttcgacctggccgaggacgccaagctgcagctgtccaaggacacctacgacgacgacctggacaacctgctggcccagatcggcgaccagtacgccgacctgttcctggccgccaagaacctgtccgacgccatcctgctgtccgacatcctgcgggtgaacaccgagatcaccaaggcccccctgtccgcctccatgatcaagcggtacgacgagcaccaccaggacctgaccctgctgaaggccctggtgcggcagcagctgcccgagaagtacaaggagatcttcttcgaccagtccaagaacggctacgccggctacatcgacggcggcgcctcccaggaggagttctacaagttcatcaagcccatcctggagaagatggacggcaccgaggagctgctggtgaagctgaaccgggaggacctgctgcggaagcagcggaccttcgacaacggctccatcccccaccagatccacctgggcgagctgcacgccatcctgcggcggcaggaggacttctaccccttcctgaaggacaaccgggagaagatcgagaagatcctgaccttccggatcccctactacgtgggccccctggcccggggcaactcccggttcgcctggatgacccggaagtccgaggagaccatcaccccctggaacttcgaggaggtggtggacaagggcgcctccgcccagtccttcatcgagcggatgaccaacttcgacaagaacctgcccaacgagaaggtgctgcccaagcactccctgctgtacgagtacttcaccgtgtacaacgagctgaccaaggtgaagtacgtgaccgagggcatgcggaagcccgccttcctgtccggcgagcagaagaaggccatcgtggacctgctgttcaagaccaaccggaaggtgaccgtgaagcagctgaaggaggactacttcaagaagatcgagtgcttcgactccgtggagatctccggcgtggaggaccggttcaacgcctccctgggcacctaccacgacctgctgaagatcatcaaggacaaggacttcctggacaacgaggagaacgaggacatcctggaggacatcgtgctgaccctgaccctgttcgaggaccgggagatgatcgaggagcggctgaagacctacgcccacctgttcgacgacaaggtgatgaagcagctgaagcggcggcggtacaccggctggggccggctgtcccggaagctgatcaacggcatccgggacaagcagtccggcaagaccatcctggacttcctgaagtccgacggcttcgccaaccggaacttcatgcagctgatccacgacgactccctgaccttcaaggaggacatccagaaggcccaggtgtccggccagggcgactccctgcacgagcacatcgccaacctggccggctcccccgccatcaagaagggcatcctgcagaccgtgaaggtggtggacgagctggtgaaggtgatgggccggcacaagcccgagaacatcgtgatcgagatggcccgggagaaccagaccacccagaagggccagaagaactcccgggagcggatgaagcggatcgaggagggcatcaaggagctgggctcccagatcctgaaggagcaccccgtggagaacacccagctgcagaacgagaagctgtacctgtactacctgcagaacggccgggacatgtacgtggaccaggagctggacatcaaccggctgtccgactacgacgtggacgccatcgtgccccagtccttcctgaaggacgactccatcgacaacaaggtgctgacccggtccgacaagaaccggggcaagtccgacaacgtgccctccgaggaggtggtgaagaagatgaagaactactggcggcagctgctgaacgccaagctgatcacccagcggaagttcgacaacctgaccaaggccgagcggggcggcctgtccgagctggacaaggccggcttcatcaagcggcagctggtggagacccggcagatcaccaagcacgtggcccagatcctggactcccggatgaacaccaagtacgacgagaacgacaagctgatccgggaggtgaaggtgatcaccctgaagtccaagctggtgtccgacttccggaaggacttccagttctacaaggtgcgggagatcaacaactaccaccacgcccacgacgcctacctgaacgccgtggtgggcaccgccctgatcaagaagtaccccaagctggagtccgagttcgtgtacggcgactacaaggtgtacgacgtgcggaagatgatcgccaagtccgagcaggagatcggcaaggccaccgccaagtacttcttctactccaacatcatgaacttcttcaagaccgagatcaccctggccaacggcgagatccggaagcggcccctgatcgagaccaacggcgagaccggcgagatcgtgtgggacaagggccgggacttcgccaccgtgcggaaggtgctgtccatgccccaggtgaacatcgtgaagaagaccgaggtgcagaccggcggcttctccaaggagtccatcctgcccaagcggaactccgacaagctgatcgcccggaagaaggactgggaccccaagaagtacggcggcttcgactcccccaccgtggcctactccgtgctggtggtggccaaggtggagaagggcaagtccaagaagctgaagtccgtgaaggagctgctgggcatcaccatcatggagcggtcctccttcgagaagaaccccatcgacttcctggaggccaagggctacaaggaggtgaagaaggacctgatcatcaagctgcccaagtactccctgttcgagctggagaacggccggaagcggatgctggcctccgccggcgagctgcagaagggcaacgagctggccctgccctccaagtacgtgaacttcctgtacctggcctcccactacgagaagctgaagggctcccccgaggacaacgagcagaagcagctgttcgtggagcagcacaagcactacctggacgagatcatcgagcagatctccgagttctccaagcgggtgatcctggccgacgccaacctggacaaggtgctgtccgcctacaacaagcaccgggacaagcccatccgggagcaggccgagaacatcatccacctgttcaccctgaccaacctgggcgcccccgccgccttcaagtacttcgacaccaccatcgaccggaagcggtacacctccaccaaggaggtgctggacgccaccctgatccaccagtccatcaccggcctgtacgagacccggatcgacctgtcccagctgggcggcgacggcggcggctcccccaagaagaagcggaaggtgtccgagtccgccacccccgagtccgtgtccggctggcggctgttcaagaagatctcctgactagcaccagcctcaagaacacccgaatggagtctctaagctacataataccaacttacactttacaaaatgttgtcccccaaaatgtagccattcgtatctgctcctaataaaaagaaagtttcttcacattctctcgagaaaaaaaaaaaatggaaaaaaaaaaaacggaaaaaaaaaaaaggtaaaaaaaaaaaatataaaaaaaaaaaacataaaaaaaaaaaacgaaaaaaaaaaaacgtaaaaaaaaaaaactcaaaaaaaaaaaagataaaaaaaaaaaacctaaaaaaaaaaaatgtaaaaaaaaaaaagggaaaaaaaaaaaacgcaaaaaaaaaaaacacaaaaaaaaaaaatgcaaaaaaaaaaaatcgaaaaaaaaaaaatctaaaaaaaaaaaacgaaaaaaaaaaaacccaaaaaaaaaaaagacaaaaaaaaaaaatagaaaaaaaaaaagttaaaaaaaaaaaactgaaaaaaaaaaaatttaaaaaaaaaaaatctag

SEQ ID NO: 1126 - RNA, 6885 nt, synthetic construct
  misc_feature 1..6885: note = Synthetic
  source 1..6885: mol_type = other RNA
atgaagatcgccgtggtggacaaggccctgaacaacacccggtacgacaagcacttccagctgtacggcgaggaggtggacgtgttccacatgtgcaacgagaagctgtccggccggctgctgaagaagcacatcaccatcggcacccccgagaaccccttcgaccccaacgactacgacttcgtgatcctggtgggcgccgagcccttcctgtacttcgccggcaagaagggcatcggcgactacaccggcaagcgggtggagtacaacggctacgccaactggatcgcctccatctcccccgcccagctgcacttcaagcccgagatgaagcccgtgttcgacgccaccgtggagaacatccacgacatcatcaacggccgggagaagatcgccaaggccggcgactaccggcccatcaccgaccccgacgaggccgaggagtacatcaagatggtgtacaacatggtgatcggccccgtggccttcgcctccgccacctccgccctgtactgccgggacggctacctgctgggcgtgtccatctcccaccaggagtaccagggcgtgtacatcgactccgactgcctgaccgaggtggccgtgtactacctgcagaagatcctggactccgagaaccacaccatcgtgttccacaacctgaagttcgacatgcacttctacaagtaccacctgggcctgaccttcgacaaggcccacaaggagcggcggctgcacgacaccatgctgcagcactacgtgctggacgagcggcggggcacccacggcctgaagtccctggccatgaagtacaccgacatgggcgactacgacttcgagctggacaagttcaaggacgactactgcaaggcccacaagatcaagaaggaggacttcacctacgacctgatccccttcgacatcatgtggccctacgccgccaaggacaccgacgccaccatccggctgcacaacttcttcctgcccaagatcgagaagaacgagaagctgtgctccctgtactacgacgtgctgatgcccggctgcgtgttcctgcagcgggtggaggaccggggcgtgcccatctccatcgaccggctgaaggaggcccagtaccagctgacccacaacctgaacaaggcccgggagaagctgtacacctaccccgaggtgaagcagctggagcaggaccagaacgaggccttcaaccccaactccgtgaagcagctgcgggtgctgctgttcgactacgtgggcctgacccccaccggcaagctgaccgacaccggcgccgactccaccgacgccgaggccctgaacgagctggccacccagcaccccatcgccaagaccctgctggagatccggaagctgaccaagctgatctccacctacgtggagaagatcctgctgtccatcgacgccgacggctgcatccggaccggcttccacgagcacatgaccacctccggccggctgtcctcctccggcaagctgaacctgcagcagctgccccgggacgagtccatcatcaagggctgcgtggtggccccccccggctaccgggtgatcgcctgggacctgaccaccgccgaggtgtactacgccgccgtgctgtccggcgaccggaacatgcagcaggtgttcatcaacatgcggaacgagcccgacaagtaccccgacttccactccaacatcgcccacatggtgttcaagctgcagtgcgagccccgggacgtgaagaagctgttccccgccctgcggcaggccgccaaggccatcaccttcggcatcctgtacggctccggccccgccaaggtggcccactccgtgaacgaggccctgctggagcaggccgccaagaccggcgagcccttcgtggagtgcaccgtggccgacgccaaggagtacatcgagacctacttcggccagttcccccagctgaagcggtggatcgacaagtgccacgaccagatcaagaaccacggcttcatctactcccacttcggccggaagcggcggctgcacaacatccactccgaggaccggggcgtgcagggcgaggagatccggtccggcttcaacgccatcatccagtccgcctcctccgactccctgctgctgggcgccgtggacgccgacaacgagatcatctccctgggcctggagcaggagatgaagatcgtgatgctggtgcacgactccgtggtggccatcgtgcgggaggacctgatcgaccagtacaacgagatcctgatccggaacatccagaaggaccggggcatctccatccccggctgccccatcggcatcgactccgactccgaggccggcggctcccgggactactcctgcggcaagatgaagaagcagcacccctccatcgcctgcatcgacgacgacgagtacacccggtacgtgaagggcgtgctgctggacgccgagttcgagtacaagaagctggccgccatggacaaggagcaccccgaccactccaagtacaaggacgacaagttcatcgccgtgtgcaaggacctggacaacgtgaagcggatcctgggcgccggcgcccccgagtccgccaccgagtccggcggcacctccaccgagtccgagggctccgccggcacctccaccgagtccgagggctccgccggctccgccggctccacctccggctcctcctccggcgacaagaagtactccatcggcctggacatcggcaccaactccgtgggctgggccgtgatcaccgacgagtacaaggtgccctccaagaagttcaaggtgctgggcaacaccgaccggcactccatcaagaagaacctgatcggcgccctgctgttcgactccggcgagaccgccgaggccacccggctgaagcggaccgcccggcggcggtacacccggcggaagaaccggatctgctacctgcaggagatcttctccaacgagatggccaaggtggacgactccttcttccaccggctggaggagtccttcctggtggaggaggacaagaagcacgagcggcaccccatcttcggcaacatcgtggacgaggtggcctaccacgagaagtaccccaccatctaccacctgcggaagaagctggtggactccaccgacaaggccgacctgcggctgatctacctggccctggcccacatgatcaagttccggggccacttcctgatcgagggcgacctgaaccccgacaactccgacgtggacaagctgttcatccagctggtgcagacctacaaccagctgttcgaggagaaccccatcaacgcctccggcgtggacgccaaggccatcctgtccgcccggctgtccaagtcccggcggctggagaacctgatcgcccagctgcccggcgagaagaagaacggcctgttcggcaacctgatcgccctgtccctgggcctgacccccaacttcaagtccaacttcgacctggccgaggacgccaagctgcagctgtccaaggacacctacgacgacgacctggacaacctgctggcccagatcggcgaccagtacgccgacctgttcctggccgccaagaacctgtccgacgccatcctgctgtccgacatcctgcgggtgaacaccgagatcaccaaggcccccctgtccgcctccatgatcaagcggtacgacgagcaccaccaggacctgaccctgctgaaggccctggtgcggcagcagctgcccgagaagtacaaggagatcttcttcgaccagtccaagaacggctacgccggctacatcgacggcggcgcctcccaggaggagttctacaagttcatcaagcccatcctggagaagatggacggcaccgaggagctgctggtgaagctgaaccgggaggacctgctgcggaagcagcggaccttcgacaacggctccatcccccaccagatccacctgggcgagctgcacgccatcctgcggcggcaggaggacttctaccccttcctgaaggacaaccgggagaagatcgagaagatcctgaccttccggatcccctactacgtgggccccctggcccggggcaactcccggttcgcctggatgacccggaagtccgaggagaccatcaccccctggaacttcgaggaggtggtggacaagggcgcctccgcccagtccttcatcgagcggatgaccaacttcgacaagaacctgcccaacgagaaggtgctgcccaagcactccctgctgtacgagtacttcaccgtgtacaacgagctgaccaaggtgaagtacgtgaccgagggcatgcggaagcccgccttcctgtccggcgagcagaagaaggccatcgtggacctgctgttcaagaccaaccggaaggtgaccgtgaagcagctgaaggaggactacttcaagaagatcgagtgcttcgactccgtggagatctccggcgtggaggaccggttcaacgcctccctgggcacctaccacgacctgctgaagatcatcaaggacaaggacttcctggacaacgaggagaacgaggacatcctggaggacatcgtgctgaccctgaccctgttcgaggaccgggagatgatcgaggagcggctgaagacctacgcccacctgttcgacgacaaggtgatgaagcagctgaagcggcggcggtacaccggctggggccggctgtcccggaagctgatcaacggcatccgggacaagcagtccggcaagaccatcctggacttcctgaagtccgacggcttcgccaaccggaacttcatgcagctgatccacgacgactccctgaccttcaaggaggacatccagaaggcccaggtgtccggccagggcgactccctgcacgagcacatcgccaacctggccggctcccccgccatcaagaagggcatcctgcagaccgtgaaggtggtggacgagctggtgaaggtgatgggccggcacaagcccgagaacatcgtgatcgagatggcccgggagaaccagaccacccagaagggccagaagaactcccgggagcggatgaagcggatcgaggagggcatcaaggagctgggctcccagatcctgaaggagcaccccgtggagaacacccagctgcagaacgagaagctgtacctgtactacctgcagaacggccgggacatgtacgtggaccaggagctggacatcaaccggctgtccgactacgacgtggacgccatcgtgccccagtccttcctgaaggacgactccatcgacaacaaggtgctgacccggtccgacaagaaccggggcaagtccgacaacgtgccctccgaggaggtggtgaagaagatgaagaactactggcggcagctgctgaacgccaagctgatcacccagcggaagttcgacaacctgaccaaggccgagcggggcggcctgtccgagctggacaaggccggcttcatcaagcggcagctggtggagacccggcagatcaccaagcacgtggcccagatcctggactcccggatgaacaccaagtacgacgagaacgacaagctgatccgggaggtgaaggtgatcaccctgaagtccaagctggtgtccgacttccggaaggacttccagttctacaaggtgcgggagatcaacaactaccaccacgcccacgacgcctacctgaacgccgtggtgggcaccgccctgatcaagaagtaccccaagctggagtccgagttcgtgtacggcgactacaaggtgtacgacgtgcggaagatgatcgccaagtccgagcaggagatcggcaaggccaccgccaagtacttcttctactccaacatcatgaacttcttcaagaccgagatcaccctggccaacggcgagatccggaagcggcccctgatcgagaccaacggcgagaccggcgagatcgtgtgggacaagggccgggacttcgccaccgtgcggaaggtgctgtccatgccccaggtgaacatcgtgaagaagaccgaggtgcagaccggcggcttctccaaggagtccatcctgcccaagcggaactccgacaagctgatcgcccggaagaaggactgggaccccaagaagtacggcggcttcgactcccccaccgtggcctactccgtgctggtggtggccaaggtggagaagggcaagtccaagaagctgaagtccgtgaaggagctgctgggcatcaccatcatggagcggtcctccttcgagaagaaccccatcgacttcctggaggccaagggctacaaggaggtgaagaaggacctgatcatcaagctgcccaagtactccctgttcgagctggagaacggccggaagcggatgctggcctccgccggcgagctgcagaagggcaacgagctggccctgccctccaagtacgtgaacttcctgtacctggcctcccactacgagaagctgaagggctcccccgaggacaacgagcagaagcagctgttcgtggagcagcacaagcactacctggacgagatcatcgagcagatctccgagttctccaagcgggtgatcctggccgacgccaacctggacaaggtgctgtccgcctacaacaagcaccgggacaagcccatccgggagcaggccgagaacatcatccacctgttcaccctgaccaacctgggcgcccccgccgccttcaagtacttcgacaccaccatcgaccggaagcggtacacctccaccaaggaggtgctggacgccaccctgatccaccagtccatcaccggcctgtacgagacccggatcgacctgtcccagctgggcggcgacggcggcggctcccccaagaagaagcggaaggtgtccgagtccgccacccccgagtccgtgtccggctggcggctgttcaagaagatctcctga

SEQ ID NO: 1127 - protein, 2294 aa, synthetic construct
  REGION 1..2294: note = Synthetic
MKIAVVDKALNNTRYDKHFQLYGEEVDVFHMCNEKLSGRLLKKHITIGTPENPFDPNDYDFVILVGAEPFLYFAGKKGIGDYTGKRVEYNGYANWIASISPAQLHFKPEMKPVFDATVENIHDIINGREKIAKAGDYRPITDPDEAEEYIKMVYNMVIGPVAFASATSALYCRDGYLLGVSISHQEYQGVYIDSDCLTEVAVYYLQKILDSENHTIVFHNLKFDMHFYKYHLGLTFDKAHKERRLHDTMLQHYVLDERRGTHGLKSLAMKYTDMGDYDFELDKFKDDYCKAHKIKKEDFTYDLIPFDIMWPYAAKDTDATIRLHNFFLPKIEKNEKLCSLYYDVLMPGCVFLQRVEDRGVPISIDRLKEAQYQLTHNLNKAREKLYTYPEVKQLEQDQNEAFNPNSVKQLRVLLFDYVGLTPTGKLTDTGADSTDAEALNELATQHPIAKTLLEIRKLTKLISTYVEKILLSIDADGCIRTGFHEHMTTSGRLSSSGKLNLQQLPRDESIIKGCVVAPPGYRVIAWDLTTAEVYYAAVLSGDRNMQQVFINMRNEPDKYPDFHSNIAHMVFKLQCEPRDVKKLFPALRQAAKAITFGILYGSGPAKVAHSVNEALLEQAAKTGEPFVECTVADAKEYIETYFGQFPQLKRWIDKCHDQIKNHGFIYSHFGRKRRLHNIHSEDRGVQGEEIRSGFNAIIQSASSDSLLLGAVDADNEIISLGLEQEMKIVMLVHDSVVAIVREDLIDQYNEILIRNIQKDRGISIPGCPIGIDSDSEAGGSRDYSCGKMKKQHPSIACIDDDEYTRYVKGVLLDAEFEYKKLAAMDKEHPDHSKYKDDKFIAVCKDLDNVKRILGAGAPESATESGGTSTESEGSAGTSTESEGSAGSAGSTSGSSSGDKKYSIGLDIGTNSVGWAVITDEYKVPSKKFKVLGNTDRHSIKKNLIGALLFDSGETAEATRLKRTARRRYTRRKNRICYLQEIFSNEMAKVDDSFFHRLEESFLVEEDKKHERHPIFGNIVDEVAYHEKYPTIYHLRKKLVDSTDKADLRLIYLALAHMIKFRGHFLIEGDLNPDNSDVDKLFIQLVQTYNQLFEENPINASGVDAKAILSARLSKSRRLENLIAQLPGEKKNGLFGNLIALSLGLTPNFKSNFDLAEDAKLQLSKDTYDDDLDNLLAQIGDQYADLFLAAKNLSDAILLSDILRVNTEITKAPLSASMIKRYDEHHQDLTLLKALVRQQLPEKYKEIFFDQSKNGYAGYIDGGASQEEFYKFIKPILEKMDGTEELLVKLNREDLLRKQRTFDNGSIPHQIHLGELHAILRRQEDFYPFLKDNREKIEKILTFRIPYYVGPLARGNSRFAWMTRKSEETITPWNFEEVVDKGASAQSFIERMTNFDKNLPNEKVLPKHSLLYEYFTVYNELTKVKYVTEGMRKPAFLSGEQKKAIVDLLFKTNRKVTVKQLKEDYFKKIECFDSVEISGVEDRFNASLGTYHDLLKIIKDKDFLDNEENEDILEDIVLTLTLFEDREMIEERLKTYAHLFDDKVMKQLKRRRYTGWGRLSRKLINGIRDKQSGKTILDFLKSDGFANRNFMQLIHDDSLTFKEDIQKAQVSGQGDSLHEHIANLAGSPAIKKGILQTVKVVDELVKVMGRHKPENIVIEMARENQTTQKGQKNSRERMKRIEEGIKELGSQILKEHPVENTQLQNEKLYLYYLQNGRDMYVDQELDINRLSDYDVDAIVPQSFLKDDSIDNKVLTRSDKNRGKSDNVPSEEVVKKMKNYWRQLLNAKLITQRKFDNLTKAERGGLSELDKAGFIKRQLVETRQITKHVAQILDSRMNTKYDENDKLIREVKVITLKSKLVSDFRKDFQFYKVREINNYHHAHDAYLNAVVGTALIKKYPKLESEFVYGDYKVYDVRKMIAKSEQEIGKATAKYFFYSNIMNFFKTEITLANGEIRKRPLIETNGETGEIVWDKGRDFATVRKVLSMPQVNIVKKTEVQTGGFSKESILPKRNSDKLIARKKDWDPKKYGGFDSPTVAYSVLVVAKVEKGKSKKLKSVKELLGITIMERSSFEKNPIDFLEAKGYKEVKKDLIIKLPKYSLFELENGRKRMLASAGELQKGNELALPSKYVNFLYLASHYEKLKGSPEDNEQKQLFVEQHKHYLDEIIEQISEFSKRVILADANLDKVLSAYNKHRDKPIREQAENIIHLFTLTNLGAPAAFKYFDTTIDRKRYTSTKEVLDATLIHQSITGLYETRIDLSQLGGDGGGSPKKKRKVSESATPESVSGWRLFKKIS

SEQ ID NO: 1128 - RNA, 6825 nt, synthetic construct
  misc_feature 1..6825: note = Synthetic
  source 1..6825: mol_type = other RNA
atgaagatcgccgtggtggacaaggccctgaacaacacccggtacgacaagcacttccagctgtacggcgaggaggtggacgtgttccacatgtgcaacgagaagctgtccggccggctgctgaagaagcacatcaccatcggcacccccgagaaccccttcgaccccaacgactacgacttcgtgatcctggtgggcgccgagcccttcctgtacttcgccggcaagaagggcatcggcgactacaccggcaagcgggtggagtacaacggctacgccaactggatcgcctccatctcccccgcccagctgcacttcaagcccgagatgaagcccgtgttcgacgccaccgtggagaacatccacgacatcatcaacggccgggagaagatcgccaaggccggcgactaccggcccatcaccgaccccgacgaggccgaggagtacatcaagatggtgtacaacatggtgatcggccccgtggccttcgcctccgccacctccgccctgtactgccgggacggctacctgctgggcgtgtccatctcccaccaggagtaccagggcgtgtacatcgactccgactgcctgaccgaggtggccgtgtactacctgcagaagatcctggactccgagaaccacaccatcgtgttccacaacctgaagttcgacatgcacttctacaagtaccacctgggcctgaccttcgacaaggcccacaaggagcggcggctgcacgacaccatgctgcagcactacgtgctggacgagcggcggggcacccacggcctgaagtccctggccatgaagtacaccgacatgggcgactacgacttcgagctggacaagttcaaggacgactactgcaaggcccacaagatcaagaaggaggacttcacctacgacctgatccccttcgacatcatgtggccctacgccgccaaggacaccgacgccaccatccggctgcacaacttcttcctgcccaagatcgagaagaacgagaagctgtgctccctgtactacgacgtgctgatgcccggctgcgtgttcctgcagcgggtggaggaccggggcgtgcccatctccatcgaccggctgaaggaggcccagtaccagctgacccacaacctgaacaaggcccgggagaagctgtacacctaccccgaggtgaagcagctggagcaggaccagaacgaggccttcaaccccaactccgtgaagcagctgcgggtgctgctgttcgactacgtgggcctgacccccaccggcaagctgaccgacaccggcgccgactccaccgacgccgaggccctgaacgagctggccacccagcaccccatcgccaagaccctgctggagatccggaagctgaccaagctgatctccacctacgtggagaagatcctgctgtccatcgacgccgacggctgcatccggaccggcttccacgagcacatgaccacctccggccggctgtcctcctccggcaagctgaacctgcagcagctgccccgggacgagtccatcatcaagggctgcgtggtggccccccccggctaccgggtgatcgcctgggacctgaccaccgccgaggtgtactacgccgccgtgctgtccggcgaccggaacatgcagcaggtgttcatcaacatgcggaacgagcccgacaagtaccccgacttccactccaacatcgcccacatggtgttcaagctgcagtgcgagccccgggacgtgaagaagctgttccccgccctgcggcaggccgccaaggccatcaccttcggcatcctgtacggctccggccccgccaaggtggcccactccgtgaacgaggccctgctggagcaggccgccaagaccggcgagcccttcgtggagtgcaccgtggccgacgccaaggagtacatcgagacctacttcggccagttcccccagctgaagcggtggatcgacaagtgccacgaccagatcaagaaccacggcttcatctactcccacttcggccggaagcggcggctgcacaacatccactccgaggaccggggcgtgcagggcgaggagatccggtccggcttcaacgccatcatccagtccgcctcctccgactccctgctgctgggcgccgtggacgccgacaacgagatcatctccctgggcctggagcaggagatgaagatcgtgatgctggtgcacgactccgtggtggccatcgtgcgggaggacctgatcgaccagtacaacgagatcctgatccggaacatccagaaggaccggggcatctccatccccggctgccccatcggcatcgactccgactccgaggccggcggctcccgggactactcctgcggcaagatgaagaagcagcacccctccatcgcctgcatcgacgacgacgagtacacccggtacgtgaagggcgtgctgctggacgccgagttcgagtacaagaagctggccgccatggacaaggagcaccccgaccactccaagtacaaggacgacaagttcatcgccgtgtgcaaggacctggacaacgtgaagcggatcctgggcgccggcgcccccgagtccgccaccgagtccggcggcacctccaccgagtccgagggctccgccggcacctccaccgagtccgagggctccgccggctccgccggctccacctccggctcctcctccggcgacaagaagtactccatcggcctggacatcggcaccaactccgtgggctgggccgtgatcaccgacgagtacaaggtgccctccaagaagttcaaggtgctgggcaacaccgaccggcactccatcaagaagaacctgatcggcgccctgctgttcgactccggcgagaccgccgaggccacccggctgaagcggaccgcccggcggcggtacacccggcggaagaaccggatctgctacctgcaggagatcttctccaacgagatggccaaggtggacgactccttcttccaccggctggaggagtccttcctggtggaggaggacaagaagcacgagcggcaccccatcttcggcaacatcgtggacgaggtggcctaccacgagaagtaccccaccatctaccacctgcggaagaagctggtggactccaccgacaaggccgacctgcggctgatctacctggccctggcccacatgatcaagttccggggccacttcctgatcgagggcgacctgaaccccgacaactccgacgtggacaagctgttcatccagctggtgcagacctacaaccagctgttcgaggagaaccccatcaacgcctccggcgtggacgccaaggccatcctgtccgcccggctgtccaagtcccggcggctggagaacctgatcgcccagctgcccggcgagaagaagaacggcctgttcggcaacctgatcgccctgtccctgggcctgacccccaacttcaagtccaacttcgacctggccgaggacgccaagctgcagctgtccaaggacacctacgacgacgacctggacaacctgctggcccagatcggcgaccagtacgccgacctgttcctggccgccaagaacctgtccgacgccatcctgctgtccgacatcctgcgggtgaacaccgagatcaccaaggcccccctgtccgcctccatgatcaagcggtacgacgagcaccaccaggacctgaccctgctgaaggccctggtgcggcagcagctgcccgagaagtacaaggagatcttcttcgaccagtccaagaacggctacgccggctacatcgacggcggcgcctcccaggaggagttctacaagttcatcaagcccatcctggagaagatggacggcaccgaggagctgctggtgaagctgaaccgggaggacctgctgcggaagcagcggaccttcgacaacggctccatcccccaccagatccacctgggcgagctgcacgccatcctgcggcggcaggaggacttctaccccttcctgaaggacaaccgggagaagatcgagaagatcctgaccttccggatcccctactacgtgggccccctggcccggggcaactcccggttcgcctggatgacccggaagtccgaggagaccatcaccccctggaacttcgaggaggtggtggacaagggcgcctccgcccagtccttcatcgagcggatgaccaacttcgacaagaacctgcccaacgagaaggtgctgcccaagcactccctgctgtacgagtacttcaccgtgtacaacgagctgaccaaggtgaagtacgtgaccgagggcatgcggaagcccgccttcctgtccggcgagcagaagaaggccatcgtggacctgctgttcaagaccaaccggaaggtgaccgtgaagcagctgaaggaggactacttcaagaagatcgagtgcttcgactccgtggagatctccggcgtggaggaccggttcaacgcctccctgggcacctaccacgacctgctgaagatcatcaaggacaaggacttcctggacaacgaggagaacgaggacatcctggaggacatcgtgctgaccctgaccctgttcgaggaccgggagatgatcgaggagcggctgaagacctacgcccacctgttcgacgacaaggtgatgaagcagctgaagcggcggcggtacaccggctggggccggctgtcccggaagctgatcaacggcatccgggacaagcagtccggcaagaccatcctggacttcctgaagtccgacggcttcgccaaccggaacttcatgcagctgatccacgacgactccctgaccttcaaggaggacatccagaaggcccaggtgtccggccagggcgactccctgcacgagcacatcgccaacctggccggctcccccgccatcaagaagggcatcctgcagaccgtgaaggtggtggacgagctggtgaaggtgatgggccggcacaagcccgagaacatcgtgatcgagatggcccgggagaaccagaccacccagaagggccagaagaactcccgggagcggatgaagcggatcgaggagggcatcaaggagctgggctcccagatcctgaaggagcaccccgtggagaacacccagctgcagaacgagaagctgtacctgtactacctgcagaacggccgggacatgtacgtggaccaggagctggacatcaaccggctgtccgactacgacgtggacgccatcgtgccccagtccttcctgaaggacgactccatcgacaacaaggtgctgacccggtccgacaagaaccggggcaagtccgacaacgtgccctccgaggaggtggtgaagaagatgaagaactactggcggcagctgctgaacgccaagctgatcacccagcggaagttcgacaacctgaccaaggccgagcggggcggcctgtccgagctggacaaggccggcttcatcaagcggcagctggtggagacccggcagatcaccaagcacgtggcccagatcctggactcccggatgaacaccaagtacgacgagaacgacaagctgatccgggaggtgaaggtgatcaccctgaagtccaagctggtgtccgacttccggaaggacttccagttctacaaggtgcgggagatcaacaactaccaccacgcccacgacgcctacctgaacgccgtggtgggcaccgccctgatcaagaagtaccccaagctggagtccgagttcgtgtacggcgactacaaggtgtacgacgtgcggaagatgatcgccaagtccgagcaggagatcggcaaggccaccgccaagtacttcttctactccaacatcatgaacttcttcaagaccgagatcaccctggccaacggcgagatccggaagcggcccctgatcgagaccaacggcgagaccggcgagatcgtgtgggacaagggccgggacttcgccaccgtgcggaaggtgctgtccatgccccaggtgaacatcgtgaagaagaccgaggtgcagaccggcggcttctccaaggagtccatcctgcccaagcggaactccgacaagctgatcgcccggaagaaggactgggaccccaagaagtacggcggcttcgactcccccaccgtggcctactccgtgctggtggtggccaaggtggagaagggcaagtccaagaagctgaagtccgtgaaggagctgctgggcatcaccatcatggagcggtcctccttcgagaagaaccccatcgacttcctggaggccaagggctacaaggaggtgaagaaggacctgatcatcaagctgcccaagtactccctgttcgagctggagaacggccggaagcggatgctggcctccgccggcgagctgcagaagggcaacgagctggccctgccctccaagtacgtgaacttcctgtacctggcctcccactacgagaagctgaagggctcccccgaggacaacgagcagaagcagctgttcgtggagcagcacaagcactacctggacgagatcatcgagcagatctccgagttctccaagcgggtgatcctggccgacgccaacctggacaaggtgctgtccgcctacaacaagcaccgggacaagcccatccgggagcaggccgagaacatcatccacctgttcaccctgaccaacctgggcgcccccgccgccttcaagtacttcgacaccaccatcgaccggaagcggtacacctccaccaaggaggtgctggacgccaccctgatccaccagtccatcaccggcctgtacgagacccggatcgacctgtcccagctgggcggcgacggcggcggctcccccaagaagaagcggaaggtg

SEQ ID NO: 1129 - protein, 2275 aa, synthetic construct
  REGION 1..2275: note = Synthetic
MKIAVVDKALNNTRYDKHFQLYGEEVDVFHMCNEKLSGRLLKKHITIGTPENPFDPNDYDFVILVGAEPFLYFAGKKGIGDYTGKRVEYNGYANWIASISPAQLHFKPEMKPVFDATVENIHDIINGREKIAKAGDYRPITDPDEAEEYIKMVYNMVIGPVAFASATSALYCRDGYLLGVSISHQEYQGVYIDSDCLTEVAVYYLQKILDSENHTIVFHNLKFDMHFYKYHLGLTFDKAHKERRLHDTMLQHYVLDERRGTHGLKSLAMKYTDMGDYDFELDKFKDDYCKAHKIKKEDFTYDLIPFDIMWPYAAKDTDATIRLHNFFLPKIEKNEKLCSLYYDVLMPGCVFLQRVEDRGVPISIDRLKEAQYQLTHNLNKAREKLYTYPEVKQLEQDQNEAFNPNSVKQLRVLLFDYVGLTPTGKLTDTGADSTDAEALNELATQHPIAKTLLEIRKLTKLISTYVEKILLSIDADGCIRTGFHEHMTTSGRLSSSGKLNLQQLPRDESIIKGCVVAPPGYRVIAWDLTTAEVYYAAVLSGDRNMQQVFINMRNEPDKYPDFHSNIAHMVFKLQCEPRDVKKLFPALRQAAKAITFGILYGSGPAKVAHSVNEALLEQAAKTGEPFVECTVADAKEYIETYFGQFPQLKRWIDKCHDQIKNHGFIYSHFGRKRRLHNIHSEDRGVQGEEIRSGFNAIIQSASSDSLLLGAVDADNEIISLGLEQEMKIVMLVHDSVVAIVREDLIDQYNEILIRNIQKDRGISIPGCPIGIDSDSEAGGSRDYSCGKMKKQHPSIACIDDDEYTRYVKGVLLDAEFEYKKLAAMDKEHPDHSKYKDDKFIAVCKDLDNVKRILGAGAPESATESGGTSTESEGSAGTSTESEGSAGSAGSTSGSSSGDKKYSIGLDIGTNSVGWAVITDEYKVPSKKFKVLGNTDRHSIKKNLIGALLFDSGETAEATRLKRTARRRYTRRKNRICYLQEIFSNEMAKVDDSFFHRLEESFLVEEDKKHERHPIFGNIVDEVAYHEKYPTIYHLRKKLVDSTDKADLRLIYLALAHMIKFRGHFLIEGDLNPDNSDVDKLFIQLVQTYNQLFEENPINASGVDAKAILSARLSKSRRLENLIAQLPGEKKNGLFGNLIALSLGLTPNFKSNFDLAEDAKLQLSKDTYDDDLDNLLAQIGDQYADLFLAAKNLSDAILLSDILRVNTEITKAPLSASMIKRYDEHHQDLTLLKALVRQQLPEKYKEIFFDQSKNGYAGYIDGGASQEEFYKFIKPILEKMDGTEELLVKLNREDLLRKQRTFDNGSIPHQIHLGELHAILRRQEDFYPFLKDNREKIEKILTFRIPYYVGPLARGNSRFAWMTRKSEETITPWNFEEVVDKGASAQSFIERMTNFDKNLPNEKVLPKHSLLYEYFTVYNELTKVKYVTEGMRKPAFLSGEQKKAIVDLLFKTNRKVTVKQLKEDYFKKIECFDSVEISGVEDRFNASLGTYHDLLKIIKDKDFLDNEENEDILEDIVLTLTLFEDREMIEERLKTYAHLFDDKVMKQLKRRRYTGWGRLSRKLINGIRDKQSGKTILDFLKSDGFANRNFMQLIHDDSLTFKEDIQKAQVSGQGDSLHEHIANLAGSPAIKKGILQTVKVVDELVKVMGRHKPENIVIEMARENQTTQKGQKNSRERMKRIEEGIKELGSQILKEHPVENTQLQNEKLYLYYLQNGRDMYVDQELDINRLSDYDVDAIVPQSFLKDDSIDNKVLTRSDKNRGKSDNVPSEEVVKKMKNYWRQLLNAKLITQRKFDNLTKAERGGLSELDKAGFIKRQLVETRQITKHVAQILDSRMNTKYDENDKLIREVKVITLKSKLVSDFRKDFQFYKVREINNYHHAHDAYLNAVVGTALIKKYPKLESEFVYGDYKVYDVRKMIAKSEQEIGKATAKYFFYSNIMNFFKTEITLANGEIRKRPLIETNGETGEIVWDKGRDFATVRKVLSMPQVNIVKKTEVQTGGFSKESILPKRNSDKLIARKKDWDPKKYGGFDSPTVAYSVLVVAKVEKGKSKKLKSVKELLGITIMERSSFEKNPIDFLEAKGYKEVKKDLIIKLPKYSLFELENGRKRMLASAGELQKGNELALPSKYVNFLYLASHYEKLKGSPEDNEQKQLFVEQHKHYLDEIIEQISEFSKRVILADANLDKVLSAYNKHRDKPIREQAENIIHLFTLTNLGAPAAFKYFDTTIDRKRYTSTKEVLDATLIHQSITGLYETRIDLSQLGGDGGGSPKKKRKV

SEQ ID NO: 1130 - RNA, 7483 nt, synthetic construct
  misc_feature 1..7483: note = Synthetic
  source 1..7483: mol_type = other RNA
gggaagctcagaataaacgctcaactttggccggatctgccaccatggacaagaagtactccatcggcctggacatcggcaccaactccgtgggctgggccgtgatcaccgacgagtacaaggtgccctccaagaagttcaaggtgctgggcaacaccgaccggcactccatcaagaagaacctgatcggcgccctgctgttcgactccggcgagaccgccgaggccacccggctgaagcggaccgcccggcggcggtacacccggcggaagaaccggatctgctacctgcaggagatcttctccaacgagatggccaaggtggacgactccttcttccaccggctggaggagtccttcctggtggaggaggacaagaagcacgagcggcaccccatcttcggcaacatcgtggacgaggtggcctaccacgagaagtaccccaccatctaccacctgcggaagaagctggtggactccaccgacaaggccgacctgcggctgatctacctggccctggcccacatgatcaagttccggggccacttcctgatcgagggcgacctgaaccccgacaactccgacgtggacaagctgttcatccagctggtgcagacctacaaccagctgttcgaggagaaccccatcaacgcctccggcgtggacgccaaggccatcctgtccgcccggctgtccaagtcccggcggctggagaacctgatcgcccagctgcccggcgagaagaagaacggcctgttcggcaacctgatcgccctgtccctgggcctgacccccaacttcaagtccaacttcgacctggccgaggacgccaagctgcagctgtccaaggacacctacgacgacgacctggacaacctgctggcccagatcggcgaccagtacgccgacctgttcctggccgccaagaacctgtccgacgccatcctgctgtccgacatcctgcgggtgaacaccgagatcaccaaggcccccctgtccgcctccatgatcaagcggtacgacgagcaccaccaggacctgaccctgctgaaggccctggtgcggcagcagctgcccgagaagtacaaggagatcttcttcgaccagtccaagaacggctacgccggctacatcgacggcggcgcctcccaggaggagttctacaagttcatcaagcccatcctggagaagatggacggcaccgaggagctgctggtgaagctgaaccgggaggacctgctgcggaagcagcggaccttcgacaacggctccatcccccaccagatccacctgggcgagctgcacgccatcctgcggcggcaggaggacttctaccccttcctgaaggacaaccgggagaagatcgagaagatcctgaccttccggatcccctactacgtgggccccctggcccggggcaactcccggttcgcctggatgacccggaagtccgaggagaccatcaccccctggaacttcgaggaggtggtggacaagggcgcctccgcccagtccttcatcgagcggatgaccaacttcgacaagaacctgcccaacgagaaggtgctgcccaagcactccctgctgtacgagtacttcaccgtgtacaacgagctgaccaaggtgaagtacgtgaccgagggcatgcggaagcccgccttcctgtccggcgagcagaagaaggccatcgtggacctgctgttcaagaccaaccggaaggtgaccgtgaagcagctgaaggaggactacttcaagaagatcgagtgcttcgactccgtggagatctccggcgtggaggaccggttcaacgcctccctgggcacctaccacgacctgctgaagatcatcaaggacaaggacttcctggacaacgaggagaacgaggacatcctggaggacatcgtgctgaccctgaccctgttcgaggaccgggagatgatcgaggagcggctgaagacctacgcccacctgttcgacgacaaggtgatgaagcagctgaagcggcggcggtacaccggctggggccggctgtcccggaagctgatcaacggcatccgggacaagcagtccggcaagaccatcctggacttcctgaagtccgacggcttcgccaaccggaacttcatgcagctgatccacgacgactccctgaccttcaaggaggacatccagaaggcccaggtgtccggccagggcgactccctgcacgagcacatcgccaacctggccggctcccccgccatcaagaagggcatcctgcagaccgtgaaggtggtggacgagctggtgaaggtgatgggccggcacaagcccgagaacatcgtgatcgagatggcccgggagaaccagaccacccagaagggccagaagaactcccgggagcggatgaagcggatcgaggagggcatcaaggagctgggctcccagatcctgaaggagcaccccgtggagaacacccagctgcagaacgagaagctgtacctgtactacctgcagaacggccgggacatgtacgtggaccaggagctggacatcaaccggctgtccgactacgacgtggacgccatcgtgccccagtccttcctgaaggacgactccatcgacaacaaggtgctgacccggtccgacaagaaccggggcaagtccgacaacgtgccctccgaggaggtggtgaagaagatgaagaactactggcggcagctgctgaacgccaagctgatcacccagcggaagttcgacaacctgaccaaggccgagcggggcggcctgtccgagctggacaaggccggcttcatcaagcggcagctggtggagacccggcagatcaccaagcacgtggcccagatcctggactcccggatgaacaccaagtacgacgagaacgacaagctgatccgggaggtgaaggtgatcaccctgaagtccaagctggtgtccgacttccggaaggacttccagttctacaaggtgcgggagatcaacaactaccaccacgcccacgacgcctacctgaacgccgtggtgggcaccgccctgatcaagaagtaccccaagctggagtccgagttcgtgtacggcgactacaaggtgtacgacgtgcggaagatgatcgccaagtccgagcaggagatcggcaaggccaccgccaagtacttcttctactccaacatcatgaacttcttcaagaccgagatcaccctggccaacggcgagatccggaagcggcccctgatcgagaccaacggcgagaccggcgagatcgtgtgggacaagggccgggacttcgccaccgtgcggaaggtgctgtccatgccccaggtgaacatcgtgaagaagaccgaggtgcagaccggcggcttctccaaggagtccatcctgcccaagcggaactccgacaagctgatcgcccggaagaaggactgggaccccaagaagtacggcggcttcgactcccccaccgtggcctactccgtgctggtggtggccaaggtggagaagggcaagtccaagaagctgaagtccgtgaaggagctgctgggcatcaccatcatggagcggtcctccttcgagaagaaccccatcgacttcctggaggccaagggctacaaggaggtgaagaaggacctgatcatcaagctgcccaagtactccctgttcgagctggagaacggccggaagcggatgctggcctccgccggcgagctgcagaagggcaacgagctggccctgccctccaagtacgtgaacttcctgtacctggcctcccactacgagaagctgaagggctcccccgaggacaacgagcagaagcagctgttcgtggagcagcacaagcactacctggacgagatcatcgagcagatctccgagttctccaagcgggtgatcctggccgacgccaacctggacaaggtgctgtccgcctacaacaagcaccgggacaagcccatccgggagcaggccgagaacatcatccacctgttcaccctgaccaacctgggcgcccccgccgccttcaagtacttcgacaccaccatcgaccggaagcggtacacctccaccaaggaggtgctggacgccaccctgatccaccagtccatcaccggcctgtacgagacccggatcgacctgtcccagctgggcggcgacggcgcccccgagtccgccaccgagtccggcggcacctccaccgagtccgagggctccgccggcacctccaccgagtccgagggctccgccggctccgccggctccacctccggctcctcctccggcatgaagatcgccgtggtggacaaggccctgaacaacacccggtacgacaagcacttccagctgtacggcgaggaggtggacgtgttccacatgtgcaacgagaagctgtccggccggctgctgaagaagcacatcaccatcggcacccccgagaaccccttcgaccccaacgactacgacttcgtgatcctggtgggcgccgagcccttcctgtacttcgccggcaagaagggcatcggcgactacaccggcaagcgggtggagtacaacggctacgccaactggatcgcctccatctcccccgcccagctgcacttcaagcccgagatgaagcccgtgttcgacgccaccgtggagaacatccacgacatcatcaacggccgggagaagatcgccaaggccggcgactaccggcccatcaccgaccccgacgaggccgaggagtacatcaagatggtgtacaacatggtgatcggccccgtggccttcgcctccgccacctccgccctgtactgccgggacggctacctgctgggcgtgtccatctcccaccaggagtaccagggcgtgtacatcgactccgactgcctgaccgaggtggccgtgtactacctgcagaagatcctggactccgagaaccacaccatcgtgttccacaacctgaagttcgacatgcacttctacaagtaccacctgggcctgaccttcgacaaggcccacaaggagcggcggctgcacgacaccatgctgcagcactacgtgctggacgagcggcggggcacccacggcctgaagtccctggccatgaagtacaccgacatgggcgactacgacttcgagctggacaagttcaaggacgactactgcaaggcccacaagatcaagaaggaggacttcacctacgacctgatccccttcgacatcatgtggccctacgccgccaaggacaccgacgccaccatccggctgcacaacttcttcctgcccaagatcgagaagaacgagaagctgtgctccctgtactacgacgtgctgatgcccggctgcgtgttcctgcagcgggtggaggaccggggcgtgcccatctccatcgaccggctgaaggaggcccagtaccagctgacccacaacctgaacaaggcccgggagaagctgtacacctaccccgaggtgaagcagctggagcaggaccagaacgaggccttcaaccccaactccgtgaagcagctgcgggtgctgctgttcgactacgtgggcctgacccccaccggcaagctgaccgacaccggcgccgactccaccgacgccgaggccctgaacgagctggccacccagcaccccatcgccaagaccctgctggagatccggaagctgaccaagctgatctccacctacgtggagaagatcctgctgtccatcgacgccgacggctgcatccggaccggcttccacgagcacatgaccacctccggccggctgtcctcctccggcaagctgaacctgcagcagctgccccgggacgagtccatcatcaagggctgcgtggtggccccccccggctaccgggtgatcgcctgggacctgaccaccgccgaggtgtactacgccgccgtgctgtccggcgaccggaacatgcagcaggtgttcatcaacatgcggaacgagcccgacaagtaccccgacttccactccaacatcgcccacatggtgttcaagctgcagtgcgagccccgggacgtgaagaagctgttccccgccctgcggcaggccgccaaggccatcaccttcggcatcctgtacggctccggccccgccaaggtggcccactccgtgaacgaggccctgctggagcaggccgccaagaccggcgagcccttcgtggagtgcaccgtggccgacgccaaggagtacatcgagacctacttcggccagttcccccagctgaagcggtggatcgacaagtgccacgaccagatcaagaaccacggcttcatctactcccacttcggccggaagcggcggctgcacaacatccactccgaggaccggggcgtgcagggcgaggagatccggtccggcttcaacgccatcatccagtccgcctcctccgactccctgctgctgggcgccgtggacgccgacaacgagatcatctccctgggcctggagcaggagatgaagatcgtgatgctggtgcacgactccgtggtggccatcgtgcgggaggacctgatcgaccagtacaacgagatcctgatccggaacatccagaaggaccggggcatctccatccccggctgccccatcggcatcgactccgactccgaggccggcggctcccgggactactcctgcggcaagatgaagaagcagcacccctccatcgcctgcatcgacgacgacgagtacacccggtacgtgaagggcgtgctgctggacgccgagttcgagtacaagaagctggccgccatggacaaggagcaccccgaccactccaagtacaaggacgacaagttcatcgccgtgtgcaaggacctggacaacgtgaagcggatcctgggcgccggcggcggctccggcaagcggaccgccgacggctccggcggcggctcccccaagaagaagcggaaggtgtccgagtccgccacccccgagtccgtgtccggctggcggctgttcaagaagatctcctagctagcaccagcctcaagaacacccgaatggagtctctaagctacataataccaacttacactttacaaaatgttgtcccccaaaatgtagccattcgtatctgctcctaataaaaagaaagtttcttcacattctctcgagaaaaaaaaaaaatggaaaaaaaaaaaacggaaaaaaaaaaaaggtaaaaaaaaaaaatataaaaaaaaaaaacataaaaaaaaaaaacgaaaaaaaaaaaacgtaaaaaaaaaaaactcaaaaaaaaaaaagataaaaaaaaaaaacctaaaaaaaaaaaatgtaaaaaaaaaaaagggaaaaaaaaaaaacgcaaaaaaaaaaaacacaaaaaaaaaaaatgcaaaaaaaaaaaatcgaaaaaaaaaaaatctaaaaaaaaaaaacgaaaaaaaaaaaacccaaaaaaaaaaaagacaaaaaaaaaaaatagaaaaaaaaaaagttaaaaaaaaaaaactgaaaaaaaaaaaatttaaaaaaaaaaaatctag

SEQ ID NO: 1131 - RNA, 6924 nt, synthetic construct
  misc_feature 1..6924: note = Synthetic
  source 1..6924: mol_type = other RNA
atggacaagaagtactccatcggcctggacatcggcaccaactccgtgggctgggccgtgatcaccgacgagtacaaggtgccctccaagaagttcaaggtgctgggcaacaccgaccggcactccatcaagaagaacctgatcggcgccctgctgttcgactccggcgagaccgccgaggccacccggctgaagcggaccgcccggcggcggtacacccggcggaagaaccggatctgctacctgcaggagatcttctccaacgagatggccaaggtggacgactccttcttccaccggctggaggagtccttcctggtggaggaggacaagaagcacgagcggcaccccatcttcggcaacatcgtggacgaggtggcctaccacgagaagtaccccaccatctaccacctgcggaagaagctggtggactccaccgacaaggccgacctgcggctgatctacctggccctggcccacatgatcaagttccggggccacttcctgatcgagggcgacctgaaccccgacaactccgacgtggacaagctgttcatccagctggtgcagacctacaaccagctgttcgaggagaaccccatcaacgcctccggcgtggacgccaaggccatcctgtccgcccggctgtccaagtcccggcggctggagaacctgatcgcccagctgcccggcgagaagaagaacggcctgttcggcaacctgatcgccctgtccctgggcctgacccccaacttcaagtccaacttcgacctggccgaggacgccaagctgcagctgtccaaggacacctacgacgacgacctggacaacctgctggcccagatcggcgaccagtacgccgacctgttcctggccgccaagaacctgtccgacgccatcctgctgtccgacatcctgcgggtgaacaccgagatcaccaaggcccccctgtccgcctccatgatcaagcggtacgacgagcaccaccaggacctgaccctgctgaaggccctggtgcggcagcagctgcccgagaagtacaaggagatcttcttcgaccagtccaagaacggctacgccggctacatcgacggcggcgcctcccaggaggagttctacaagttcatcaagcccatcctggagaagatggacggcaccgaggagctgctggtgaagctgaaccgggaggacctgctgcggaagcagcggaccttcgacaacggctccatcccccaccagatccacctgggcgagctgcacgccatcctgcggcggcaggaggacttctaccccttcctgaaggacaaccgggagaagatcgagaagatcctgaccttccggatcccctactacgtgggccccctggcccggggcaactcccggttcgcctggatgacccggaagtccgaggagaccatcaccccctggaacttcgaggaggtggtggacaagggcgcctccgcccagtccttcatcgagcggatgaccaacttcgacaagaacctgcccaacgagaaggtgctgcccaagcactccctgctgtacgagtacttcaccgtgtacaacgagctgaccaaggtgaagtacgtgaccgagggcatgcggaagcccgccttcctgtccggcgagcagaagaaggccatcgtggacctgctgttcaagaccaaccggaaggtgaccgtgaagcagctgaaggaggactacttcaagaagatcgagtgcttcgactccgtggagatctccggcgtggaggaccggttcaacgcctccctgggcacctaccacgacctgctgaagatcatcaaggacaaggacttcctggacaacgaggagaacgaggacatcctggaggacatcgtgctgaccctgaccctgttcgaggaccgggagatgatcgaggagcggctgaagacctacgcccacctgttcgacgacaaggtgatgaagcagctgaagcggcggcggtacaccggctggggccggctgtcccggaagctgatcaacggcatccgggacaagcagtccggcaagaccatcctggacttcctgaagtccgacggcttcgccaaccggaacttcatgcagctgatccacgacgactccctgaccttcaaggaggacatccagaaggcccaggtgtccggccagggcgactccctgcacgagcacatcgccaacctggccggctcccccgccatcaagaagggcatcctgcagaccgtgaaggtggtggacgagctggtgaaggtgatgggccggcacaagcccgagaacatcgtgatcgagatggcccgggagaaccagaccacccagaagggccagaagaactcccgggagcggatgaagcggatcgaggagggcatcaaggagctgggctcccagatcctgaaggagcaccccgtggagaacacccagctgcagaacgagaagctgtacctgtactacctgcagaacggccgggacatgtacgtggaccaggagctggacatcaaccggctgtccgactacgacgtggacgccatcgtgccccagtccttcctgaaggacgactccatcgacaacaaggtgctgacccggtccgacaagaaccggggcaagtccgacaacgtgccctccgaggaggtggtgaagaagatgaagaactactggcggcagctgctgaacgccaagctgatcacccagcggaagttcgacaacctgaccaaggccgagcggggcggcctgtccgagctggacaaggccggcttcatcaagcggcagctggtggagacccggcagatcaccaagcacgtggcccagatcctggactcccggatgaacaccaagtacgacgagaacgacaagctgatccgggaggtgaaggtgatcaccctgaagtccaagctggtgtccgacttccggaaggacttccagttctacaaggtgcgggagatcaacaactaccaccacgcccacgacgcctacctgaacgccgtggtgggcaccgccctgatcaagaagtaccccaagctggagtccgagttcgtgtacggcgactacaaggtgtacgacgtgcggaagatgatcgccaagtccgagcaggagatcggcaaggccaccgccaagtacttcttctactccaacatcatgaacttcttcaagaccgagatcaccctggccaacggcgagatccggaagcggcccctgatcgagaccaacggcgagaccggcgagatcgtgtgggacaagggccgggacttcgccaccgtgcggaaggtgctgtccatgccccaggtgaacatcgtgaagaagaccgaggtgcagaccggcggcttctccaaggagtccatcctgcccaagcggaactccgacaagctgatcgcccggaagaaggactgggaccccaagaagtacggcggcttcgactcccccaccgtggcctactccgtgctggtggtggccaaggtggagaagggcaagtccaagaagctgaagtccgtgaaggagctgctgggcatcaccatcatggagcggtcctccttcgagaagaaccccatcgacttcctggaggccaagggctacaaggaggtgaagaaggacctgatcatcaagctgcccaagtactccctgttcgagctggagaacggccggaagcggatgctggcctccgccggcgagctgcagaagggcaacgagctggccctgccctccaagtacgtgaacttcctgtacctggcctcccactacgagaagctgaagggctcccccgaggacaacgagcagaagcagctgttcgtggagcagcacaagcactacctggacgagatcatcgagcagatctccgagttctccaagcgggtgatcctggccgacgccaacctggacaaggtgctgtccgcctacaacaagcaccgggacaagcccatccgggagcaggccgagaacatcatccacctgttcaccctgaccaacctgggcgcccccgccgccttcaagtacttcgacaccaccatcgaccggaagcggtacacctccaccaaggaggtgctggacgccaccctgatccaccagtccatcaccggcctgtacgagacccggatcgacctgtcccagctgggcggcgacggcgcccccgagtccgccaccgagtccggcggcacctccaccgagtccgagggctccgccggcacctccaccgagtccgagggctccgccggctccgccggctccacctccggctcctcctccggcatgaagatcgccgtggtggacaaggccctgaacaacacccggtacgacaagcacttccagctgtacggcgaggaggtggacgtgttccacatgtgcaacgagaagctgtccggccggctgctgaagaagcacatcaccatcggcacccccgagaaccccttcgaccccaacgactacgacttcgtgatcctggtgggcgccgagcccttcctgtacttcgccggcaagaagggcatcggcgactacaccggcaagcgggtggagtacaacggctacgccaactggatcgcctccatctcccccgcccagctgcacttcaagcccgagatgaagcccgtgttcgacgccaccgtggagaacatccacgacatcatcaacggccgggagaagatcgccaaggccggcgactaccggcccatcaccgaccccgacgaggccgaggagtacatcaagatggtgtacaacatggtgatcggccccgtggccttcgcctccgccacctccgccctgtactgccgggacggctacctgctgggcgtgtccatctcccaccaggagtaccagggcgtgtacatcgactccgactgcctgaccgaggtggccgtgtactacctgcagaagatcctggactccgagaaccacaccatcgtgttccacaacctgaagttcgacatgcacttctacaagtaccacctgggcctgaccttcgacaaggcccacaaggagcggcggctgcacgacaccatgctgcagcactacgtgctggacgagcggcggggcacccacggcctgaagtccctggccatgaagtacaccgacatgggcgactacgacttcgagctggacaagttcaaggacgactactgcaaggcccacaagatcaagaaggaggacttcacctacgacctgatccccttcgacatcatgtggccctacgccgccaaggacaccgacgccaccatccggctgcacaacttcttcctgcccaagatcgagaagaacgagaagctgtgctccctgtactacgacgtgctgatgcccggctgcgtgttcctgcagcgggtggaggaccggggcgtgcccatctccatcgaccggctgaaggaggcccagtaccagctgacccacaacctgaacaaggcccgggagaagctgtacacctaccccgaggtgaagcagctggagcaggaccagaacgaggccttcaaccccaactccgtgaagcagctgcgggtgctgctgttcgactacgtgggcctgacccccaccggcaagctgaccgacaccggcgccgactccaccgacgccgaggccctgaacgagctggccacccagcaccccatcgccaagaccctgctggagatccggaagctgaccaagctgatctccacctacgtggagaagatcctgctgtccatcgacgccgacggctgcatccggaccggcttccacgagcacatgaccacctccggccggctgtcctcctccggcaagctgaacctgcagcagctgccccgggacgagtccatcatcaagggctgcgtggtggccccccccggctaccgggtgatcgcctgggacctgaccaccgccgaggtgtactacgccgccgtgctgtccggcgaccggaacatgcagcaggtgttcatcaacatgcggaacgagcccgacaagtaccccgacttccactccaacatcgcccacatggtgttcaagctgcagtgcgagccccgggacgtgaagaagctgttccccgccctgcggcaggccgccaaggccatcaccttcggcatcctgtacggctccggccccgccaaggtggcccactccgtgaacgaggccctgctggagcaggccgccaagaccggcgagcccttcgtggagtgcaccgtggccgacgccaaggagtacatcgagacctacttcggccagttcccccagctgaagcggtggatcgacaagtgccacgaccagatcaagaaccacggcttcatctactcccacttcggccggaagcggcggctgcacaacatccactccgaggaccggggcgtgcagggcgaggagatccggtccggcttcaacgccatcatccagtccgcctcctccgactccctgctgctgggcgccgtggacgccgacaacgagatcatctccctgggcctggagcaggagatgaagatcgtgatgctggtgcacgactccgtggtggccatcgtgcgggaggacctgatcgaccagtacaacgagatcctgatccggaacatccagaaggaccggggcatctccatccccggctgccccatcggcatcgactccgactccgaggccggcggctcccgggactactcctgcggcaagatgaagaagcagcacccctccatcgcctgcatcgacgacgacgagtacacccggtacgtgaagggcgtgctgctggacgccgagttcgagtacaagaagctggccgccatggacaaggagcaccccgaccactccaagtacaaggacgacaagttcatcgccgtgtgcaaggacctggacaacgtgaagcggatcctgggcgccggcggcggctccggcaagcggaccgccgacggctccggcggcggctcccccaagaagaagcggaaggtgtccgagtccgccacccccgagtccgtgtccggctggcggctgttcaagaagatctcctag

SEQ ID NO: 1132 - protein, 2307 aa, synthetic construct
  REGION 1..2307: note = Synthetic
MDKKYSIGLDIGTNSVGWAVITDEYKVPSKKFKVLGNTDRHSIKKNLIGALLFDSGETAEATRLKRTARRRYTRRKNRICYLQEIFSNEMAKVDDSFFHRLEESFLVEEDKKHERHPIFGNIVDEVAYHEKYPTIYHLRKKLVDSTDKADLRLIYLALAHMIKFRGHFLIEGDLNPDNSDVDKLFIQLVQTYNQLFEENPINASGVDAKAILSARLSKSRRLENLIAQLPGEKKNGLFGNLIALSLGLTPNFKSNFDLAEDAKLQLSKDTYDDDLDNLLAQIGDQYADLFLAAKNLSDAILLSDILRVNTEITKAPLSASMIKRYDEHHQDLTLLKALVRQQLPEKYKEIFFDQSKNGYAGYIDGGASQEEFYKFIKPILEKMDGTEELLVKLNREDLLRKQRTFDNGSIPHQIHLGELHAILRRQEDFYPFLKDNREKIEKILTFRIPYYVGPLARGNSRFAWMTRKSEETITPWNFEEVVDKGASAQSFIERMTNFDKNLPNEKVLPKHSLLYEYFTVYNELTKVKYVTEGMRKPAFLSGEQKKAIVDLLFKTNRKVTVKQLKEDYFKKIECFDSVEISGVEDRFNASLGTYHDLLKIIKDKDFLDNEENEDILEDIVLTLTLFEDREMIEERLKTYAHLFDDKVMKQLKRRRYTGWGRLSRKLINGIRDKQSGKTILDFLKSDGFANRNFMQLIHDDSLTFKEDIQKAQVSGQGDSLHEHIANLAGSPAIKKGILQTVKVVDELVKVMGRHKPENIVIEMARENQTTQKGQKNSRERMKRIEEGIKELGSQILKEHPVENTQLQNEKLYLYYLQNGRDMYVDQELDINRLSDYDVDAIVPQSFLKDDSIDNKVLTRSDKNRGKSDNVPSEEVVKKMKNYWRQLLNAKLITQRKFDNLTKAERGGLSELDKAGFIKRQLVETRQITKHVAQILDSRMNTKYDENDKLIREVKVITLKSKLVSDFRKDFQFYKVREINNYHHAHDAYLNAVVGTALIKKYPKLESEFVYGDYKVYDVRKMIAKSEQEIGKATAKYFFYSNIMNFFKTEITLANGEIRKRPLIETNGETGEIVWDKGRDFATVRKVLSMPQVNIVKKTEVQTGGFSKESILPKRNSDKLIARKKDWDPKKYGGFDSPTVAYSVLVVAKVEKGKSKKLKSVKELLGITIMERSSFEKNPIDFLEAKGYKEVKKDLIIKLPKYSLFELENGRKRMLASAGELQKGNELALPSKYVNFLYLASHYEKLKGSPEDNEQKQLFVEQHKHYLDEIIEQISEFSKRVILADANLDKVLSAYNKHRDKPIREQAENIIHLFTLTNLGAPAAFKYFDTTIDRKRYTSTKEVLDATLIHQSITGLYETRIDLSQLGGDGAPESATESGGTSTESEGSAGTSTESEGSAGSAGSTSGSSSGMKIAVVDKALNNTRYDKHFQLYGEEVDVFHMCNEKLSGRLLKKHITIGTPENPFDPNDYDFVILVGAEPFLYFAGKKGIGDYTGKRVEYNGYANWIASISPAQLHFKPEMKPVFDATVENIHDIINGREKIAKAGDYRPITDPDEAEEYIKMVYNMVIGPVAFASATSALYCRDGYLLGVSISHQEYQGVYIDSDCLTEVAVYYLQKILDSENHTIVFHNLKFDMHFYKYHLGLTFDKAHKERRLHDTMLQHYVLDERRGTHGLKSLAMKYTDMGDYDFELDKFKDDYCKAHKIKKEDFTYDLIPFDIMWPYAAKDTDATIRLHNFFLPKIEKNEKLCSLYYDVLMPGCVFLQRVEDRGVPISIDRLKEAQYQLTHNLNKAREKLYTYPEVKQLEQDQNEAFNPNSVKQLRVLLFDYVGLTPTGKLTDTGADSTDAEALNELATQHPIAKTLLEIRKLTKLISTYVEKILLSIDADGCIRTGFHEHMTTSGRLSSSGKLNLQQLPRDESIIKGCVVAPPGYRVIAWDLTTAEVYYAAVLSGDRNMQQVFINMRNEPDKYPDFHSNIAHMVFKLQCEPRDVKKLFPALRQAAKAITFGILYGSGPAKVAHSVNEALLEQAAKTGEPFVECTVADAKEYIETYFGQFPQLKRWIDKCHDQIKNHGFIYSHFGRKRRLHNIHSEDRGVQGEEIRSGFNAIIQSASSDSLLLGAVDADNEIISLGLEQEMKIVMLVHDSVVAIVREDLIDQYNEILIRNIQKDRGISIPGCPIGIDSDSEAGGSRDYSCGKMKKQHPSIACIDDDEYTRYVKGVLLDAEFEYKKLAAMDKEHPDHSKYKDDKFIAVCKDLDNVKRILGAGGGSGKRTADGSGGGSPKKKRKVSESATPESVSGWRLFKKIS

SEQ ID NO: 1133 - RNA, 6864 nt, synthetic construct
  misc_feature 1..6864: note = Synthetic
  source 1..6864: mol_type = other RNA
atggacaagaagtactccatcggcctggacatcggcaccaactccgtgggctgggccgtgatcaccgacgagtacaaggtgccctccaagaagttcaaggtgctgggcaacaccgaccggcactccatcaagaagaacctgatcggcgccctgctgttcgactccggcgagaccgccgaggccacccggctgaagcggaccgcccggcggcggtacacccggcggaagaaccggatctgctacctgcaggagatcttctccaacgagatggccaaggtggacgactccttcttccaccggctggaggagtccttcctggtggaggaggacaagaagcacgagcggcaccccatcttcggcaacatcgtggacgaggtggcctaccacgagaagtaccccaccatctaccacctgcggaagaagctggtggactccaccgacaaggccgacctgcggctgatctacctggccctggcccacatgatcaagttccggggccacttcctgatcgagggcgacctgaaccccgacaactccgacgtggacaagctgttcatccagctggtgcagacctacaaccagctgttcgaggagaaccccatcaacgcctccggcgtggacgccaaggccatcctgtccgcccggctgtccaagtcccggcggctggagaacctgatcgcccagctgcccggcgagaagaagaacggcctgttcggcaacctgatcgccctgtccctgggcctgacccccaacttcaagtccaacttcgacctggccgaggacgccaagctgcagctgtccaaggacacctacgacgacgacctggacaacctgctggcccagatcggcgaccagtacgccgacctgttcctggccgccaagaacctgtccgacgccatcctgctgtccgacatcctgcgggtgaacaccgagatcaccaaggcccccctgtccgcctccatgatcaagcggtacgacgagcaccaccaggacctgaccctgctgaaggccctggtgcggcagcagctgcccgagaagtacaaggagatcttcttcgaccagtccaagaacggctacgccggctacatcgacggcggcgcctcccaggaggagttctacaagttcatcaagcccatcctggagaagatggacggcaccgaggagctgctggtgaagctgaaccgggaggacctgctgcggaagcagcggaccttcgacaacggctccatcccccaccagatccacctgggcgagctgcacgccatcctgcggcggcaggaggacttctaccccttcctgaaggacaaccgggagaagatcgagaagatcctgaccttccggatcccctactacgtgggccccctggcccggggcaactcccggttcgcctggatgacccggaagtccgaggagaccatcaccccctggaacttcgaggaggtggtggacaagggcgcctccgcccagtccttcatcgagcggatgaccaacttcgacaagaacctgcccaacgagaaggtgctgcccaagcactccctgctgtacgagtacttcaccgtgtacaacgagctgaccaaggtgaagtacgtgaccgagggcatgcggaagcccgccttcctgtccggcgagcagaagaaggccatcgtggacctgctgttcaagaccaaccggaaggtgaccgtgaagcagctgaaggaggactacttcaagaagatcgagtgcttcgactccgtggagatctccggcgtggaggaccggttcaacgcctccctgggcacctaccacgacctgctgaagatcatcaaggacaaggacttcctggacaacgaggagaacgaggacatcctggaggacatcgtgctgaccctgaccctgttcgaggaccgggagatgatcgaggagcggctgaagacctacgcccacctgttcgacgacaaggtgatgaagcagctgaagcggcggcggtacaccggctggggccggctgtcccggaagctgatcaacggcatccgggacaagcagtccggcaagaccatcctggacttcctgaagtccgacggcttcgccaaccggaacttcatgcagctgatccacgacgactccctgaccttcaaggaggacatccagaaggcccaggtgtccggccagggcgactccctgcacgagcacatcgccaacctggccggctcccccgccatcaagaagggcatcctgcagaccgtgaaggtggtggacgagctggtgaaggtgatgggccggcacaagcccgagaacatcgtgatcgagatggcccgggagaaccagaccacccagaagggccagaagaactcccgggagcggatgaagcggatcgaggagggcatcaaggagctgggctcccagatcctgaaggagcaccccgtggagaacacccagctgcagaacgagaagctgtacctgtactacctgcagaacggccgggacatgtacgtggaccaggagctggacatcaaccggctgtccgactacgacgtggacgccatcgtgccccagtccttcctgaaggacgactccatcgacaacaaggtgctgacccggtccgacaagaaccggggcaagtccgacaacgtgccctccgaggaggtggtgaagaagatgaagaactactggcggcagctgctgaacgccaagctgatcacccagcggaagttcgacaacctgaccaaggccgagcggggcggcctgtccgagctggacaaggccggcttcatcaagcggcagctggtggagacccggcagatcaccaagcacgtggcccagatcctggactcccggatgaacaccaagtacgacgagaacgacaagctgatccgggaggtgaaggtgatcaccctgaagtccaagctggtgtccgacttccggaaggacttccagttctacaaggtgcgggagatcaacaactaccaccacgcccacgacgcctacctgaacgccgtggtgggcaccgccctgatcaagaagtaccccaagctggagtccgagttcgtgtacggcgactacaaggtgtacgacgtgcggaagatgatcgccaagtccgagcaggagatcggcaaggccaccgccaagtacttcttctactccaacatcatgaacttcttcaagaccgagatcaccctggccaacggcgagatccggaagcggcccctgatcgagaccaacggcgagaccggcgagatcgtgtgggacaagggccgggacttcgccaccgtgcggaaggtgctgtccatgccccaggtgaacatcgtgaagaagaccgaggtgcagaccggcggcttctccaaggagtccatcctgcccaagcggaactccgacaagctgatcgcccggaagaaggactgggaccccaagaagtacggcggcttcgactcccccaccgtggcctactccgtgctggtggtggccaaggtggagaagggcaagtccaagaagctgaagtccgtgaaggagctgctgggcatcaccatcatggagcggtcctccttcgagaagaaccccatcgacttcctggaggccaagggctacaaggaggtgaagaaggacctgatcatcaagctgcccaagtactccctgttcgagctggagaacggccggaagcggatgctggcctccgccggcgagctgcagaagggcaacgagctggccctgccctccaagtacgtgaacttcctgtacctggcctcccactacgagaagctgaagggctcccccgaggacaacgagcagaagcagctgttcgtggagcagcacaagcactacctggacgagatcatcgagcagatctccgagttctccaagcgggtgatcctggccgacgccaacctggacaaggtgctgtccgcctacaacaagcaccgggacaagcccatccgggagcaggccgagaacatcatccacctgttcaccctgaccaacctgggcgcccccgccgccttcaagtacttcgacaccaccatcgaccggaagcggtacacctccaccaaggaggtgctggacgccaccctgatccaccagtccatcaccggcctgtacgagacccggatcgacctgtcccagctgggcggcgacggcgcccccgagtccgccaccgagtccggcggcacctccaccgagtccgagggctccgccggcacctccaccgagtccgagggctccgccggctccgccggctccacctccggctcctcctccggcatgaagatcgccgtggtggacaaggccctgaacaacacccggtacgacaagcacttccagctgtacggcgaggaggtggacgtgttccacatgtgcaacgagaagctgtccggccggctgctgaagaagcacatcaccatcggcacccccgagaaccccttcgaccccaacgactacgacttcgtgatcctggtgggcgccgagcccttcctgtacttcgccggcaagaagggcatcggcgactacaccggcaagcgggtggagtacaacggctacgccaactggatcgcctccatctcccccgcccagctgcacttcaagcccgagatgaagcccgtgttcgacgccaccgtggagaacatccacgacatcatcaacggccgggagaagatcgccaaggccggcgactaccggcccatcaccgaccccgacgaggccgaggagtacatcaagatggtgtacaacatggtgatcggccccgtggccttcgcctccgccacctccgccctgtactgccgggacggctacctgctgggcgtgtccatctcccaccaggagtaccagggcgtgtacatcgactccgactgcctgaccgaggtggccgtgtactacctgcagaagatcctggactccgagaaccacaccatcgtgttccacaacctgaagttcgacatgcacttctacaagtaccacctgggcctgaccttcgacaaggcccacaaggagcggcggctgcacgacaccatgctgcagcactacgtgctggacgagcggcggggcacccacggcctgaagtccctggccatgaagtacaccgacatgggcgactacgacttcgagctggacaagttcaaggacgactactgcaaggcccacaagatcaagaaggaggacttcacctacgacctgatccccttcgacatcatgtggccctacgccgccaaggacaccgacgccaccatccggctgcacaacttcttcctgcccaagatcgagaagaacgagaagctgtgctccctgtactacgacgtgctgatgcccggctgcgtgttcctgcagcgggtggaggaccggggcgtgcccatctccatcgaccggctgaaggaggcccagtaccagctgacccacaacctgaacaaggcccgggagaagctgtacacctaccccgaggtgaagcagctggagcaggaccagaacgaggccttcaaccccaactccgtgaagcagctgcgggtgctgctgttcgactacgtgggcctgacccccaccggcaagctgaccgacaccggcgccgactccaccgacgccgaggccctgaacgagctggccacccagcaccccatcgccaagaccctgctggagatccggaagctgaccaagctgatctccacctacgtggagaagatcctgctgtccatcgacgccgacggctgcatccggaccggcttccacgagcacatgaccacctccggccggctgtcctcctccggcaagctgaacctgcagcagctgccccgggacgagtccatcatcaagggctgcgtggtggccccccccggctaccgggtgatcgcctgggacctgaccaccgccgaggtgtactacgccgccgtgctgtccggcgaccggaacatgcagcaggtgttcatcaacatgcggaacgagcccgacaagtaccccgacttccactccaacatcgcccacatggtgttcaagctgcagtgcgagccccgggacgtgaagaagctgttccccgccctgcggcaggccgccaaggccatcaccttcggcatcctgtacggctccggccccgccaaggtggcccactccgtgaacgaggccctgctggagcaggccgccaagaccggcgagcccttcgtggagtgcaccgtggccgacgccaaggagtacatcgagacctacttcggccagttcccccagctgaagcggtggatcgacaagtgccacgaccagatcaagaaccacggcttcatctactcccacttcggccggaagcggcggctgcacaacatccactccgaggaccggggcgtgcagggcgaggagatccggtccggcttcaacgccatcatccagtccgcctcctccgactccctgctgctgggcgccgtggacgccgacaacgagatcatctccctgggcctggagcaggagatgaagatcgtgatgctggtgcacgactccgtggtggccatcgtgcgggaggacctgatcgaccagtacaacgagatcctgatccggaacatccagaaggaccggggcatctccatccccggctgccccatcggcatcgactccgactccgaggccggcggctcccgggactactcctgcggcaagatgaagaagcagcacccctccatcgcctgcatcgacgacgacgagtacacccggtacgtgaagggcgtgctgctggacgccgagttcgagtacaagaagctggccgccatggacaaggagcaccccgaccactccaagtacaaggacgacaagttcatcgccgtgtgcaaggacctggacaacgtgaagcggatcctgggcgccggcggcggctccggcaagcggaccgccgacggctccggcggcggctcccccaagaagaagcggaaggtg

SEQ ID NO: 1134 - protein, 2288 aa, synthetic construct
  REGION 1..2288: note = Synthetic
MDKKYSIGLDIGTNSVGWAVITDEYKVPSKKFKVLGNTDRHSIKKNLIGALLFDSGETAEATRLKRTARRRYTRRKNRICYLQEIFSNEMAKVDDSFFHRLEESFLVEEDKKHERHPIFGNIVDEVAYHEKYPTIYHLRKKLVDSTDKADLRLIYLALAHMIKFRGHFLIEGDLNPDNSDVDKLFIQLVQTYNQLFEENPINASGVDAKAILSARLSKSRRLENLIAQLPGEKKNGLFGNLIALSLGLTPNFKSNFDLAEDAKLQLSKDTYDDDLDNLLAQIGDQYADLFLAAKNLSDAILLSDILRVNTEITKAPLSASMIKRYDEHHQDLTLLKALVRQQLPEKYKEIFFDQSKNGYAGYIDGGASQEEFYKFIKPILEKMDGTEELLVKLNREDLLRKQRTFDNGSIPHQIHLGELHAILRRQEDFYPFLKDNREKIEKILTFRIPYYVGPLARGNSRFAWMTRKSEETITPWNFEEVVDKGASAQSFIERMTNFDKNLPNEKVLPKHSLLYEYFTVYNELTKVKYVTEGMRKPAFLSGEQKKAIVDLLFKTNRKVTVKQLKEDYFKKIECFDSVEISGVEDRFNASLGTYHDLLKIIKDKDFLDNEENEDILEDIVLTLTLFEDREMIEERLKTYAHLFDDKVMKQLKRRRYTGWGRLSRKLINGIRDKQSGKTILDFLKSDGFANRNFMQLIHDDSLTFKEDIQKAQVSGQGDSLHEHIANLAGSPAIKKGILQTVKVVDELVKVMGRHKPENIVIEMARENQTTQKGQKNSRERMKRIEEGIKELGSQILKEHPVENTQLQNEKLYLYYLQNGRDMYVDQELDINRLSDYDVDAIVPQSFLKDDSIDNKVLTRSDKNRGKSDNVPSEEVVKKMKNYWRQLLNAKLITQRKFDNLTKAERGGLSELDKAGFIKRQLVETRQITKHVAQILDSRMNTKYDENDKLIREVKVITLKSKLVSDFRKDFQFYKVREINNYHHAHDAYLNAVVGTALIKKYPKLESEFVYGDYKVYDVRKMIAKSEQEIGKATAKYFFYSNIMNFFKTEITLANGEIRKRPLIETNGETGEIVWDKGRDFATVRKVLSMPQVNIVKKTEVQTGGFSKESILPKRNSDKLIARKKDWDPKKYGGFDSPTVAYSVLVVAKVEKGKSKKLKSVKELLGITIMERSSFEKNPIDFLEAKGYKEVKKDLIIKLPKYSLFELENGRKRMLASAGELQKGNELALPSKYVNFLYLASHYEKLKGSPEDNEQKQLFVEQHKHYLDEIIEQISEFSKRVILADANLDKVLSAYNKHRDKPIREQAENIIHLFTLTNLGAPAAFKYFDTTIDRKRYTSTKEVLDATLIHQSITGLYETRIDLSQLGGDGAPESATESGGTSTESEGSAGTSTESEGSAGSAGSTSGSSSGMKIAVVDKALNNTRYDKHFQLYGEEVDVFHMCNEKLSGRLLKKHITIGTPENPFDPNDYDFVILVGAEPFLYFAGKKGIGDYTGKRVEYNGYANWIASISPAQLHFKPEMKPVFDATVENIHDIINGREKIAKAGDYRPITDPDEAEEYIKMVYNMVIGPVAFASATSALYCRDGYLLGVSISHQEYQGVYIDSDCLTEVAVYYLQKILDSENHTIVFHNLKFDMHFYKYHLGLTFDKAHKERRLHDTMLQHYVLDERRGTHGLKSLAMKYTDMGDYDFELDKFKDDYCKAHKIKKEDFTYDLIPFDIMWPYAAKDTDATIRLHNFFLPKIEKNEKLCSLYYDVLMPGCVFLQRVEDRGVPISIDRLKEAQYQLTHNLNKAREKLYTYPEVKQLEQDQNEAFNPNSVKQLRVLLFDYVGLTPTGKLTDTGADSTDAEALNELATQHPIAKTLLEIRKLTKLISTYVEKILLSIDADGCIRTGFHEHMTTSGRLSSSGKLNLQQLPRDESIIKGCVVAPPGYRVIAWDLTTAEVYYAAVLSGDRNMQQVFINMRNEPDKYPDFHSNIAHMVFKLQCEPRDVKKLFPALRQAAKAITFGILYGSGPAKVAHSVNEALLEQAAKTGEPFVECTVADAKEYIETYFGQFPQLKRWIDKCHDQIKNHGFIYSHFGRKRRLHNIHSEDRGVQGEEIRSGFNAIIQSASSDSLLLGAVDADNEIISLGLEQEMKIVMLVHDSVVAIVREDLIDQYNEILIRNIQKDRGISIPGCPIGIDSDSEAGGSRDYSCGKMKKQHPSIACIDDDEYTRYVKGVLLDAEFEYKKLAAMDKEHPDHSKYKDDKFIAVCKDLDNVKRILGAGGGSGKRTADGSGGGSPKKKRKV

SEQ ID NO: 1135 - RNA, 7387 nt, synthetic construct
  misc_feature 1..7387: note = Synthetic
  source 1..7387: mol_type = other RNA
gggaagctcagaataaacgctcaactttggccggatctgccaccatgaagcggaccgccgacggctccgagttcgagtcccccaagaagaagcggaaggtggacaagaagtactccatcggcctggacatcggcaccaactccgtgggctgggccgtgatcaccgacgagtacaaggtgccctccaagaagttcaaggtgctgggcaacaccgaccggcactccatcaagaagaacctgatcggcgccctgctgttcgactccggcgagaccgccgaggccacccggctgaagcggaccgcccggcggcggtacacccggcggaagaaccggatctgctacctgcaggagatcttctccaacgagatggccaaggtggacgactccttcttccaccggctggaggagtccttcctggtggaggaggacaagaagcacgagcggcaccccatcttcggcaacatcgtggacgaggtggcctaccacgagaagtaccccaccatctaccacctgcggaagaagctggtggactccaccgacaaggccgacctgcggctgatctacctggccctggcccacatgatcaagttccggggccacttcctgatcgagggcgacctgaaccccgacaactccgacgtggacaagctgttcatccagctggtgcagacctacaaccagctgttcgaggagaaccccatcaacgcctccggcgtggacgccaaggccatcctgtccgcccggctgtccaagtcccggcggctggagaacctgatcgcccagctgcccggcgagaagaagaacggcctgttcggcaacctgatcgccctgtccctgggcctgacccccaacttcaagtccaacttcgacctggccgaggacgccaagctgcagctgtccaaggacacctacgacgacgacctggacaacctgctggcccagatcggcgaccagtacgccgacctgttcctggccgccaagaacctgtccgacgccatcctgctgtccgacatcctgcgggtgaacaccgagatcaccaaggcccccctgtccgcctccatgatcaagcggtacgacgagcaccaccaggacctgaccctgctgaaggccctggtgcggcagcagctgcccgagaagtacaaggagatcttcttcgaccagtccaagaacggctacgccggctacatcgacggcggcgcctcccaggaggagttctacaagttcatcaagcccatcctggagaagatggacggcaccgaggagctgctggtgaagctgaaccgggaggacctgctgcggaagcagcggaccttcgacaacggctccatcccccaccagatccacctgggcgagctgcacgccatcctgcggcggcaggaggacttctaccccttcctgaaggacaaccgggagaagatcgagaagatcctgaccttccggatcccctactacgtgggccccctggcccggggcaactcccggttcgcctggatgacccggaagtccgaggagaccatcaccccctggaacttcgaggaggtggtggacaagggcgcctccgcccagtccttcatcgagcggatgaccaacttcgacaagaacctgcccaacgagaaggtgctgcccaagcactccctgctgtacgagtacttcaccgtgtacaacgagctgaccaaggtgaagtacgtgaccgagggcatgcggaagcccgccttcctgtccggcgagcagaagaaggccatcgtggacctgctgttcaagaccaaccggaaggtgaccgtgaagcagctgaaggaggactacttcaagaagatcgagtgcttcgactccgtggagatctccggcgtggaggaccggttcaacgcctccctgggcacctaccacgacctgctgaagatcatcaaggacaaggacttcctggacaacgaggagaacgaggacatcctggaggacatcgtgctgaccctgaccctgttcgaggaccgggagatgatcgaggagcggctgaagacctacgcccacctgttcgacgacaaggtgatgaagcagctgaagcggcggcggtacaccggctggggccggctgtcccggaagctgatcaacggcatccgggacaagcagtccggcaagaccatcctggacttcctgaagtccgacggcttcgccaaccggaacttcatgcagctgatccacgacgactccctgaccttcaaggaggacatccagaaggcccaggtgtccggccagggcgactccctgcacgagcacatcgccaacctggccggctcccccgccatcaagaagggcatcctgcagaccgtgaaggtggtggacgagctggtgaaggtgatgggccggcacaagcccgagaacatcgtgatcgagatggcccgggagaaccagaccacccagaagggccagaagaactcccgggagcggatgaagcggatcgaggagggcatcaaggagctgggctcccagatcctgaaggagcaccccgtggagaacacccagctgcagaacgagaagctgtacctgtactacctgcagaacggccgggacatgtacgtggaccaggagctggacatcaaccggctgtccgactacgacgtggacgccatcgtgccccagtccttcctgaaggacgactccatcgacaacaaggtgctgacccggtccgacaagaaccggggcaagtccgacaacgtgccctccgaggaggtggtgaagaagatgaagaactactggcggcagctgctgaacgccaagctgatcacccagcggaagttcgacaacctgaccaaggccgagcggggcggcctgtccgagctggacaaggccggcttcatcaagcggcagctggtggagacccggcagatcaccaagcacgtggcccagatcctggactcccggatgaacaccaagtacgacgagaacgacaagctgatccgggaggtgaaggtgatcaccctgaagtccaagctggtgtccgacttccggaaggacttccagttctacaaggtgcgggagatcaacaactaccaccacgcccacgacgcctacctgaacgccgtggtgggcaccgccctgatcaagaagtaccccaagctggagtccgagttcgtgtacggcgactacaaggtgtacgacgtgcggaagatgatcgccaagtccgagcaggagatcggcaaggccaccgccaagtacttcttctactccaacatcatgaacttcttcaagaccgagatcaccctggccaacggcgagatccggaagcggcccctgatcgagaccaacggcgagaccggcgagatcgtgtgggacaagggccgggacttcgccaccgtgcggaaggtgctgtccatgccccaggtgaacatcgtgaagaagaccgaggtgcagaccggcggcttctccaaggagtccatcctgcccaagcggaactccgacaagctgatcgcccggaagaaggactgggaccccaagaagtacggcggcttcgactcccccaccgtggcctactccgtgctggtggtggccaaggtggagaagggcaagtccaagaagctgaagtccgtgaaggagctgctgggcatcaccatcatggagcggtcctccttcgagaagaaccccatcgacttcctggaggccaagggctacaaggaggtgaagaaggacctgatcatcaagctgcccaagtactccctgttcgagctggagaacggccggaagcggatgctggcctccgccggcgagctgcagaagggcaacgagctggccctgccctccaagtacgtgaacttcctgtacctggcctcccactacgagaagctgaagggctcccccgaggacaacgagcagaagcagctgttcgtggagcagcacaagcactacctggacgagatcatcgagcagatctccgagttctccaagcgggtgatcctggccgacgccaacctggacaaggtgctgtccgcctacaacaagcaccgggacaagcccatccgggagcaggccgagaacatcatccacctgttcaccctgaccaacctgggcgcccccgccgccttcaagtacttcgacaccaccatcgaccggaagcggtacacctccaccaaggaggtgctggacgccaccctgatccaccagtccatcaccggcctgtacgagacccggatcgacctgtcccagctgggcggcgactccggcggctcctccggcggctccaagcggaccgccgacggctccgagttcgagtcccccaagaagaagcggaaggtgtccggcggctcctccggcggctccatgaagatcgccgtggtggacaaggccctgaacaacacccggtacgacaagcacttccagctgtacggcgaggaggtggacgtgttccacatgtgcaacgagaagctgtccggccggctgctgaagaagcacatcaccatcggcacccccgagaaccccttcgaccccaacgactacgacttcgtgatcctggtgggcgccgagcccttcctgtacttcgccggcaagaagggcatcggcgactacaccggcaagcgggtggagtacaacggctacgccaactggatcgcctccatctcccccgcccagctgcacttcaagcccgagatgaagcccgtgttcgacgccaccgtggagaacatccacgacatcatcaacggccgggagaagatcgccaaggccggcgactaccggcccatcaccgaccccgacgaggccgaggagtacatcaagatggtgtacaacatggtgatcggccccgtggccttcgactccgagacctccgccctgtactgccgggacggctacctgctgggcgtgtccatctcccaccaggagtaccagggcgtgtacatcgactccgactgcctgaccgaggtggccgtgtactacctgcagaagatcctggactccgagaaccacaccatcgtgttccacaacctgaagttcgacatgcacttctacaagtaccacctgggcctgaccttcgacaaggcccacaaggagcggcggctgcacgacaccatgctgcagcactacgtgctggacgagcggcggggcacccacggcctgaagtccctggccatgaagtacaccgacatgggcgactacgacttcgagctggacaagttcaaggacgactactgcaaggcccacaagatcaagaaggaggacttcacctacgacctgatccccttcgacatcatgtggccctacgccgccaaggacaccgacgccaccatccggctgcacaacttcttcctgcccaagatcgagaagaacgagaagctgtgctccctgtactacgacgtgctgatgcccggctgcgtgttcctgcagcgggtggaggaccggggcgtgcccatctccatcgaccggctgaaggaggcccagtaccagctgacccacaacctgaacaaggcccgggagaagctgtacacctaccccgaggtgaagcagctggagcaggaccagaacgaggccttcaaccccaactccgtgaagcagctgcgggtgctgctgttcgactacgtgggcctgacccccaccggcaagctgaccgacaccggcgccgactccaccgacgccgaggccctgaacgagctggccacccagcaccccatcgccaagaccctgctggagatccggaagctgaccaagctgatctccacctacgtggagaagatcctgctgtccatcgacgccgacggctgcatccggaccggcttccacgagcacatgaccacctccggccggctgtcctcctccggcaagctgaacctgcagcagctgccccgggacgagtccatcatcaagggctgcgtggtggccccccccggctaccgggtgatcgcctgggacctgaccaccgccgaggtgtactacgccgccgtgctgtccggcgaccggaacatgcagcaggtgttcatcaacatgcggaacgagcccgacaagtaccccgacttccactccaacatcgcccacatggtgttcaagctgcagtgcgagccccgggacgtgaagaagctgttccccgccctgcggcaggccgccaaggccatcaccttcggcatcctgtacggctccggccccgccaaggtggcccactccgtgaacgaggccctgctggagcaggccgccaagaccggcgagcccttcgtggagtgcaccgtggccgacgccaaggagtacatcgagacctacttcggccagttcccccagctgaagcggtggatcgacaagtgccacgaccagatcaagaaccacggcttcatctactcccacttcggccggaagcggcggctgcacaacatccactccgaggaccggggcgtgcagggcgaggagatccggtccggcttcaacgccatcatccagtccgcctcctccgactccctgctgctgggcgccgtggacgccgacaacgagatcatctccctgggcctggagcaggagatgaagatcgtgatgctggtgcacgactccgtggtggccatcgtgcgggaggacctgatcgaccagtacaacgagatcctgatccggaacatccagaaggaccggggcatctccatccccggctgccccatcggcatcgactccgactccgaggccggcggctcccgggactactcctgcggcaagatgaagaagcagcacccctccatcgcctgcatcgacgacgacgagtacacccggtacgtgaagggcgtgctgctggacgccgagttcgagtacaagaagctggccgccatggacaaggagcaccccgaccactccaagtacaaggacgacaagttcatcgccgtgtgcaaggacctggacaacgtgaagcggatcctgggcgcctagctagcaccagcctcaagaacacccgaatggagtctctaagctacataataccaacttacactttacaaaatgttgtcccccaaaatgtagccattcgtatctgctcctaataaaaagaaagtttcttcacattctctcgagaaaaaaaaaaaatggaaaaaaaaaaaacggaaaaaaaaaaaaggtaaaaaaaaaaaatataaaaaaaaaaaacataaaaaaaaaaaacgaaaaaaaaaaaacgtaaaaaaaaaaaactcaaaaaaaaaaaagataaaaaaaaaaaacctaaaaaaaaaaaatgtaaaaaaaaaaaagggaaaaaaaaaaaacgcaaaaaaaaaaaacacaaaaaaaaaaaatgcaaaaaaaaaaaatcgaaaaaaaaaaaatctaaaaaaaaaaaacgaaaaaaaaaaaacccaaaaaaaaaaaagacaaaaaaaaaaaatagaaaaaaaaaaagttaaaaaaaaaaaactgaaaaaaaaaaaatttaaaaaaaaaaaatctag

SEQ ID NO: 1136 - RNA, 6828 nt, synthetic construct
  misc_feature 1..6828: note = Synthetic
  source 1..6828: mol_type = other RNA
atgaagcggaccgccgacggctccgagttcgagtcccccaagaagaagcggaaggtggacaagaagtactccatcggcctggacatcggcaccaactccgtgggctgggccgtgatcaccgacgagtacaaggtgccctccaagaagttcaaggtgctgggcaacaccgaccggcactccatcaagaagaacctgatcggcgccctgctgttcgactccggcgagaccgccgaggccacccggctgaagcggaccgcccggcggcggtacacccggcggaagaaccggatctgctacctgcaggagatcttctccaacgagatggccaaggtggacgactccttcttccaccggctggaggagtccttcctggtggaggaggacaagaagcacgagcggcaccccatcttcggcaacatcgtggacgaggtggcctaccacgagaagtaccccaccatctaccacctgcggaagaagctggtggactccaccgacaaggccgacctgcggctgatctacctggccctggcccacatgatcaagttccggggccacttcctgatcgagggcgacctgaaccccgacaactccgacgtggacaagctgttcatccagctggtgcagacctacaaccagctgttcgaggagaaccccatcaacgcctccggcgtggacgccaaggccatcctgtccgcccggctgtccaagtcccggcggctggagaacctgatcgcccagctgcccggcgagaagaagaacggcctgttcggcaacctgatcgccctgtccctgggcctgacccccaacttcaagtccaacttcgacctggccgaggacgccaagctgcagctgtccaaggacacctacgacgacgacctggacaacctgctggcccagatcggcgaccagtacgccgacctgttcctggccgccaagaacctgtccgacgccatcctgctgtccgacatcctgcgggtgaacaccgagatcaccaaggcccccctgtccgcctccatgatcaagcggtacgacgagcaccaccaggacctgaccctgctgaaggccctggtgcggcagcagctgcccgagaagtacaaggagatcttcttcgaccagtccaagaacggctacgccggctacatcgacggcggcgcctcccaggaggagttctacaagttcatcaagcccatcctggagaagatggacggcaccgaggagctgctggtgaagctgaaccgggaggacctgctgcggaagcagcggaccttcgacaacggctccatcccccaccagatccacctgggcgagctgcacgccatcctgcggcggcaggaggacttctaccccttcctgaaggacaaccgggagaagatcgagaagatcctgaccttccggatcccctactacgtgggccccctggcccggggcaactcccggttcgcctggatgacccggaagtccgaggagaccatcaccccctggaacttcgaggaggtggtggacaagggcgcctccgcccagtccttcatcgagcggatgaccaacttcgacaagaacctgcccaacgagaaggtgctgcccaagcactccctgctgtacgagtacttcaccgtgtacaacgagctgaccaaggtgaagtacgtgaccgagggcatgcggaagcccgccttcctgtccggcgagcagaagaaggccatcgtggacctgctgttcaagaccaaccggaaggtgaccgtgaagcagctgaaggaggactacttcaagaagatcgagtgcttcgactccgtggagatctccggcgtggaggaccggttcaacgcctccctgggcacctaccacgacctgctgaagatcatcaaggacaaggacttcctggacaacgaggagaacgaggacatcctggaggacatcgtgctgaccctgaccctgttcgaggaccgggagatgatcgaggagcggctgaagacctacgcccacctgttcgacgacaaggtgatgaagcagctgaagcggcggcggtacaccggctggggccggctgtcccggaagctgatcaacggcatccgggacaagcagtccggcaagaccatcctggacttcctgaagtccgacggcttcgccaaccggaacttcatgcagctgatccacgacgactccctgaccttcaaggaggacatccagaaggcccaggtgtccggccagggcgactccctgcacgagcacatcgccaacctggccggctcccccgccatcaagaagggcatcctgcagaccgtgaaggtggtggacgagctggtgaaggtgatgggccggcacaagcccgagaacatcgtgatcgagatggcccgggagaaccagaccacccagaagggccagaagaactcccgggagcggatgaagcggatcgaggagggcatcaaggagctgggctcccagatcctgaaggagcaccccgtggagaacacccagctgcagaacgagaagctgtacctgtactacctgcagaacggccgggacatgtacgtggaccaggagctggacatcaaccggctgtccgactacgacgtggacgccatcgtgccccagtccttcctgaaggacgactccatcgacaacaaggtgctgacccggtccgacaagaaccggggcaagtccgacaacgtgccctccgaggaggtggtgaagaagatgaagaactactggcggcagctgctgaacgccaagctgatcacccagcggaagttcgacaacctgaccaaggccgagcggggcggcctgtccgagctggacaaggccggcttcatcaagcggcagctggtggagacccggcagatcaccaagcacgtggcccagatcctggactcccggatgaacaccaagtacgacgagaacgacaagctgatccgggaggtgaaggtgatcaccctgaagtccaagctggtgtccgacttccggaaggacttccagttctacaaggtgcgggagatcaacaactaccaccacgcccacgacgcctacctgaacgccgtggtgggcaccgccctgatcaagaagtaccccaagctggagtccgagttcgtgtacggcgactacaaggtgtacgacgtgcggaagatgatcgccaagtccgagcaggagatcggcaaggccaccgccaagtacttcttctactccaacatcatgaacttcttcaagaccgagatcaccctggccaacggcgagatccggaagcggcccctgatcgagaccaacggcgagaccggcgagatcgtgtgggacaagggccgggacttcgccaccgtgcggaaggtgctgtccatgccccaggtgaacatcgtgaagaagaccgaggtgcagaccggcggcttctccaaggagtccatcctgcccaagcggaactccgacaagctgatcgcccggaagaaggactgggaccccaagaagtacggcggcttcgactcccccaccgtggcctactccgtgctggtggtggccaaggtggagaagggcaagtccaagaagctgaagtccgtgaaggagctgctgggcatcaccatcatggagcggtcctccttcgagaagaaccccatcgacttcctggaggccaagggctacaaggaggtgaagaaggacctgatcatcaagctgcccaagtactccctgttcgagctggagaacggccggaagcggatgctggcctccgccggcgagctgcagaagggcaacgagctggccctgccctccaagtacgtgaacttcctgtacctggcctcccactacgagaagctgaagggctcccccgaggacaacgagcagaagcagctgttcgtggagcagcacaagcactacctggacgagatcatcgagcagatctccgagttctccaagcgggtgatcctggccgacgccaacctggacaaggtgctgtccgcctacaacaagcaccgggacaagcccatccgggagcaggccgagaacatcatccacctgttcaccctgaccaacctgggcgcccccgccgccttcaagtacttcgacaccaccatcgaccggaagcggtacacctccaccaaggaggtgctggacgccaccctgatccaccagtccatcaccggcctgtacgagacccggatcgacctgtcccagctgggcggcgactccggcggctcctccggcggctccaagcggaccgccgacggctccgagttcgagtcccccaagaagaagcggaaggtgtccggcggctcctccggcggctccatgaagatcgccgtggtggacaaggccctgaacaacacccggtacgacaagcacttccagctgtacggcgaggaggtggacgtgttccacatgtgcaacgagaagctgtccggccggctgctgaagaagcacatcaccatcggcacccccgagaaccccttcgaccccaacgactacgacttcgtgatcctggtgggcgccgagcccttcctgtacttcgccggcaagaagggcatcggcgactacaccggcaagcgggtggagtacaacggctacgccaactggatcgcctccatctcccccgcccagctgcacttcaagcccgagatgaagcccgtgttcgacgccaccgtggagaacatccacgacatcatcaacggccgggagaagatcgccaaggccggcgactaccggcccatcaccgaccccgacgaggccgaggagtacatcaagatggtgtacaacatggtgatcggccccgtggccttcgactccgagacctccgccctgtactgccgggacggctacctgctgggcgtgtccatctcccaccaggagtaccagggcgtgtacatcgactccgactgcctgaccgaggtggccgtgtactacctgcagaagatcctggactccgagaaccacaccatcgtgttccacaacctgaagttcgacatgcacttctacaagtaccacctgggcctgaccttcgacaaggcccacaaggagcggcggctgcacgacaccatgctgcagcactacgtgctggacgagcggcggggcacccacggcctgaagtccctggccatgaagtacaccgacatgggcgactacgacttcgagctggacaagttcaaggacgactactgcaaggcccacaagatcaagaaggaggacttcacctacgacctgatccccttcgacatcatgtggccctacgccgccaaggacaccgacgccaccatccggctgcacaacttcttcctgcccaagatcgagaagaacgagaagctgtgctccctgtactacgacgtgctgatgcccggctgcgtgttcctgcagcgggtggaggaccggggcgtgcccatctccatcgaccggctgaaggaggcccagtaccagctgacccacaacctgaacaaggcccgggagaagctgtacacctaccccgaggtgaagcagctggagcaggaccagaacgaggccttcaaccccaactccgtgaagcagctgcgggtgctgctgttcgactacgtgggcctgacccccaccggcaagctgaccgacaccggcgccgactccaccgacgccgaggccctgaacgagctggccacccagcaccccatcgccaagaccctgctggagatccggaagctgaccaagctgatctccacctacgtggagaagatcctgctgtccatcgacgccgacggctgcatccggaccggcttccacgagcacatgaccacctccggccggctgtcctcctccggcaagctgaacctgcagcagctgccccgggacgagtccatcatcaagggctgcgtggtggccccccccggctaccgggtgatcgcctgggacctgaccaccgccgaggtgtactacgccgccgtgctgtccggcgaccggaacatgcagcaggtgttcatcaacatgcggaacgagcccgacaagtaccccgacttccactccaacatcgcccacatggtgttcaagctgcagtgcgagccccgggacgtgaagaagctgttccccgccctgcggcaggccgccaaggccatcaccttcggcatcctgtacggctccggccccgccaaggtggcccactccgtgaacgaggccctgctggagcaggccgccaagaccggcgagcccttcgtggagtgcaccgtggccgacgccaaggagtacatcgagacctacttcggccagttcccccagctgaagcggtggatcgacaagtgccacgaccagatcaagaaccacggcttcatctactcccacttcggccggaagcggcggctgcacaacatccactccgaggaccggggcgtgcagggcgaggagatccggtccggcttcaacgccatcatccagtccgcctcctccgactccctgctgctgggcgccgtggacgccgacaacgagatcatctccctgggcctggagcaggagatgaagatcgtgatgctggtgcacgactccgtggtggccatcgtgcgggaggacctgatcgaccagtacaacgagatcctgatccggaacatccagaaggaccggggcatctccatccccggctgccccatcggcatcgactccgactccgaggccggcggctcccgggactactcctgcggcaagatgaagaagcagcacccctccatcgcctgcatcgacgacgacgagtacacccggtacgtgaagggcgtgctgctggacgccgagttcgagtacaagaagctggccgccatggacaaggagcaccccgaccactccaagtacaaggacgacaagttcatcgccgtgtgcaaggacctggacaacgtgaagcggatcctgggcgcctag

SEQ ID NO: 1137 - protein, 2275 aa, synthetic construct
  REGION 1..2275: note = Synthetic
MKRTADGSEFESPKKKRKVDKKYSIGLDIGTNSVGWAVITDEYKVPSKKFKVLGNTDRHSIKKNLIGALLFDSGETAEATRLKRTARRRYTRRKNRICYLQEIFSNEMAKVDDSFFHRLEESFLVEEDKKHERHPIFGNIVDEVAYHEKYPTIYHLRKKLVDSTDKADLRLIYLALAHMIKFRGHFLIEGDLNPDNSDVDKLFIQLVQTYNQLFEENPINASGVDAKAILSARLSKSRRLENLIAQLPGEKKNGLFGNLIALSLGLTPNFKSNFDLAEDAKLQLSKDTYDDDLDNLLAQIGDQYADLFLAAKNLSDAILLSDILRVNTEITKAPLSASMIKRYDEHHQDLTLLKALVRQQLPEKYKEIFFDQSKNGYAGYIDGGASQEEFYKFIKPILEKMDGTEELLVKLNREDLLRKQRTFDNGSIPHQIHLGELHAILRRQEDFYPFLKDNREKIEKILTFRIPYYVGPLARGNSRFAWMTRKSEETITPWNFEEVVDKGASAQSFIERMTNFDKNLPNEKVLPKHSLLYEYFTVYNELTKVKYVTEGMRKPAFLSGEQKKAIVDLLFKTNRKVTVKQLKEDYFKKIECFDSVEISGVEDRFNASLGTYHDLLKIIKDKDFLDNEENEDILEDIVLTLTLFEDREMIEERLKTYAHLFDDKVMKQLKRRRYTGWGRLSRKLINGIRDKQSGKTILDFLKSDGFANRNFMQLIHDDSLTFKEDIQKAQVSGQGDSLHEHIANLAGSPAIKKGILQTVKVVDELVKVMGRHKPENIVIEMARENQTTQKGQKNSRERMKRIEEGIKELGSQILKEHPVENTQLQNEKLYLYYLQNGRDMYVDQELDINRLSDYDVDAIVPQSFLKDDSIDNKVLTRSDKNRGKSDNVPSEEVVKKMKNYWRQLLNAKLITQRKFDNLTKAERGGLSELDKAGFIKRQLVETRQITKHVAQILDSRMNTKYDENDKLIREVKVITLKSKLVSDFRKDFQFYKVREINNYHHAHDAYLNAVVGTALIKKYPKLESEFVYGDYKVYDVRKMIAKSEQEIGKATAKYFFYSNIMNFFKTEITLANGEIRKRPLIETNGETGEIVWDKGRDFATVRKVLSMPQVNIVKKTEVQTGGFSKESILPKRNSDKLIARKKDWDPKKYGGFDSPTVAYSVLVVAKVEKGKSKKLKSVKELLGITIMERSSFEKNPIDFLEAKGYKEVKKDLIIKLPKYSLFELENGRKRMLASAGELQKGNELALPSKYVNFLYLASHYEKLKGSPEDNEQKQLFVEQHKHYLDEIIEQISEFSKRVILADANLDKVLSAYNKHRDKPIREQAENIIHLFTLTNLGAPAAFKYFDTTIDRKRYTSTKEVLDATLIHQSITGLYETRIDLSQLGGDSGGSSGGSKRTADGSEFESPKKKRKVSGGSSGGSMKIAVVDKALNNTRYDKHFQLYGEEVDVFHMCNEKLSGRLLKKHITIGTPENPFDPNDYDFVILVGAEPFLYFAGKKGIGDYTGKRVEYNGYANWIASISPAQLHFKPEMKPVFDATVENIHDIINGREKIAKAGDYRPITDPDEAEEYIKMVYNMVIGPVAFDSETSALYCRDGYLLGVSISHQEYQGVYIDSDCLTEVAVYYLQKILDSENHTIVFHNLKFDMHFYKYHLGLTFDKAHKERRLHDTMLQHYVLDERRGTHGLKSLAMKYTDMGDYDFELDKFKDDYCKAHKIKKEDFTYDLIPFDIMWPYAAKDTDATIRLHNFFLPKIEKNEKLCSLYYDVLMPGCVFLQRVEDRGVPISIDRLKEAQYQLTHNLNKAREKLYTYPEVKQLEQDQNEAFNPNSVKQLRVLLFDYVGLTPTGKLTDTGADSTDAEALNELATQHPIAKTLLEIRKLTKLISTYVEKILLSIDADGCIRTGFHEHMTTSGRLSSSGKLNLQQLPRDESIIKGCVVAPPGYRVIAWDLTTAEVYYAAVLSGDRNMQQVFINMRNEPDKYPDFHSNIAHMVFKLQCEPRDVKKLFPALRQAAKAITFGILYGSGPAKVAHSVNEALLEQAAKTGEPFVECTVADAKEYIETYFGQFPQLKRWIDKCHDQIKNHGFIYSHFGRKRRLHNIHSEDRGVQGEEIRSGFNAIIQSASSDSLLLGAVDADNEIISLGLEQEMKIVMLVHDSVVAIVREDLIDQYNEILIRNIQKDRGISIPGCPIGIDSDSEAGGSRDYSCGKMKKQHPSIACIDDDEYTRYVKGVLLDAEFEYKKLAAMDKEHPDHSKYKDDKFIAVCKDLDNVKRILGA

SEQ ID NO: 1138 - RNA, 7546 nt, synthetic construct
  misc_feature 1..7546: note = Synthetic
  source 1..7546: mol_type = other RNA
gggaagctcagaataaacgctcaactttggccggatctgccaccatgaaacggacagccgacggaagcgagttcgagtcaccaaagaagaagcggaaagtcgacaagaagtactccatcggcctggacatcggcaccaactccgtgggctgggccgtgatcaccgacgagtacaaggtgccctccaagaagttcaaggtgctgggcaacaccgaccggcactccatcaagaagaacctgatcggcgccctgctgttcgactccggcgagaccgccgaggccacccggctgaagcggaccgcccggcggcggtacacccggcggaagaaccggatctgctacctgcaggagatcttctccaacgagatggccaaggtggacgactccttcttccaccggctggaggagtccttcctggtggaggaggacaagaagcacgagcggcaccccatcttcggcaacatcgtggacgaggtggcctaccacgagaagtaccccaccatctaccacctgcggaagaagctggtggactccaccgacaaggccgacctgcggctgatctacctggccctggcccacatgatcaagttccggggccacttcctgatcgagggcgacctgaaccccgacaactccgacgtggacaagctgttcatccagctggtgcagacctacaaccagctgttcgaggagaaccccatcaacgcctccggcgtggacgccaaggccatcctgtccgcccggctgtccaagtcccggcggctggagaacctgatcgcccagctgcccggcgagaagaagaacggcctgttcggcaacctgatcgccctgtccctgggcctgacccccaacttcaagtccaacttcgacctggccgaggacgccaagctgcagctgtccaaggacacctacgacgacgacctggacaacctgctggcccagatcggcgaccagtacgccgacctgttcctggccgccaagaacctgtccgacgccatcctgctgtccgacatcctgcgggtgaacaccgagatcaccaaggcccccctgtccgcctccatgatcaagcggtacgacgagcaccaccaggacctgaccctgctgaaggccctggtgcggcagcagctgcccgagaagtacaaggagatcttcttcgaccagtccaagaacggctacgccggctacatcgacggcggcgcctcccaggaggagttctacaagttcatcaagcccatcctggagaagatggacggcaccgaggagctgctggtgaagctgaaccgggaggacctgctgcggaagcagcggaccttcgacaacggctccatcccccaccagatccacctgggcgagctgcacgccatcctgcggcggcaggaggacttctaccccttcctgaaggacaaccgggagaagatcgagaagatcctgaccttccggatcccctactacgtgggccccctggcccggggcaactcccggttcgcctggatgacccggaagtccgaggagaccatcaccccctggaacttcgaggaggtggtggacaagggcgcctccgcccagtccttcatcgagcggatgaccaacttcgacaagaacctgcccaacgagaaggtgctgcccaagcactccctgctgtacgagtacttcaccgtgtacaacgagctgaccaaggtgaagtacgtgaccgagggcatgcggaagcccgccttcctgtccggcgagcagaagaaggccatcgtggacctgctgttcaagaccaaccggaaggtgaccgtgaagcagctgaaggaggactacttcaagaagatcgagtgcttcgactccgtggagatctccggcgtggaggaccggttcaacgcctccctgggcacctaccacgacctgctgaagatcatcaaggacaaggacttcctggacaacgaggagaacgaggacatcctggaggacatcgtgctgaccctgaccctgttcgaggaccgggagatgatcgaggagcggctgaagacctacgcccacctgttcgacgacaaggtgatgaagcagctgaagcggcggcggtacaccggctggggccggctgtcccggaagctgatcaacggcatccgggacaagcagtccggcaagaccatcctggacttcctgaagtccgacggcttcgccaaccggaacttcatgcagctgatccacgacgactccctgaccttcaaggaggacatccagaaggcccaggtgtccggccagggcgactccctgcacgagcacatcgccaacctggccggctcccccgccatcaagaagggcatcctgcagaccgtgaaggtggtggacgagctggtgaaggtgatgggccggcacaagcccgagaacatcgtgatcgagatggcccgggagaaccagaccacccagaagggccagaagaactcccgggagcggatgaagcggatcgaggagggcatcaaggagctgggctcccagatcctgaaggagcaccccgtggagaacacccagctgcagaacgagaagctgtacctgtactacctgcagaacggccgggacatgtacgtggaccaggagctggacatcaaccggctgtccgactacgacgtggacgccatcgtgccccagtccttcctgaaggacgactccatcgacaacaaggtgctgacccggtccgacaagaaccggggcaagtccgacaacgtgccctccgaggaggtggtgaagaagatgaagaactactggcggcagctgctgaacgccaagctgatcacccagcggaagttcgacaacctgaccaaggccgagcggggcggcctgtccgagctggacaaggccggcttcatcaagcggcagctggtggagacccggcagatcaccaagcacgtggcccagatcctggactcccggatgaacaccaagtacgacgagaacgacaagctgatccgggaggtgaaggtgatcaccctgaagtccaagctggtgtccgacttccggaaggacttccagttctacaaggtgcgggagatcaacaactaccaccacgcccacgacgcctacctgaacgccgtggtgggcaccgccctgatcaagaagtaccccaagctggagtccgagttcgtgtacggcgactacaaggtgtacgacgtgcggaagatgatcgccaagtccgagcaggagatcggcaaggccaccgccaagtacttcttctactccaacatcatgaacttcttcaagaccgagatcaccctggccaacggcgagatccggaagcggcccctgatcgagaccaacggcgagaccggcgagatcgtgtgggacaagggccgggacttcgccaccgtgcggaaggtgctgtccatgccccaggtgaacatcgtgaagaagaccgaggtgcagaccggcggcttctccaaggagtccatcctgcccaagcggaactccgacaagctgatcgcccggaagaaggactgggaccccaagaagtacggcggcttcgactcccccaccgtggcctactccgtgctggtggtggccaaggtggagaagggcaagtccaagaagctgaagtccgtgaaggagctgctgggcatcaccatcatggagcggtcctccttcgagaagaaccccatcgacttcctggaggccaagggctacaaggaggtgaagaaggacctgatcatcaagctgcccaagtactccctgttcgagctggagaacggccggaagcggatgctggcctccgccggcgagctgcagaagggcaacgagctggccctgccctccaagtacgtgaacttcctgtacctggcctcccactacgagaagctgaagggctcccccgaggacaacgagcagaagcagctgttcgtggagcagcacaagcactacctggacgagatcatcgagcagatctccgagttctccaagcgggtgatcctggccgacgccaacctggacaaggtgctgtccgcctacaacaagcaccgggacaagcccatccgggagcaggccgagaacatcatccacctgttcaccctgaccaacctgggcgcccccgccgccttcaagtacttcgacaccaccatcgaccggaagcggtacacctccaccaaggaggtgctggacgccaccctgatccaccagtccatcaccggcctgtacgagacccggatcgacctgtcccagctgggcggcgactccggcggaagctctggtggcagcaagcggaccgccgacggctctgaattcgagagccctaagaagaaaagaaaggtgagcggaggctctagcggcggaagcatgaagatcgccgtggtggacaaggccctgaacaacacccggtacgacaagcacttccagctgtacggcgaggaggtggacgtgttccacatgtgcaacgagaagctgtccggccggctgctgaagaagcacatcaccatcggcacccccgagaaccccttcgaccccaacgactacgacttcgtgatcctggtgggcgccgagcccttcctgtacttcgccggcaagaagggcatcggcgactacaccggcaagcgggtggagtacaacggctacgccaactggatcgcctccatctcccccgcccagctgcacttcaagcccgagatgaagcccgtgttcgacgccaccgtggagaacatccacgacatcatcaacggccgggagaagatcgccaaggccggcgactaccggcccatcaccgaccccgacgaggccgaggagtacatcaagatggtgtacaacatggtgatcggccccgtggccttcgcctccgccacctccgccctgtactgccgggacggctacctgctgggcgtgtccatctcccaccaggagtaccagggcgtgtacatcgactccgactgcctgaccgaggtggccgtgtactacctgcagaagatcctggactccgagaaccacaccatcgtgttccacaacctgaagttcgacatgcacttctacaagtaccacctgggcctgaccttcgacaaggcccacaaggagcggcggctgcacgacaccatgctgcagcactacgtgctggacgagcggcggggcacccacggcctgaagtccctggccatgaagtacaccgacatgggcgactacgacttcgagctggacaagttcaaggacgactactgcaaggcccacaagatcaagaaggaggacttcacctacgacctgatccccttcgacatcatgtggccctacgccgccaaggacaccgacgccaccatccggctgcacaacttcttcctgcccaagatcgagaagaacgagaagctgtgctccctgtactacgacgtgctgatgcccggctgcgtgttcctgcagcgggtggaggaccggggcgtgcccatctccatcgaccggctgaaggaggcccagtaccagctgacccacaacctgaacaaggcccgggagaagctgtacacctaccccgaggtgaagcagctggagcaggaccagaacgaggccttcaaccccaactccgtgaagcagctgcgggtgctgctgttcgactacgtgggcctgacccccaccggcaagctgaccgacaccggcgccgactccaccgacgccgaggccctgaacgagctggccacccagcaccccatcgccaagaccctgctggagatccggaagctgaccaagctgatctccacctacgtggagaagatcctgctgtccatcgacgccgacggctgcatccggaccggcttccacgagcacatgaccacctccggccggctgtcctcctccggcaagctgaacctgcagcagctgccccgggacgagtccatcatcaagggctgcgtggtggccccccccggctaccgggtgatcgcctgggacctgaccaccgccgaggtgtactacgccgccgtgctgtccggcgaccggaacatgcagcaggtgttcatcaacatgcggaacgagcccgacaagtaccccgacttccactccaacatcgcccacatggtgttcaagctgcagtgcgagccccgggacgtgaagaagctgttccccgccctgcggcaggccgccaaggccatcaccttcggcatcctgtacggctccggccccgccaaggtggcccactccgtgaacgaggccctgctggagcaggccgccaagaccggcgagcccttcgtggagtgcaccgtggccgacgccaaggagtacatcgagacctacttcggccagttcccccagctgaagcggtggatcgacaagtgccacgaccagatcaagaaccacggcttcatctactcccacttcggccggaagcggcggctgcacaacatccactccgaggaccggggcgtgcagggcgaggagatccggtccggcttcaacgccatcatccagtccgcctcctccgactccctgctgctgggcgccgtggacgccgacaacgagatcatctccctgggcctggagcaggagatgaagatcgtgatgctggtgcacgactccgtggtggccatcgtgcgggaggacctgatcgaccagtacaacgagatcctgatccggaacatccagaaggaccggggcatctccatccccggctgccccatcggcatcgactccgactccgaggccggcggctcccgggactactcctgcggcaagatgaagaagcagcacccctccatcgcctgcatcgacgacgacgagtacacccggtacgtgaagggcgtgctgctggacgccgagttcgagtacaagaagctggccgccatggacaaggagcaccccgaccactccaagtacaaggacgacaagttcatcgccgtgtgcaaggacctggacaacgtgaagcggatcctgggcgcctctggcggctcaaaaagaaccgccgacggcagcgaattcgagtctcccaagaagaagaggaaagtcggctctggccctgccgctaagagagtgaagctggactccgagtccgccacccccgagtccgtgtccggctggcggctgttcaagaagatctcctagctagcaccagcctcaagaacacccgaatggagtctctaagctacataataccaacttacactttacaaaatgttgtcccccaaaatgtagccattcgtatctgctcctaataaaaagaaagtttcttcacattctctcgagaaaaaaaaaaaatggaaaaaaaaaaaacggaaaaaaaaaaaaggtaaaaaaaaaaaatataaaaaaaaaaaacataaaaaaaaaaaacgaaaaaaaaaaaacgtaaaaaaaaaaaactcaaaaaaaaaaaagataaaaaaaaaaaacctaaaaaaaaaaaatgtaaaaaaaaaaaagggaaaaaaaaaaaacgcaaaaaaaaaaaacacaaaaaaaaaaaatgcaaaaaaaaaaaatcgaaaaaaaaaaaatctaaaaaaaaaaaacgaaaaaaaaaaaacccaaaaaaaaaaaagacaaaaaaaaaaaatagaaaaaaaaaaagttaaaaaaaaaaaactgaaaaaaaaaaaatttaaaaaaaaaaaatctag

SEQ ID NO: 1139 - RNA, 6987 nt, synthetic construct
  misc_feature 1..6987: note = Synthetic
  source 1..6987: mol_type = other RNA
atgaaacggacagccgacggaagcgagttcgagtcaccaaagaagaagcggaaagtcgacaagaagtactccatcggcctggacatcggcaccaactccgtgggctgggccgtgatcaccgacgagtacaaggtgccctccaagaagttcaaggtgctgggcaacaccgaccggcactccatcaagaagaacctgatcggcgccctgctgttcgactccggcgagaccgccgaggccacccggctgaagcggaccgcccggcggcggtacacccggcggaagaaccggatctgctacctgcaggagatcttctccaacgagatggccaaggtggacgactccttcttccaccggctggaggagtccttcctggtggaggaggacaagaagcacgagcggcaccccatcttcggcaacatcgtggacgaggtggcctaccacgagaagtaccccaccatctaccacctgcggaagaagctggtggactccaccgacaaggccgacctgcggctgatctacctggccctggcccacatgatcaagttccggggccacttcctgatcgagggcgacctgaaccccgacaactccgacgtggacaagctgttcatccagctggtgcagacctacaaccagctgttcgaggagaaccccatcaacgcctccggcgtggacgccaaggccatcctgtccgcccggctgtccaagtcccggcggctggagaacctgatcgcccagctgcccggcgagaagaagaacggcctgttcggcaacctgatcgccctgtccctgggcctgacccccaacttcaagtccaacttcgacctggccgaggacgccaagctgcagctgtccaaggacacctacgacgacgacctggacaacctgctggcccagatcggcgaccagtacgccgacctgttcctggccgccaagaacctgtccgacgccatcctgctgtccgacatcctgcgggtgaacaccgagatcaccaaggcccccctgtccgcctccatgatcaagcggtacgacgagcaccaccaggacctgaccctgctgaaggccctggtgcggcagcagctgcccgagaagtacaaggagatcttcttcgaccagtccaagaacggctacgccggctacatcgacggcggcgcctcccaggaggagttctacaagttcatcaagcccatcctggagaagatggacggcaccgaggagctgctggtgaagctgaaccgggaggacctgctgcggaagcagcggaccttcgacaacggctccatcccccaccagatccacctgggcgagctgcacgccatcctgcggcggcaggaggacttctaccccttcctgaaggacaaccgggagaagatcgagaagatcctgaccttccggatcccctactacgtgggccccctggcccggggcaactcccggttcgcctggatgacccggaagtccgaggagaccatcaccccctggaacttcgaggaggtggtggacaagggcgcctccgcccagtccttcatcgagcggatgaccaacttcgacaagaacctgcccaacgagaaggtgctgcccaagcactccctgctgtacgagtacttcaccgtgtacaacgagctgaccaaggtgaagtacgtgaccgagggcatgcggaagcccgccttcctgtccggcgagcagaagaaggccatcgtggacctgctgttcaagaccaaccggaaggtgaccgtgaagcagctgaaggaggactacttcaagaagatcgagtgcttcgactccgtggagatctccggcgtggaggaccggttcaacgcctccctgggcacctaccacgacctgctgaagatcatcaaggacaaggacttcctggacaacgaggagaacgaggacatcctggaggacatcgtgctgaccctgaccctgttcgaggaccgggagatgatcgaggagcggctgaagacctacgcccacctgttcgacgacaaggtgatgaagcagctgaagcggcggcggtacaccggctggggccggctgtcccggaagctgatcaacggcatccgggacaagcagtccggcaagaccatcctggacttcctgaagtccgacggcttcgccaaccggaacttcatgcagctgatccacgacgactccctgaccttcaaggaggacatccagaaggcccaggtgtccggccagggcgactccctgcacgagcacatcgccaacctggccggctcccccgccatcaagaagggcatcctgcagaccgtgaaggtggtggacgagctggtgaaggtgatgggccggcacaagcccgagaacatcgtgatcgagatggcccgggagaaccagaccacccagaagggccagaagaactcccgggagcggatgaagcggatcgaggagggcatcaaggagctgggctcccagatcctgaaggagcaccccgtggagaacacccagctgcagaacgagaagctgtacctgtactacctgcagaacggccgggacatgtacgtggaccaggagctggacatcaaccggctgtccgactacgacgtggacgccatcgtgccccagtccttcctgaaggacgactccatcgacaacaaggtgctgacccggtccgacaagaaccggggcaagtccgacaacgtgccctccgaggaggtggtgaagaagatgaagaactactggcggcagctgctgaacgccaagctgatcacccagcggaagttcgacaacctgaccaaggccgagcggggcggcctgtccgagctggacaaggccggcttcatcaagcggcagctggtggagacccggcagatcaccaagcacgtggcccagatcctggactcccggatgaacaccaagtacgacgagaacgacaagctgatccgggaggtgaaggtgatcaccctgaagtccaagctggtgtccgacttccggaaggacttccagttctacaaggtgcgggagatcaacaactaccaccacgcccacgacgcctacctgaacgccgtggtgggcaccgccctgatcaagaagtaccccaagctggagtccgagttcgtgtacggcgactacaaggtgtacgacgtgcggaagatgatcgccaagtccgagcaggagatcggcaaggccaccgccaagtacttcttctactccaacatcatgaacttcttcaagaccgagatcaccctggccaacggcgagatccggaagcggcccctgatcgagaccaacggcgagaccggcgagatcgtgtgggacaagggccgggacttcgccaccgtgcggaaggtgctgtccatgccccaggtgaacatcgtgaagaagaccgaggtgcagaccggcggcttctccaaggagtccatcctgcccaagcggaactccgacaagctgatcgcccggaagaaggactgggaccccaagaagtacggcggcttcgactcccccaccgtggcctactccgtgctggtggtggccaaggtggagaagggcaagtccaagaagctgaagtccgtgaaggagctgctgggcatcaccatcatggagcggtcctccttcgagaagaaccccatcgacttcctggaggccaagggctacaaggaggtgaagaaggacctgatcatcaagctgcccaagtactccctgttcgagctggagaacggccggaagcggatgctggcctccgccggcgagctgcagaagggcaacgagctggccctgccctccaagtacgtgaacttcctgtacctggcctcccactacgagaagctgaagggctcccccgaggacaacgagcagaagcagctgttcgtggagcagcacaagcactacctggacgagatcatcgagcagatctccgagttctccaagcgggtgatcctggccgacgccaacctggacaaggtgctgtccgcctacaacaagcaccgggacaagcccatccgggagcaggccgagaacatcatccacctgttcaccctgaccaacctgggcgcccccgccgccttcaagtacttcgacaccaccatcgaccggaagcggtacacctccaccaaggaggtgctggacgccaccctgatccaccagtccatcaccggcctgtacgagacccggatcgacctgtcccagctgggcggcgactccggcggaagctctggtggcagcaagcggaccgccgacggctctgaattcgagagccctaagaagaaaagaaaggtgagcggaggctctagcggcggaagcatgaagatcgccgtggtggacaaggccctgaacaacacccggtacgacaagcacttccagctgtacggcgaggaggtggacgtgttccacatgtgcaacgagaagctgtccggccggctgctgaagaagcacatcaccatcggcacccccgagaaccccttcgaccccaacgactacgacttcgtgatcctggtgggcgccgagcccttcctgtacttcgccggcaagaagggcatcggcgactacaccggcaagcgggtggagtacaacggctacgccaactggatcgcctccatctcccccgcccagctgcacttcaagcccgagatgaagcccgtgttcgacgccaccgtggagaacatccacgacatcatcaacggccgggagaagatcgccaaggccggcgactaccggcccatcaccgaccccgacgaggccgaggagtacatcaagatggtgtacaacatggtgatcggccccgtggccttcgcctccgccacctccgccctgtactgccgggacggctacctgctgggcgtgtccatctcccaccaggagtaccagggcgtgtacatcgactccgactgcctgaccgaggtggccgtgtactacctgcagaagatcctggactccgagaaccacaccatcgtgttccacaacctgaagttcgacatgcacttctacaagtaccacctgggcctgaccttcgacaaggcccacaaggagcggcggctgcacgacaccatgctgcagcactacgtgctggacgagcggcggggcacccacggcctgaagtccctggccatgaagtacaccgacatgggcgactacgacttcgagctggacaagttcaaggacgactactgcaaggcccacaagatcaagaaggaggacttcacctacgacctgatccccttcgacatcatgtggccctacgccgccaaggacaccgacgccaccatccggctgcacaacttcttcctgcccaagatcgagaagaacgagaagctgtgctccctgtactacgacgtgctgatgcccggctgcgtgttcctgcagcgggtggaggaccggggcgtgcccatctccatcgaccggctgaaggaggcccagtaccagctgacccacaacctgaacaaggcccgggagaagctgtacacctaccccgaggtgaagcagctggagcaggaccagaacgaggccttcaaccccaactccgtgaagcagctgcgggtgctgctgttcgactacgtgggcctgacccccaccggcaagctgaccgacaccggcgccgactccaccgacgccgaggccctgaacgagctggccacccagcaccccatcgccaagaccctgctggagatccggaagctgaccaagctgatctccacctacgtggagaagatcctgctgtccatcgacgccgacggctgcatccggaccggcttccacgagcacatgaccacctccggccggctgtcctcctccggcaagctgaacctgcagcagctgccccgggacgagtccatcatcaagggctgcgtggtggccccccccggctaccgggtgatcgcctgggacctgaccaccgccgaggtgtactacgccgccgtgctgtccggcgaccggaacatgcagcaggtgttcatcaacatgcggaacgagcccgacaagtaccccgacttccactccaacatcgcccacatggtgttcaagctgcagtgcgagccccgggacgtgaagaagctgttccccgccctgcggcaggccgccaaggccatcaccttcggcatcctgtacggctccggccccgccaaggtggcccactccgtgaacgaggccctgctggagcaggccgccaagaccggcgagcccttcgtggagtgcaccgtggccgacgccaaggagtacatcgagacctacttcggccagttcccccagctgaagcggtggatcgacaagtgccacgaccagatcaagaaccacggcttcatctactcccacttcggccggaagcggcggctgcacaacatccactccgaggaccggggcgtgcagggcgaggagatccggtccggcttcaacgccatcatccagtccgcctcctccgactccctgctgctgggcgccgtggacgccgacaacgagatcatctccctgggcctggagcaggagatgaagatcgtgatgctggtgcacgactccgtggtggccatcgtgcgggaggacctgatcgaccagtacaacgagatcctgatccggaacatccagaaggaccggggcatctccatccccggctgccccatcggcatcgactccgactccgaggccggcggctcccgggactactcctgcggcaagatgaagaagcagcacccctccatcgcctgcatcgacgacgacgagtacacccggtacgtgaagggcgtgctgctggacgccgagttcgagtacaagaagctggccgccatggacaaggagcaccccgaccactccaagtacaaggacgacaagttcatcgccgtgtgcaaggacctggacaacgtgaagcggatcctgggcgcctctggcggctcaaaaagaaccgccgacggcagcgaattcgagtctcccaagaagaagaggaaagtcggctctggccctgccgctaagagagtgaagctggactccgagtccgccacccccgagtccgtgtccggctggcggctgttcaagaagatctcctag

SEQ ID NO: 1140 - protein, 2328 aa, synthetic construct
  REGION 1..2328: note = Synthetic
MKRTADGSEFESPKKKRKVDKKYSIGLDIGTNSVGWAVITDEYKVPSKKFKVLGNTDRHSIKKNLIGALLFDSGETAEATRLKRTARRRYTRRKNRICYLQEIFSNEMAKVDDSFFHRLEESFLVEEDKKHERHPIFGNIVDEVAYHEKYPTIYHLRKKLVDSTDKADLRLIYLALAHMIKFRGHFLIEGDLNPDNSDVDKLFIQLVQTYNQLFEENPINASGVDAKAILSARLSKSRRLENLIAQLPGEKKNGLFGNLIALSLGLTPNFKSNFDLAEDAKLQLSKDTYDDDLDNLLAQIGDQYADLFLAAKNLSDAILLSDILRVNTEITKAPLSASMIKRYDEHHQDLTLLKALVRQQLPEKYKEIFFDQSKNGYAGYIDGGASQEEFYKFIKPILEKMDGTEELLVKLNREDLLRKQRTFDNGSIPHQIHLGELHAILRRQEDFYPFLKDNREKIEKILTFRIPYYVGPLARGNSRFAWMTRKSEETITPWNFEEVVDKGASAQSFIERMTNFDKNLPNEKVLPKHSLLYEYFTVYNELTKVKYVTEGMRKPAFLSGEQKKAIVDLLFKTNRKVTVKQLKEDYFKKIECFDSVEISGVEDRFNASLGTYHDLLKIIKDKDFLDNEENEDILEDIVLTLTLFEDREMIEERLKTYAHLFDDKVMKQLKRRRYTGWGRLSRKLINGIRDKQSGKTILDFLKSDGFANRNFMQLIHDDSLTFKEDIQKAQVSGQGDSLHEHIANLAGSPAIKKGILQTVKVVDELVKVMGRHKPENIVIEMARENQTTQKGQKNSRERMKRIEEGIKELGSQILKEHPVENTQLQNEKLYLYYLQNGRDMYVDQELDINRLSDYDVDAIVPQSFLKDDSIDNKVLTRSDKNRGKSDNVPSEEVVKKMKNYWRQLLNAKLITQRKFDNLTKAERGGLSELDKAGFIKRQLVETRQITKHVAQILDSRMNTKYDENDKLIREVKVITLKSKLVSDFRKDFQFYKVREINNYHHAHDAYLNAVVGTALIKKYPKLESEFVYGDYKVYDVRKMIAKSEQEIGKATAKYFFYSNIMNFFKTEITLANGEIRKRPLIETNGETGEIVWDKGRDFATVRKVLSMPQVNIVKKTEVQTGGFSKESILPKRNSDKLIARKKDWDPKKYGGFDSPTVAYSVLVVAKVEKGKSKKLKSVKELLGITIMERSSFEKNPIDFLEAKGYKEVKKDLIIKLPKYSLFELENGRKRMLASAGELQKGNELALPSKYVNFLYLASHYEKLKGSPEDNEQKQLFVEQHKHYLDEIIEQISEFSKRVILADANLDKVLSAYNKHRDKPIREQAENIIHLFTLTNLGAPAAFKYFDTTIDRKRYTSTKEVLDATLIHQSITGLYETRIDLSQLGGDSGGSSGGSKRTADGSEFESPKKKRKVSGGSSGGSMKIAVVDKALNNTRYDKHFQLYGEEVDVFHMCNEKLSGRLLKKHITIGTPENPFDPNDYDFVILVGAEPFLYFAGKKGIGDYTGKRVEYNGYANWIASISPAQLHFKPEMKPVFDATVENIHDIINGREKIAKAGDYRPITDPDEAEEYIKMVYNMVIGPVAFASATSALYCRDGYLLGVSISHQEYQGVYIDSDCLTEVAVYYLQKILDSENHTIVFHNLKFDMHFYKYHLGLTFDKAHKERRLHDTMLQHYVLDERRGTHGLKSLAMKYTDMGDYDFELDKFKDDYCKAHKIKKEDFTYDLIPFDIMWPYAAKDTDATIRLHNFFLPKIEKNEKLCSLYYDVLMPGCVFLQRVEDRGVPISIDRLKEAQYQLTHNLNKAREKLYTYPEVKQLEQDQNEAFNPNSVKQLRVLLFDYVGLTPTGKLTDTGADSTDAEALNELATQHPIAKTLLEIRKLTKLISTYVEKILLSIDADGCIRTGFHEHMTTSGRLSSSGKLNLQQLPRDESIIKGCVVAPPGYRVIAWDLTTAEVYYAAVLSGDRNMQQVFINMRNEPDKYPDFHSNIAHMVFKLQCEPRDVKKLFPALRQAAKAITFGILYGSGPAKVAHSVNEALLEQAAKTGEPFVECTVADAKEYIETYFGQFPQLKRWIDKCHDQIKNHGFIYSHFGRKRRLHNIHSEDRGVQGEEIRSGFNAIIQSASSDSLLLGAVDADNEIISLGLEQEMKIVMLVHDSVVAIVREDLIDQYNEILIRNIQKDRGISIPGCPIGIDSDSEAGGSRDYSCGKMKKQHPSIACIDDDEYTRYVKGVLLDAEFEYKKLAAMDKEHPDHSKYKDDKFIAVCKDLDNVKRILGASGGSKRTADGSEFESPKKKRKVGSGPAAKRVKLDSESATPESVSGWRLFKKIS

SEQ ID NO: 1141 - RNA, 6927 nt, synthetic construct
  misc_feature 1..6927: note = Synthetic
  source 1..6927: mol_type = other RNA
atgaaacggacagccgacggaagcgagttcgagtcaccaaagaagaagcggaaagtcgacaagaagtactccatcggcctggacatcggcaccaactccgtgggctgggccgtgatcaccgacgagtacaaggtgccctccaagaagttcaaggtgctgggcaacaccgaccggcactccatcaagaagaacctgatcggcgccctgctgttcgactccggcgagaccgccgaggccacccggctgaagcggaccgcccggcggcggtacacccggcggaagaaccggatctgctacctgcaggagatcttctccaacgagatggccaaggtggacgactccttcttccaccggctggaggagtccttcctggtggaggaggacaagaagcacgagcggcaccccatcttcggcaacatcgtggacgaggtggcctaccacgagaagtaccccaccatctaccacctgcggaagaagctggtggactccaccgacaaggccgacctgcggctgatctacctggccctggcccacatgatcaagttccggggccacttcctgatcgagggcgacctgaaccccgacaactccgacgtggacaagctgttcatccagctggtgcagacctacaaccagctgttcgaggagaaccccatcaacgcctccggcgtggacgccaaggccatcctgtccgcccggctgtccaagtcccggcggctggagaacctgatcgcccagctgcccggcgagaagaagaacggcctgttcggcaacctgatcgccctgtccctgggcctgacccccaacttcaagtccaacttcgacctggccgaggacgccaagctgcagctgtccaaggacacctacgacgacgacctggacaacctgctggcccagatcggcgaccagtacgccgacctgttcctggccgccaagaacctgtccgacgccatcctgctgtccgacatcctgcgggtgaacaccgagatcaccaaggcccccctgtccgcctccatgatcaagcggtacgacgagcaccaccaggacctgaccctgctgaaggccctggtgcggcagcagctgcccgagaagtacaaggagatcttcttcgaccagtccaagaacggctacgccggctacatcgacggcggcgcctcccaggaggagttctacaagttcatcaagcccatcctggagaagatggacggcaccgaggagctgctggtgaagctgaaccgggaggacctgctgcggaagcagcggaccttcgacaacggctccatcccccaccagatccacctgggcgagctgcacgccatcctgcggcggcaggaggacttctaccccttcctgaaggacaaccgggagaagatcgagaagatcctgaccttccggatcccctactacgtgggccccctggcccggggcaactcccggttcgcctggatgacccggaagtccgaggagaccatcaccccctggaacttcgaggaggtggtggacaagggcgcctccgcccagtccttcatcgagcggatgaccaacttcgacaagaacctgcccaacgagaaggtgctgcccaagcactccctgctgtacgagtacttcaccgtgtacaacgagctgaccaaggtgaagtacgtgaccgagggcatgcggaagcccgccttcctgtccggcgagcagaagaaggccatcgtggacctgctgttcaagaccaaccggaaggtgaccgtgaagcagctgaaggaggactacttcaagaagatcgagtgcttcgactccgtggagatctccggcgtggaggaccggttcaacgcctccctgggcacctaccacgacctgctgaagatcatcaaggacaaggacttcctggacaacgaggagaacgaggacatcctggaggacatcgtgctgaccctgaccctgttcgaggaccgggagatgatcgaggagcggctgaagacctacgcccacctgttcgacgacaaggtgatgaagcagctgaagcggcggcggtacaccggctggggccggctgtcccggaagctgatcaacggcatccgggacaagcagtccggcaagaccatcctggacttcctgaagtccgacggcttcgccaaccggaacttcatgcagctgatccacgacgactccctgaccttcaaggaggacatccagaaggcccaggtgtccggccagggcgactccctgcacgagcacatcgccaacctggccggctcccccgccatcaagaagggcatcctgcagaccgtgaaggtggtggacgagctggtgaaggtgatgggccggcacaagcccgagaacatcgtgatcgagatggcccgggagaaccagaccacccagaagggccagaagaactcccgggagcggatgaagcggatcgaggagggcatcaaggagctgggctcccagatcctgaaggagcaccccgtggagaacacccagctgcagaacgagaagctgtacctgtactacctgcagaacggccgggacatgtacgtggaccaggagctggacatcaaccggctgtccgactacgacgtggacgccatcgtgccccagtccttcctgaaggacgactccatcgacaacaaggtgctgacccggtccgacaagaaccggggcaagtccgacaacgtgccctccgaggaggtggtgaagaagatgaagaactactggcggcagctgctgaacgccaagctgatcacccagcggaagttcgacaacctgaccaaggccgagcggggcggcctgtccgagctggacaaggccggcttcatcaagcggcagctggtggagacccggcagatcaccaagcacgtggcccagatcctggactcccggatgaacaccaagtacgacgagaacgacaagctgatccgggaggtgaaggtgatcaccctgaagtccaagctggtgtccgacttccggaaggacttccagttctacaaggtgcgggagatcaacaactaccaccacgcccacgacgcctacctgaacgccgtggtgggcaccgccctgatcaagaagtaccccaagctggagtccgagttcgtgtacggcgactacaaggtgtacgacgtgcggaagatgatcgccaagtccgagcaggagatcggcaaggccaccgccaagtacttcttctactccaacatcatgaacttcttcaagaccgagatcaccctggccaacggcgagatccggaagcggcccctgatcgagaccaacggcgagaccggcgagatcgtgtgggacaagggccgggacttcgccaccgtgcggaaggtgctgtccatgccccaggtgaacatcgtgaagaagaccgaggtgcagaccggcggcttctccaaggagtccatcctgcccaagcggaactccgacaagctgatcgcccggaagaaggactgggaccccaagaagtacggcggcttcgactcccccaccgtggcctactccgtgctggtggtggccaaggtggagaagggcaagtccaagaagctgaagtccgtgaaggagctgctgggcatcaccatcatggagcggtcctccttcgagaagaaccccatcgacttcctggaggccaagggctacaaggaggtgaagaaggacctgatcatcaagctgcccaagtactccctgttcgagctggagaacggccggaagcggatgctggcctccgccggcgagctgcagaagggcaacgagctggccctgccctccaagtacgtgaacttcctgtacctggcctcccactacgagaagctgaagggctcccccgaggacaacgagcagaagcagctgttcgtggagcagcacaagcactacctggacgagatcatcgagcagatctccgagttctccaagcgggtgatcctggccgacgccaacctggacaaggtgctgtccgcctacaacaagcaccgggacaagcccatccgggagcaggccgagaacatcatccacctgttcaccctgaccaacctgggcgcccccgccgccttcaagtacttcgacaccaccatcgaccggaagcggtacacctccaccaaggaggtgctggacgccaccctgatccaccagtccatcaccggcctgtacgagacccggatcgacctgtcccagctgggcggcgactccggcggaagctctggtggcagcaagcggaccgccgacggctctgaattcgagagccctaagaagaaaagaaaggtgagcggaggctctagcggcggaagcatgaagatcgccgtggtggacaaggccctgaacaacacccggtacgacaagcacttccagctgtacggcgaggaggtggacgtgttccacatgtgcaacgagaagctgtccggccggctgctgaagaagcacatcaccatcggcacccccgagaaccccttcgaccccaacgactacgacttcgtgatcctggtgggcgccgagcccttcctgtacttcgccggcaagaagggcatcggcgactacaccggcaagcgggtggagtacaacggctacgccaactggatcgcctccatctcccccgcccagctgcacttcaagcccgagatgaagcccgtgttcgacgccaccgtggagaacatccacgacatcatcaacggccgggagaagatcgccaaggccggcgactaccggcccatcaccgaccccgacgaggccgaggagtacatcaagatggtgtacaacatggtgatcggccccgtggccttcgcctccgccacctccgccctgtactgccgggacggctacctgctgggcgtgtccatctcccaccaggagtaccagggcgtgtacatcgactccgactgcctgaccgaggtggccgtgtactacctgcagaagatcctggactccgagaaccacaccatcgtgttccacaacctgaagttcgacatgcacttctacaagtaccacctgggcctgaccttcgacaaggcccacaaggagcggcggctgcacgacaccatgctgcagcactacgtgctggacgagcggcggggcacccacggcctgaagtccctggccatgaagtacaccgacatgggcgactacgacttcgagctggacaagttcaaggacgactactgcaaggcccacaagatcaagaaggaggacttcacctacgacctgatccccttcgacatcatgtggccctacgccgccaaggacaccgacgccaccatccggctgcacaacttcttcctgcccaagatcgagaagaacgagaagctgtgctccctgtactacgacgtgctgatgcccggctgcgtgttcctgcagcgggtggaggaccggggcgtgcccatctccatcgaccggctgaaggaggcccagtaccagctgacccacaacctgaacaaggcccgggagaagctgtacacctaccccgaggtgaagcagctggagcaggaccagaacgaggccttcaaccccaactccgtgaagcagctgcgggtgctgctgttcgactacgtgggcctgacccccaccggcaagctgaccgacaccggcgccgactccaccgacgccgaggccctgaacgagctggccacccagcaccccatcgccaagaccctgctggagatccggaagctgaccaagctgatctccacctacgtggagaagatcctgctgtccatcgacgccgacggctgcatccggaccggcttccacgagcacatgaccacctccggccggctgtcctcctccggcaagctgaacctgcagcagctgccccgggacgagtccatcatcaagggctgcgtggtggccccccccggctaccgggtgatcgcctgggacctgaccaccgccgaggtgtactacgccgccgtgctgtccggcgaccggaacatgcagcaggtgttcatcaacatgcggaacgagcccgacaagtaccccgacttccactccaacatcgcccacatggtgttcaagctgcagtgcgagccccgggacgtgaagaagctgttccccgccctgcggcaggccgccaaggccatcaccttcggcatcctgtacggctccggccccgccaaggtggcccactccgtgaacgaggccctgctggagcaggccgccaagaccggcgagcccttcgtggagtgcaccgtggccgacgccaaggagtacatcgagacctacttcggccagttcccccagctgaagcggtggatcgacaagtgccacgaccagatcaagaaccacggcttcatctactcccacttcggccggaagcggcggctgcacaacatccactccgaggaccggggcgtgcagggcgaggagatccggtccggcttcaacgccatcatccagtccgcctcctccgactccctgctgctgggcgccgtggacgccgacaacgagatcatctccctgggcctggagcaggagatgaagatcgtgatgctggtgcacgactccgtggtggccatcgtgcgggaggacctgatcgaccagtacaacgagatcctgatccggaacatccagaaggaccggggcatctccatccccggctgccccatcggcatcgactccgactccgaggccggcggctcccgggactactcctgcggcaagatgaagaagcagcacccctccatcgcctgcatcgacgacgacgagtacacccggtacgtgaagggcgtgctgctggacgccgagttcgagtacaagaagctggccgccatggacaaggagcaccccgaccactccaagtacaaggacgacaagttcatcgccgtgtgcaaggacctggacaacgtgaagcggatcctgggcgcctctggcggctcaaaaagaaccgccgacggcagcgaattcgagtctcccaagaagaagaggaaagtcggctctggccctgccgctaagagagtgaagctggac

SEQ ID NO: 1142 - protein, 2309 aa, synthetic construct
  REGION 1..2309: note = Synthetic
MKRTADGSEFESPKKKRKVDKKYSIGLDIGTNSVGWAVITDEYKVPSKKFKVLGNTDRHSIKKNLIGALLFDSGETAEATRLKRTARRRYTRRKNRICYLQEIFSNEMAKVDDSFFHRLEESFLVEEDKKHERHPIFGNIVDEVAYHEKYPTIYHLRKKLVDSTDKADLRLIYLALAHMIKFRGHFLIEGDLNPDNSDVDKLFIQLVQTYNQLFEENPINASGVDAKAILSARLSKSRRLENLIAQLPGEKKNGLFGNLIALSLGLTPNFKSNFDLAEDAKLQLSKDTYDDDLDNLLAQIGDQYADLFLAAKNLSDAILLSDILRVNTEITKAPLSASMIKRYDEHHQDLTLLKALVRQQLPEKYKEIFFDQSKNGYAGYIDGGASQEEFYKFIKPILEKMDGTEELLVKLNREDLLRKQRTFDNGSIPHQIHLGELHAILRRQEDFYPFLKDNREKIEKILTFRIPYYVGPLARGNSRFAWMTRKSEETITPWNFEEVVDKGASAQSFIERMTNFDKNLPNEKVLPKHSLLYEYFTVYNELTKVKYVTEGMRKPAFLSGEQKKAIVDLLFKTNRKVTVKQLKEDYFKKIECFDSVEISGVEDRFNASLGTYHDLLKIIKDKDFLDNEENEDILEDIVLTLTLFEDREMIEERLKTYAHLFDDKVMKQLKRRRYTGWGRLSRKLINGIRDKQSGKTILDFLKSDGFANRNFMQLIHDDSLTFKEDIQKAQVSGQGDSLHEHIANLAGSPAIKKGILQTVKVVDELVKVMGRHKPENIVIEMARENQTTQKGQKNSRERMKRIEEGIKELGSQILKEHPVENTQLQNEKLYLYYLQNGRDMYVDQELDINRLSDYDVDAIVPQSFLKDDSIDNKVLTRSDKNRGKSDNVPSEEVVKKMKNYWRQLLNAKLITQRKFDNLTKAERGGLSELDKAGFIKRQLVETRQITKHVAQILDSRMNTKYDENDKLIREVKVITLKSKLVSDFRKDFQFYKVREINNYHHAHDAYLNAVVGTALIKKYPKLESEFVYGDYKVYDVRKMIAKSEQEIGKATAKYFFYSNIMNFFKTEITLANGEIRKRPLIETNGETGEIVWDKGRDFATVRKVLSMPQVNIVKKTEVQTGGFSKESILPKRNSDKLIARKKDWDPKKYGGFDSPTVAYSVLVVAKVEKGKSKKLKSVKELLGITIMERSSFEKNPIDFLEAKGYKEVKKDLIIKLPKYSLFELENGRKRMLASAGELQKGNELALPSKYVNFLYLASHYEKLKGSPEDNEQKQLFVEQHKHYLDEIIEQISEFSKRVILADANLDKVLSAYNKHRDKPIREQAENIIHLFTLTNLGAPAAFKYFDTTIDRKRYTSTKEVLDATLIHQSITGLYETRIDLSQLGGDSGGSSGGSKRTADGSEFESPKKKRKVSGGSSGGSMKIAVVDKALNNTRYDKHFQLYGEEVDVFHMCNEKLSGRLLKKHITIGTPENPFDPNDYDFVILVGAEPFLYFAGKKGIGDYTGKRVEYNGYANWIASISPAQLHFKPEMKPVFDATVENIHDIINGREKIAKAGDYRPITDPDEAEEYIKMVYNMVIGPVAFASATSALYCRDGYLLGVSISHQEYQGVYIDSDCLTEVAVYYLQKILDSENHTIVFHNLKFDMHFYKYHLGLTFDKAHKERRLHDTMLQHYVLDERRGTHGLKSLAMKYTDMGDYDFELDKFKDDYCKAHKIKKEDFTYDLIPFDIMWPYAAKDTDATIRLHNFFLPKIEKNEKLCSLYYDVLMPGCVFLQRVEDRGVPISIDRLKEAQYQLTHNLNKAREKLYTYPEVKQLEQDQNEAFNPNSVKQLRVLLFDYVGLTPTGKLTDTGADSTDAEALNELATQHPIAKTLLEIRKLTKLISTYVEKILLSIDADGCIRTGFHEHMTTSGRLSSSGKLNLQQLPRDESIIKGCVVAPPGYRVIAWDLTTAEVYYAAVLSGDRNMQQVFINMRNEPDKYPDFHSNIAHMVFKLQCEPRDVKKLFPALRQAAKAITFGILYGSGPAKVAHSVNEALLEQAAKTGEPFVECTVADAKEYIETYFGQFPQLKRWIDKCHDQIKNHGFIYSHFGRKRRLHNIHSEDRGVQGEEIRSGFNAIIQSASSDSLLLGAVDADNEIISLGLEQEMKIVMLVHDSVVAIVREDLIDQYNEILIRNIQKDRGISIPGCPIGIDSDSEAGGSRDYSCGKMKKQHPSIACIDDDEYTRYVKGVLLDAEFEYKKLAAMDKEHPDHSKYKDDKFIAVCKDLDNVKRILGASGGSKRTADGSEFESPKKKRKVGSGPAAKRVKLD

SEQ ID NO: 1143 - RNA, 7483 nt, synthetic construct
  misc_feature 1..7483: note = Synthetic
  source 1..7483: mol_type = other RNA
gggaagctcagaataaacgctcaactttggccggatctgccaccatggacaagaagtactccatcggcctggacatcggcaccaactccgtgggctgggccgtgatcaccgacgagtacaaggtgccctccaagaagttcaaggtgctgggcaacaccgaccggcactccatcaagaagaacctgatcggcgccctgctgttcgactccggcgagaccgccgaggccacccggctgaagcggaccgcccggcggcggtacacccggcggaagaaccggatctgctacctgcaggagatcttctccaacgagatggccaaggtggacgactccttcttccaccggctggaggagtccttcctggtggaggaggacaagaagcacgagcggcaccccatcttcggcaacatcgtggacgaggtggcctaccacgagaagtaccccaccatctaccacctgcggaagaagctggtggactccaccgacaaggccgacctgcggctgatctacctggccctggcccacatgatcaagttccggggccacttcctgatcgagggcgacctgaaccccgacaactccgacgtggacaagctgttcatccagctggtgcagacctacaaccagctgttcgaggagaaccccatcaacgcctccggcgtggacgccaaggccatcctgtccgcccggctgtccaagtcccggcggctggagaacctgatcgcccagctgcccggcgagaagaagaacggcctgttcggcaacctgatcgccctgtccctgggcctgacccccaacttcaagtccaacttcgacctggccgaggacgccaagctgcagctgtccaaggacacctacgacgacgacctggacaacctgctggcccagatcggcgaccagtacgccgacctgttcctggccgccaagaacctgtccgacgccatcctgctgtccgacatcctgcgggtgaacaccgagatcaccaaggcccccctgtccgcctccatgatcaagcggtacgacgagcaccaccaggacctgaccctgctgaaggccctggtgcggcagcagctgcccgagaagtacaaggagatcttcttcgaccagtccaagaacggctacgccggctacatcgacggcggcgcctcccaggaggagttctacaagttcatcaagcccatcctggagaagatggacggcaccgaggagctgctggtgaagctgaaccgggaggacctgctgcggaagcagcggaccttcgacaacggctccatcccccaccagatccacctgggcgagctgcacgccatcctgcggcggcaggaggacttctaccccttcctgaaggacaaccgggagaagatcgagaagatcctgaccttccggatcccctactacgtgggccccctggcccggggcaactcccggttcgcctggatgacccggaagtccgaggagaccatcaccccctggaacttcgaggaggtggtggacaagggcgcctccgcccagtccttcatcgagcggatgaccaacttcgacaagaacctgcccaacgagaaggtgctgcccaagcactccctgctgtacgagtacttcaccgtgtacaacgagctgaccaaggtgaagtacgtgaccgagggcatgcggaagcccgccttcctgtccggcgagcagaagaaggccatcgtggacctgctgttcaagaccaaccggaaggtgaccgtgaagcagctgaaggaggactacttcaagaagatcgagtgcttcgactccgtggagatctccggcgtggaggaccggttcaacgcctccctgggcacctaccacgacctgctgaagatcatcaaggacaaggacttcctggacaacgaggagaacgaggacatcctggaggacatcgtgctgaccctgaccctgttcgaggaccgggagatgatcgaggagcggctgaagacctacgcccacctgttcgacgacaaggtgatgaagcagctgaagcggcggcggtacaccggctggggccggctgtcccggaagctgatcaacggcatccgggacaagcagtccggcaagaccatcctggacttcctgaagtccgacggcttcgccaaccggaacttcatgcagctgatccacgacgactccctgaccttcaaggaggacatccagaaggcccaggtgtccggccagggcgactccctgcacgagcacatcgccaacctggccggctcccccgccatcaagaagggcatcctgcagaccgtgaaggtggtggacgagctggtgaaggtgatgggccggcacaagcccgagaacatcgtgatcgagatggcccgggagaaccagaccacccagaagggccagaagaactcccgggagcggatgaagcggatcgaggagggcatcaaggagctgggctcccagatcctgaaggagcaccccgtggagaacacccagctgcagaacgagaagctgtacctgtactacctgcagaacggccgggacatgtacgtggaccaggagctggacatcaaccggctgtccgactacgacgtggacgccatcgtgccccagtccttcctgaaggacgactccatcgacaacaaggtgctgacccggtccgacaagaaccggggcaagtccgacaacgtgccctccgaggaggtggtgaagaagatgaagaactactggcggcagctgctgaacgccaagctgatcacccagcggaagttcgacaacctgaccaaggccgagcggggcggcctgtccgagctggacaaggccggcttcatcaagcggcagctggtggagacccggcagatcaccaagcacgtggcccagatcctggactcccggatgaacaccaagtacgacgagaacgacaagctgatccgggaggtgaaggtgatcaccctgaagtccaagctggtgtccgacttccggaaggacttccagttctacaaggtgcgggagatcaacaactaccaccacgcccacgacgcctacctgaacgccgtggtgggcaccgccctgatcaagaagtaccccaagctggagtccgagttcgtgtacggcgactacaaggtgtacgacgtgcggaagatgatcgccaagtccgagcaggagatcggcaaggccaccgccaagtacttcttctactccaacatcatgaacttcttcaagaccgagatcaccctggccaacggcgagatccggaagcggcccctgatcgagaccaacggcgagaccggcgagatcgtgtgggacaagggccgggacttcgccaccgtgcggaaggtgctgtccatgccccaggtgaacatcgtgaagaagaccgaggtgcagaccggcggcttctccaaggagtccatcctgcccaagcggaactccgacaagctgatcgcccggaagaaggactgggaccccaagaagtacggcggcttcgactcccccaccgtggcctactccgtgctggtggtggccaaggtggagaagggcaagtccaagaagctgaagtccgtgaaggagctgctgggcatcaccatcatggagcggtcctccttcgagaagaaccccatcgacttcctggaggccaagggctacaaggaggtgaagaaggacctgatcatcaagctgcccaagtactccctgttcgagctggagaacggccggaagcggatgctggcctccgccggcgagctgcagaagggcaacgagctggccctgccctccaagtacgtgaacttcctgtacctggcctcccactacgagaagctgaagggctcccccgaggacaacgagcagaagcagctgttcgtggagcagcacaagcactacctggacgagatcatcgagcagatctccgagttctccaagcgggtgatcctggccgacgccaacctggacaaggtgctgtccgcctacaacaagcaccgggacaagcccatccgggagcaggccgagaacatcatccacctgttcaccctgaccaacctgggcgcccccgccgccttcaagtacttcgacaccaccatcgaccggaagcggtacacctccaccaaggaggtgctggacgccaccctgatccaccagtccatcaccggcctgtacgagacccggatcgacctgtcccagctgggcggcgacggcgcccccgagtccgccaccgagtccggcggcacctccaccgagtccgagggctccgccggcacctccaccgagtccgagggctccgccggctccgccggctccacctccggctcctcctccggcatgaagatcgccgtggtggacaaggccctgaacaacacccggtacgacaagcacttccagctgtacggcgaggaggtggacgtgttccacatgtgcaacgagaagctgtccggccggctgctgaagaagcacatcaccatcggcacccccgagaaccccttcgaccccaacgactacgacttcgtgatcctggtgggcgccgagcccttcctgtacttcgccggcaagaagggcatcggcgactacaccggcaagcgggtggagtacaacggctacgccaactggatcgcctccatctcccccgcccagctgcacttcaagcccgagatgaagcccgtgttcgacgccaccgtggagaacatccacgacatcatcaacggccgggagaagatcgccaaggccggcgactaccggcccatcaccgaccccgacgaggccgaggagtacatcaagatggtgtacaacatggtgatcggccccgtggccttcgcctccgccacctccgccctgtactgccgggacggctacctgctgggcgtgtccatctcccaccaggagtaccagggcgtgtacatcgactccgactgcctgaccgaggtggccgtgtactacctgcagaagatcctggactccgagaaccacaccatcgtgttccacaacctgaagttcgacatgcacttctacaagtaccacctgggcctgaccttcgacaaggcccacaaggagcggcggctgcacgacaccatgctgcagcactacgtgctggacgagcggcggggcacccacggcctgaagtccctggccatgaagtacaccgacatgggcgactacgacttcgagctggacaagttcaaggacgactactgcaaggcccacaagatcaagaaggaggacttcacctacgacctgatccccttcgacatcatgtggccctacgccgccaaggacaccgacgccaccatccggctgcacaacttcttcctgcccaagatcgagaagaacgagaagctgtgctccctgtactacgacgtgctgatgcccggctgcgtgttcctgcagcgggtggaggaccggggcgtgcccatctccatcgaccggctgaaggaggcccagtaccagctgacccacaacctgaacaaggcccgggagaagctgtacacctaccccgaggtgaagcagctggagcaggaccagaacgaggccttcaaccccaactccgtgaagcagctgcgggtgctgctgttcgactacgtgggcctgacccccaccggcaagctgaccgacaccggcgccgactccaccgacgccgaggccctgaacgagctggccacccagcaccccatcgccaagaccctgctggagatccggaagctgaccaagctgatctccacctacgtggagaagatcctgctgtccatcgacgccgacggctgcatccggaccggcttccacgagcacatgaccacctccggccggctgtcctcctccggcaagctgaacctgcagcagctgccccgggacgagtccatcatcaagggctgcgtggtggccccccccggctaccgggtgatcgcctgggacctgaccaccgccgaggtgtactacgccgccgtgctgtccggcgaccggaacatgcagcaggtgttcatcaacatgcggaacgagcccgacaagtaccccgacttccactccaacatcgcccacatggtgttcaagctgcagtgcgagccccgggacgtgaagaagctgttccccgccctgcggcaggccgccaagcgcatcaccttcggcatcctgtacggctccggccccgccaaggtggcccactccgtgaacgaggccctgctggagcaggccgccaagaccggcgagcccttcgtggagtgcaccgtggccgacgccaaggagtacatcgagacctacttcggccagttcccccagctgaagcggtggatcgacaagtgccacgaccagatcaagaaccacggcttcatctactcccacttcggccggaagcggcggctgcacaacatccactccgaggaccggggcgtgcagggcgaggagatccggtccggcttcaacgccatcatccagtccgcctcctccgactccctgctgctgggcgccgtggacgccgacaacgagatcatctccctgggcctggagcaggagatgaagatcgtgatgctggtgcacgactccgtggtggccatcgtgcgggaggacctgatcgaccagtacaacgagatcctgatccggaacatccagaaggaccggggcatctccatccccggctgccccatcggcatcgactccgactccgaggccggcggctcccgggactactcctgcggcaagatgaagaagcagcacccctccatcgcctgcatcgacgacgacgagtacacccggtacgtgaagggcgtgctgctggacgccgagttcgagtacaagaagctggccgccatggacaaggagcaccccgaccactccaagtacaaggacgacaagttcatcgccgtgtgcaaggacctggacaacgtgaagcggatcctgggcgccggcggcggctccggcaagcggaccgccgacggctccggcggcggctcccccaagaagaagcggaaggtgtccgagtccgccacccccgagtccgtgtccggctggcggctgttcaagaagatctcctagctagcaccagcctcaagaacacccgaatggagtctctaagctacataataccaacttacactttacaaaatgttgtcccccaaaatgtagccattcgtatctgctcctaataaaaagaaagtttcttcacattctctcgagaaaaaaaaaaaatggaaaaaaaaaaaacggaaaaaaaaaaaaggtaaaaaaaaaaaatataaaaaaaaaaaacataaaaaaaaaaaacgaaaaaaaaaaaacgtaaaaaaaaaaaactcaaaaaaaaaaaagataaaaaaaaaaaacctaaaaaaaaaaaatgtaaaaaaaaaaaagggaaaaaaaaaaaacgcaaaaaaaaaaaacacaaaaaaaaaaaatgcaaaaaaaaaaaatcgaaaaaaaaaaaatctaaaaaaaaaaaacgaaaaaaaaaaaacccaaaaaaaaaaaagacaaaaaaaaaaaatagaaaaaaaaaaagttaaaaaaaaaaaactgaaaaaaaaaaaatttaaaaaaaaaaaatctag

SEQ ID NO: 1144 - RNA, 6924 nt, synthetic construct
  misc_feature 1..6924: note = Synthetic
  source 1..6924: mol_type = other RNA
atggacaagaagtactccatcggcctggacatcggcaccaactccgtgggctgggccgtgatcaccgacgagtacaaggtgccctccaagaagttcaaggtgctgggcaacaccgaccggcactccatcaagaagaacctgatcggcgccctgctgttcgactccggcgagaccgccgaggccacccggctgaagcggaccgcccggcggcggtacacccggcggaagaaccggatctgctacctgcaggagatcttctccaacgagatggccaaggtggacgactccttcttccaccggctggaggagtccttcctggtggaggaggacaagaagcacgagcggcaccccatcttcggcaacatcgtggacgaggtggcctaccacgagaagtaccccaccatctaccacctgcggaagaagctggtggactccaccgacaaggccgacctgcggctgatctacctggccctggcccacatgatcaagttccggggccacttcctgatcgagggcgacctgaaccccgacaactccgacgtggacaagctgttcatccagctggtgcagacctacaaccagctgttcgaggagaaccccatcaacgcctccggcgtggacgccaaggccatcctgtccgcccggctgtccaagtcccggcggctggagaacctgatcgcccagctgcccggcgagaagaagaacggcctgttcggcaacctgatcgccctgtccctgggcctgacccccaacttcaagtccaacttcgacctggccgaggacgccaagctgcagctgtccaaggacacctacgacgacgacctggacaacctgctggcccagatcggcgaccagtacgccgacctgttcctggccgccaagaacctgtccgacgccatcctgctgtccgacatcctgcgggtgaacaccgagatcaccaaggcccccctgtccgcctccatgatcaagcggtacgacgagcaccaccaggacctgaccctgctgaaggccctggtgcggcagcagctgcccgagaagtacaaggagatcttcttcgaccagtccaagaacggctacgccggctacatcgacggcggcgcctcccaggaggagttctacaagttcatcaagcccatcctggagaagatggacggcaccgaggagctgctggtgaagctgaaccgggaggacctgctgcggaagcagcggaccttcgacaacggctccatcccccaccagatccacctgggcgagctgcacgccatcctgcggcggcaggaggacttctaccccttcctgaaggacaaccgggagaagatcgagaagatcctgaccttccggatcccctactacgtgggccccctggcccggggcaactcccggttcgcctggatgacccggaagtccgaggagaccatcaccccctggaacttcgaggaggtggtggacaagggcgcctccgcccagtccttcatcgagcggatgaccaacttcgacaagaacctgcccaacgagaaggtgctgcccaagcactccctgctgtacgagtacttcaccgtgtacaacgagctgaccaaggtgaagtacgtgaccgagggcatgcggaagcccgccttcctgtccggcgagcagaagaaggccatcgtggacctgctgttcaagaccaaccggaaggtgaccgtgaagcagctgaaggaggactacttcaagaagatcgagtgcttcgactccgtggagatctccggcgtggaggaccggttcaacgcctccctgggcacctaccacgacctgctgaagatcatcaaggacaaggacttcctggacaacgaggagaacgaggacatcctggaggacatcgtgctgaccctgaccctgttcgaggaccgggagatgatcgaggagcggctgaagacctacgcccacctgttcgacgacaaggtgatgaagcagctgaagcggcggcggtacaccggctggggccggctgtcccggaagctgatcaacggcatccgggacaagcagtccggcaagaccatcctggacttcctgaagtccgacggcttcgccaaccggaacttcatgcagctgatccacgacgactccctgaccttcaaggaggacatccagaaggcccaggtgtccggccagggcgactccctgcacgagcacatcgccaacctggccggctcccccgccatcaagaagggcatcctgcagaccgtgaaggtggtggacgagctggtgaaggtgatgggccggcacaagcccgagaacatcgtgatcgagatggcccgggagaaccagaccacccagaagggccagaagaactcccgggagcggatgaagcggatcgaggagggcatcaaggagctgggctcccagatcctgaaggagcaccccgtggagaacacccagctgcagaacgagaagctgtacctgtactacctgcagaacggccgggacatgtacgtggaccaggagctggacatcaaccggctgtccgactacgacgtggacgccatcgtgccccagtccttcctgaaggacgactccatcgacaacaaggtgctgacccggtccgacaagaaccggggcaagtccgacaacgtgccctccgaggaggtggtgaagaagatgaagaactactggcggcagctgctgaacgccaagctgatcacccagcggaagttcgacaacctgaccaaggccgagcggggcggcctgtccgagctggacaaggccggcttcatcaagcggcagctggtggagacccggcagatcaccaagcacgtggcccagatcctggactcccggatgaacaccaagtacgacgagaacgacaagctgatccgggaggtgaaggtgatcaccctgaagtccaagctggtgtccgacttccggaaggacttccagttctacaaggtgcgggagatcaacaactaccaccacgcccacgacgcctacctgaacgccgtggtgggcaccgccctgatcaagaagtaccccaagctggagtccgagttcgtgtacggcgactacaaggtgtacgacgtgcggaagatgatcgccaagtccgagcaggagatcggcaaggccaccgccaagtacttcttctactccaacatcatgaacttcttcaagaccgagatcaccctggccaacggcgagatccggaagcggcccctgatcgagaccaacggcgagaccggcgagatcgtgtgggacaagggccgggacttcgccaccgtgcggaaggtgctgtccatgccccaggtgaacatcgtgaagaagaccgaggtgcagaccggcggcttctccaaggagtccatcctgcccaagcggaactccgacaagctgatcgcccggaagaaggactgggaccccaagaagtacggcggcttcgactcccccaccgtggcctactccgtgctggtggtggccaaggtggagaagggcaagtccaagaagctgaagtccgtgaaggagctgctgggcatcaccatcatggagcggtcctccttcgagaagaaccccatcgacttcctggaggccaagggctacaaggaggtgaagaaggacctgatcatcaagctgcccaagtactccctgttcgagctggagaacggccggaagcggatgctggcctccgccggcgagctgcagaagggcaacgagctggccctgccctccaagtacgtgaacttcctgtacctggcctcccactacgagaagctgaagggctcccccgaggacaacgagcagaagcagctgttcgtggagcagcacaagcactacctggacgagatcatcgagcagatctccgagttctccaagcgggtgatcctggccgacgccaacctggacaaggtgctgtccgcctacaacaagcaccgggacaagcccatccgggagcaggccgagaacatcatccacctgttcaccctgaccaacctgggcgcccccgccgccttcaagtacttcgacaccaccatcgaccggaagcggtacacctccaccaaggaggtgctggacgccaccctgatccaccagtccatcaccggcctgtacgagacccggatcgacctgtcccagctgggcggcgacggcgcccccgagtccgccaccgagtccggcggcacctccaccgagtccgagggctccgccggcacctccaccgagtccgagggctccgccggctccgccggctccacctccggctcctcctccggcatgaagatcgccgtggtggacaaggccctgaacaacacccggtacgacaagcacttccagctgtacggcgaggaggtggacgtgttccacatgtgcaacgagaagctgtccggccggctgctgaagaagcacatcaccatcggcacccccgagaaccccttcgaccccaacgactacgacttcgtgatcctggtgggcgccgagcccttcctgtacttcgccggcaagaagggcatcggcgactacaccggcaagcgggtggagtacaacggctacgccaactggatcgcctccatctcccccgcccagctgcacttcaagcccgagatgaagcccgtgttcgacgccaccgtggagaacatccacgacatcatcaacggccgggagaagatcgccaaggccggcgactaccggcccatcaccgaccccgacgaggccgaggagtacatcaagatggtgtacaacatggtgatcggccccgtggccttcgcctccgccacctccgccctgtactgccgggacggctacctgctgggcgtgtccatctcccaccaggagtaccagggcgtgtacatcgactccgactgcctgaccgaggtggccgtgtactacctgcagaagatcctggactccgagaaccacaccatcgtgttccacaacctgaagttcgacatgcacttctacaagtaccacctgggcctgaccttcgacaaggcccacaaggagcggcggctgcacgacaccatgctgcagcactacgtgctggacgagcggcggggcacccacggcctgaagtccctggccatgaagtacaccgacatgggcgactacgacttcgagctggacaagttcaaggacgactactgcaaggcccacaagatcaagaaggaggacttcacctacgacctgatccccttcgacatcatgtggccctacgccgccaaggacaccgacgccaccatccggctgcacaacttcttcctgcccaagatcgagaagaacgagaagctgtgctccctgtactacgacgtgctgatgcccggctgcgtgttcctgcagcgggtggaggaccggggcgtgcccatctccatcgaccggctgaaggaggcccagtaccagctgacccacaacctgaacaaggcccgggagaagctgtacacctaccccgaggtgaagcagctggagcaggaccagaacgaggccttcaaccccaactccgtgaagcagctgcgggtgctgctgttcgactacgtgggcctgacccccaccggcaagctgaccgacaccggcgccgactccaccgacgccgaggccctgaacgagctggccacccagcaccccatcgccaagaccctgctggagatccggaagctgaccaagctgatctccacctacgtggagaagatcctgctgtccatcgacgccgacggctgcatccggaccggcttccacgagcacatgaccacctccggccggctgtcctcctccggcaagctgaacctgcagcagctgccccgggacgagtccatcatcaagggctgcgtggtggccccccccggctaccgggtgatcgcctgggacctgaccaccgccgaggtgtactacgccgccgtgctgtccggcgaccggaacatgcagcaggtgttcatcaacatgcggaacgagcccgacaagtaccccgacttccactccaacatcgcccacatggtgttcaagctgcagtgcgagccccgggacgtgaagaagctgttccccgccctgcggcaggccgccaagcgcatcaccttcggcatcctgtacggctccggccccgccaaggtggcccactccgtgaacgaggccctgctggagcaggccgccaagaccggcgagcccttcgtggagtgcaccgtggccgacgccaaggagtacatcgagacctacttcggccagttcccccagctgaagcggtggatcgacaagtgccacgaccagatcaagaaccacggcttcatctactcccacttcggccggaagcggcggctgcacaacatccactccgaggaccggggcgtgcagggcgaggagatccggtccggcttcaacgccatcatccagtccgcctcctccgactccctgctgctgggcgccgtggacgccgacaacgagatcatctccctgggcctggagcaggagatgaagatcgtgatgctggtgcacgactccgtggtggccatcgtgcgggaggacctgatcgaccagtacaacgagatcctgatccggaacatccagaaggaccggggcatctccatccccggctgccccatcggcatcgactccgactccgaggccggcggctcccgggactactcctgcggcaagatgaagaagcagcacccctccatcgcctgcatcgacgacgacgagtacacccggtacgtgaagggcgtgctgctggacgccgagttcgagtacaagaagctggccgccatggacaaggagcaccccgaccactccaagtacaaggacgacaagttcatcgccgtgtgcaaggacctggacaacgtgaagcggatcctgggcgccggcggcggctccggcaagcggaccgccgacggctccggcggcggctcccccaagaagaagcggaaggtgtccgagtccgccacccccgagtccgtgtccggctggcggctgttcaagaagatctcctag

SEQ ID NO: 1145 - protein, 2307 aa, synthetic construct
  REGION 1..2307: note = Synthetic
MDKKYSIGLDIGTNSVGWAVITDEYKVPSKKFKVLGNTDRHSIKKNLIGALLFDSGETAEATRLKRTARRRYTRRKNRICYLQEIFSNEMAKVDDSFFHRLEESFLVEEDKKHERHPIFGNIVDEVAYHEKYPTIYHLRKKLVDSTDKADLRLIYLALAHMIKFRGHFLIEGDLNPDNSDVDKLFIQLVQTYNQLFEENPINASGVDAKAILSARLSKSRRLENLIAQLPGEKKNGLFGNLIALSLGLTPNFKSNFDLAEDAKLQLSKDTYDDDLDNLLAQIGDQYADLFLAAKNLSDAILLSDILRVNTEITKAPLSASMIKRYDEHHQDLTLLKALVRQQLPEKYKEIFFDQSKNGYAGYIDGGASQEEFYKFIKPILEKMDGTEELLVKLNREDLLRKQRTFDNGSIPHQIHLGELHAILRRQEDFYPFLKDNREKIEKILTFRIPYYVGPLARGNSRFAWMTRKSEETITPWNFEEVVDKGASAQSFIERMTNFDKNLPNEKVLPKHSLLYEYFTVYNELTKVKYVTEGMRKPAFLSGEQKKAIVDLLFKTNRKVTVKQLKEDYFKKIECFDSVEISGVEDRFNASLGTYHDLLKIIKDKDFLDNEENEDILEDIVLTLTLFEDREMIEERLKTYAHLFDDKVMKQLKRRRYTGWGRLSRKLINGIRDKQSGKTILDFLKSDGFANRNFMQLIHDDSLTFKEDIQKAQVSGQGDSLHEHIANLAGSPAIKKGILQTVKVVDELVKVMGRHKPENIVIEMARENQTTQKGQKNSRERMKRIEEGIKELGSQILKEHPVENTQLQNEKLYLYYLQNGRDMYVDQELDINRLSDYDVDAIVPQSFLKDDSIDNKVLTRSDKNRGKSDNVPSEEVVKKMKNYWRQLLNAKLITQRKFDNLTKAERGGLSELDKAGFIKRQLVETRQITKHVAQILDSRMNTKYDENDKLIREVKVITLKSKLVSDFRKDFQFYKVREINNYHHAHDAYLNAVVGTALIKKYPKLESEFVYGDYKVYDVRKMIAKSEQEIGKATAKYFFYSNIMNFFKTEITLANGEIRKRPLIETNGETGEIVWDKGRDFATVRKVLSMPQVNIVKKTEVQTGGFSKESILPKRNSDKLIARKKDWDPKKYGGFDSPTVAYSVLVVAKVEKGKSKKLKSVKELLGITIMERSSFEKNPIDFLEAKGYKEVKKDLIIKLPKYSLFELENGRKRMLASAGELQKGNELALPSKYVNFLYLASHYEKLKGSPEDNEQKQLFVEQHKHYLDEIIEQISEFSKRVILADANLDKVLSAYNKHRDKPIREQAENIIHLFTLTNLGAPAAFKYFDTTIDRKRYTSTKEVLDATLIHQSITGLYETRIDLSQLGGDGAPESATESGGTSTESEGSAGTSTESEGSAGSAGSTSGSSSGMKIAVVDKALNNTRYDKHFQLYGEEVDVFHMCNEKLSGRLLKKHITIGTPENPFDPNDYDFVILVGAEPFLYFAGKKGIGDYTGKRVEYNGYANWIASISPAQLHFKPEMKPVFDATVENIHDIINGREKIAKAGDYRPITDPDEAEEYIKMVYNMVIGPVAFASATSALYCRDGYLLGVSISHQEYQGVYIDSDCLTEVAVYYLQKILDSENHTIVFHNLKFDMHFYKYHLGLTFDKAHKERRLHDTMLQHYVLDERRGTHGLKSLAMKYTDMGDYDFELDKFKDDYCKAHKIKKEDFTYDLIPFDIMWPYAAKDTDATIRLHNFFLPKIEKNEKLCSLYYDVLMPGCVFLQRVEDRGVPISIDRLKEAQYQLTHNLNKAREKLYTYPEVKQLEQDQNEAFNPNSVKQLRVLLFDYVGLTPTGKLTDTGADSTDAEALNELATQHPIAKTLLEIRKLTKLISTYVEKILLSIDADGCIRTGFHEHMTTSGRLSSSGKLNLQQLPRDESIIKGCVVAPPGYRVIAWDLTTAEVYYAAVLSGDRNMQQVFINMRNEPDKYPDFHSNIAHMVFKLQCEPRDVKKLFPALRQAAKRITFGILYGSGPAKVAHSVNEALLEQAAKTGEPFVECTVADAKEYIETYFGQFPQLKRWIDKCHDQIKNHGFIYSHFGRKRRLHNIHSEDRGVQGEEIRSGFNAIIQSASSDSLLLGAVDADNEIISLGLEQEMKIVMLVHDSVVAIVREDLIDQYNEILIRNIQKDRGISIPGCPIGIDSDSEAGGSRDYSCGKMKKQHPSIACIDDDEYTRYVKGVLLDAEFEYKKLAAMDKEHPDHSKYKDDKFIAVCKDLDNVKRILGAGGGSGKRTADGSGGGSPKKKRKVSESATPESVSGWRLFKKIS

SEQ ID NO: 1146 - RNA, 6864 nt, synthetic construct
  misc_feature 1..6864: note = Synthetic
  source 1..6864: mol_type = other RNA
atggacaagaagtactccatcggcctggacatcggcaccaactccgtgggctgggccgtgatcaccgacgagtacaaggtgccctccaagaagttcaaggtgctgggcaacaccgaccggcactccatcaagaagaacctgatcggcgccctgctgttcgactccggcgagaccgccgaggccacccggctgaagcggaccgcccggcggcggtacacccggcggaagaaccggatctgctacctgcaggagatcttctccaacgagatggccaaggtggacgactccttcttccaccggctggaggagtccttcctggtggaggaggacaagaagcacgagcggcaccccatcttcggcaacatcgtggacgaggtggcctaccacgagaagtaccccaccatctaccacctgcggaagaagctggtggactccaccgacaaggccgacctgcggctgatctacctggccctggcccacatgatcaagttccggggccacttcctgatcgagggcgacctgaaccccgacaactccgacgtggacaagctgttcatccagctggtgcagacctacaaccagctgttcgaggagaaccccatcaacgcctccggcgtggacgccaaggccatcctgtccgcccggctgtccaagtcccggcggctggagaacctgatcgcccagctgcccggcgagaagaagaacggcctgttcggcaacctgatcgccctgtccctgggcctgacccccaacttcaagtccaacttcgacctggccgaggacgccaagctgcagctgtccaaggacacctacgacgacgacctggacaacctgctggcccagatcggcgaccagtacgccgacctgttcctggccgccaagaacctgtccgacgccatcctgctgtccgacatcctgcgggtgaacaccgagatcaccaaggcccccctgtccgcctccatgatcaagcggtacgacgagcaccaccaggacctgaccctgctgaaggccctggtgcggcagcagctgcccgagaagtacaaggagatcttcttcgaccagtccaagaacggctacgccggctacatcgacggcggcgcctcccaggaggagttctacaagttcatcaagcccatcctggagaagatggacggcaccgaggagctgctggtgaagctgaaccgggaggacctgctgcggaagcagcggaccttcgacaacggctccatcccccaccagatccacctgggcgagctgcacgccatcctgcggcggcaggaggacttctaccccttcctgaaggacaaccgggagaagatcgagaagatcctgaccttccggatcccctactacgtgggccccctggcccggggcaactcccggttcgcctggatgacccggaagtccgaggagaccatcaccccctggaacttcgaggaggtggtggacaagggcgcctccgcccagtccttcatcgagcggatgaccaacttcgacaagaacctgcccaacgagaaggtgctgcccaagcactccctgctgtacgagtacttcaccgtgtacaacgagctgaccaaggtgaagtacgtgaccgagggcatgcggaagcccgccttcctgtccggcgagcagaagaaggccatcgtggacctgctgttcaagaccaaccggaaggtgaccgtgaagcagctgaaggaggactacttcaagaagatcgagtgcttcgactccgtggagatctccggcgtggaggaccggttcaacgcctccctgggcacctaccacgacctgctgaagatcatcaaggacaaggacttcctggacaacgaggagaacgaggacatcctggaggacatcgtgctgaccctgaccctgttcgaggaccgggagatgatcgaggagcggctgaagacctacgcccacctgttcgacgacaaggtgatgaagcagctgaagcggcggcggtacaccggctggggccggctgtcccggaagctgatcaacggcatccgggacaagcagtccggcaagaccatcctggacttcctgaagtccgacggcttcgccaaccggaacttcatgcagctgatccacgacgactccctgaccttcaaggaggacatccagaaggcccaggtgtccggccagggcgactccctgcacgagcacatcgccaacctggccggctcccccgccatcaagaagggcatcctgcagaccgtgaaggtggtggacgagctggtgaaggtgatgggccggcacaagcccgagaacatcgtgatcgagatggcccgggagaaccagaccacccagaagggccagaagaactcccgggagcggatgaagcggatcgaggagggcatcaaggagctgggctcccagatcctgaaggagcaccccgtggagaacacccagctgcagaacgagaagctgtacctgtactacctgcagaacggccgggacatgtacgtggaccaggagctggacatcaaccggctgtccgactacgacgtggacgccatcgtgccccagtccttcctgaaggacgactccatcgacaacaaggtgctgacccggtccgacaagaaccggggcaagtccgacaacgtgccctccgaggaggtggtgaagaagatgaagaactactggcggcagctgctgaacgccaagctgatcacccagcggaagttcgacaacctgaccaaggccgagcggggcggcctgtccgagctggacaaggccggcttcatcaagcggcagctggtggagacccggcagatcaccaagcacgtggcccagatcctggactcccggatgaacaccaagtacgacgagaacgacaagctgatccgggaggtgaaggtgatcaccctgaagtccaagctggtgtccgacttccggaaggacttccagttctacaaggtgcgggagatcaacaactaccaccacgcccacgacgcctacctgaacgccgtggtgggcaccgccctgatcaagaagtaccccaagctggagtccgagttcgtgtacggcgactacaaggtgtacgacgtgcggaagatgatcgccaagtccgagcaggagatcggcaaggccaccgccaagtacttcttctactccaacatcatgaacttcttcaagaccgagatcaccctggccaacggcgagatccggaagcggcccctgatcgagaccaacggcgagaccggcgagatcgtgtgggacaagggccgggacttcgccaccgtgcggaaggtgctgtccatgccccaggtgaacatcgtgaagaagaccgaggtgcagaccggcggcttctccaaggagtccatcctgcccaagcggaactccgacaagctgatcgcccggaagaaggactgggaccccaagaagtacggcggcttcgactcccccaccgtggcctactccgtgctggtggtggccaaggtggagaagggcaagtccaagaagctgaagtccgtgaaggagctgctgggcatcaccatcatggagcggtcctccttcgagaagaaccccatcgacttcctggaggccaagggctacaaggaggtgaagaaggacctgatcatcaagctgcccaagtactccctgttcgagctggagaacggccggaagcggatgctggcctccgccggcgagctgcagaagggcaacgagctggccctgccctccaagtacgtgaacttcctgtacctggcctcccactacgagaagctgaagggctcccccgaggacaacgagcagaagcagctgttcgtggagcagcacaagcactacctggacgagatcatcgagcagatctccgagttctccaagcgggtgatcctggccgacgccaacctggacaaggtgctgtccgcctacaacaagcaccgggacaagcccatccgggagcaggccgagaacatcatccacctgttcaccctgaccaacctgggcgcccccgccgccttcaagtacttcgacaccaccatcgaccggaagcggtacacctccaccaaggaggtgctggacgccaccctgatccaccagtccatcaccggcctgtacgagacccggatcgacctgtcccagctgggcggcgacggcgcccccgagtccgccaccgagtccggcggcacctccaccgagtccgagggctccgccggcacctccaccgagtccgagggctccgccggctccgccggctccacctccggctcctcctccggcatgaagatcgccgtggtggacaaggccctgaacaacacccggtacgacaagcacttccagctgtacggcgaggaggtggacgtgttccacatgtgcaacgagaagctgtccggccggctgctgaagaagcacatcaccatcggcacccccgagaaccccttcgaccccaacgactacgacttcgtgatcctggtgggcgccgagcccttcctgtacttcgccggcaagaagggcatcggcgactacaccggcaagcgggtggagtacaacggctacgccaactggatcgcctccatctcccccgcccagctgcacttcaagcccgagatgaagcccgtgttcgacgccaccgtggagaacatccacgacatcatcaacggccgggagaagatcgccaaggccggcgactaccggcccatcaccgaccccgacgaggccgaggagtacatcaagatggtgtacaacatggtgatcggccccgtggccttcgcctccgccacctccgccctgtactgccgggacggctacctgctgggcgtgtccatctcccaccaggagtaccagggcgtgtacatcgactccgactgcctgaccgaggtggccgtgtactacctgcagaagatcctggactccgagaaccacaccatcgtgttccacaacctgaagttcgacatgcacttctacaagtaccacctgggcctgaccttcgacaaggcccacaaggagcggcggctgcacgacaccatgctgcagcactacgtgctggacgagcggcggggcacccacggcctgaagtccctggccatgaagtacaccgacatgggcgactacgacttcgagctggacaagttcaaggacgactactgcaaggcccacaagatcaagaaggaggacttcacctacgacctgatccccttcgacatcatgtggccctacgccgccaaggacaccgacgccaccatccggctgcacaacttcttcctgcccaagatcgagaagaacgagaagctgtgctccctgtactacgacgtgctgatgcccggctgcgtgttcctgcagcgggtggaggaccggggcgtgcccatctccatcgaccggctgaaggaggcccagtaccagctgacccacaacctgaacaaggcccgggagaagctgtacacctaccccgaggtgaagcagctggagcaggaccagaacgaggccttcaaccccaactccgtgaagcagctgcgggtgctgctgttcgactacgtgggcctgacccccaccggcaagctgaccgacaccggcgccgactccaccgacgccgaggccctgaacgagctggccacccagcaccccatcgccaagaccctgctggagatccggaagctgaccaagctgatctccacctacgtggagaagatcctgctgtccatcgacgccgacggctgcatccggaccggcttccacgagcacatgaccacctccggccggctgtcctcctccggcaagctgaacctgcagcagctgccccgggacgagtccatcatcaagggctgcgtggtggccccccccggctaccgggtgatcgcctgggacctgaccaccgccgaggtgtactacgccgccgtgctgtccggcgaccggaacatgcagcaggtgttcatcaacatgcggaacgagcccgacaagtaccccgacttccactccaacatcgcccacatggtgttcaagctgcagtgcgagccccgggacgtgaagaagctgttccccgccctgcggcaggccgccaagcgcatcaccttcggcatcctgtacggctccggccccgccaaggtggcccactccgtgaacgaggccctgctggagcaggccgccaagaccggcgagcccttcgtggagtgcaccgtggccgacgccaaggagtacatcgagacctacttcggccagttcccccagctgaagcggtggatcgacaagtgccacgaccagatcaagaaccacggcttcatctactcccacttcggccggaagcggcggctgcacaacatccactccgaggaccggggcgtgcagggcgaggagatccggtccggcttcaacgccatcatccagtccgcctcctccgactccctgctgctgggcgccgtggacgccgacaacgagatcatctccctgggcctggagcaggagatgaagatcgtgatgctggtgcacgactccgtggtggccatcgtgcgggaggacctgatcgaccagtacaacgagatcctgatccggaacatccagaaggaccggggcatctccatccccggctgccccatcggcatcgactccgactccgaggccggcggctcccgggactactcctgcggcaagatgaagaagcagcacccctccatcgcctgcatcgacgacgacgagtacacccggtacgtgaagggcgtgctgctggacgccgagttcgagtacaagaagctggccgccatggacaaggagcaccccgaccactccaagtacaaggacgacaagttcatcgccgtgtgcaaggacctggacaacgtgaagcggatcctgggcgccggcggcggctccggcaagcggaccgccgacggctccggcggcggctcccccaagaagaagcggaaggtg

SEQ ID NO: 1147 - protein, 2288 aa, synthetic construct
  REGION 1..2288: note = Synthetic
MDKKYSIGLDIGTNSVGWAVITDEYKVPSKKFKVLGNTDRHSIKKNLIGALLFDSGETAEATRLKRTARRRYTRRKNRICYLQEIFSNEMAKVDDSFFHRLEESFLVEEDKKHERHPIFGNIVDEVAYHEKYPTIYHLRKKLVDSTDKADLRLIYLALAHMIKFRGHFLIEGDLNPDNSDVDKLFIQLVQTYNQLFEENPINASGVDAKAILSARLSKSRRLENLIAQLPGEKKNGLFGNLIALSLGLTPNFKSNFDLAEDAKLQLSKDTYDDDLDNLLAQIGDQYADLFLAAKNLSDAILLSDILRVNTEITKAPLSASMIKRYDEHHQDLTLLKALVRQQLPEKYKEIFFDQSKNGYAGYIDGGASQEEFYKFIKPILEKMDGTEELLVKLNREDLLRKQRTFDNGSIPHQIHLGELHAILRRQEDFYPFLKDNREKIEKILTFRIPYYVGPLARGNSRFAWMTRKSEETITPWNFEEVVDKGASAQSFIERMTNFDKNLPNEKVLPKHSLLYEYFTVYNELTKVKYVTEGMRKPAFLSGEQKKAIVDLLFKTNRKVTVKQLKEDYFKKIECFDSVEISGVEDRFNASLGTYHDLLKIIKDKDFLDNEENEDILEDIVLTLTLFEDREMIEERLKTYAHLFDDKVMKQLKRRRYTGWGRLSRKLINGIRDKQSGKTILDFLKSDGFANRNFMQLIHDDSLTFKEDIQKAQVSGQGDSLHEHIANLAGSPAIKKGILQTVKVVDELVKVMGRHKPENIVIEMARENQTTQKGQKNSRERMKRIEEGIKELGSQILKEHPVENTQLQNEKLYLYYLQNGRDMYVDQELDINRLSDYDVDAIVPQSFLKDDSIDNKVLTRSDKNRGKSDNVPSEEVVKKMKNYWRQLLNAKLITQRKFDNLTKAERGGLSELDKAGFIKRQLVETRQITKHVAQILDSRMNTKYDENDKLIREVKVITLKSKLVSDFRKDFQFYKVREINNYHHAHDAYLNAVVGTALIKKYPKLESEFVYGDYKVYDVRKMIAKSEQEIGKATAKYFFYSNIMNFFKTEITLANGEIRKRPLIETNGETGEIVWDKGRDFATVRKVLSMPQVNIVKKTEVQTGGFSKESILPKRNSDKLIARKKDWDPKKYGGFDSPTVAYSVLVVAKVEKGKSKKLKSVKELLGITIMERSSFEKNPIDFLEAKGYKEVKKDLIIKLPKYSLFELENGRKRMLASAGELQKGNELALPSKYVNFLYLASHYEKLKGSPEDNEQKQLFVEQHKHYLDEIIEQISEFSKRVILADANLDKVLSAYNKHRDKPIREQAENIIHLFTLTNLGAPAAFKYFDTTIDRKRYTSTKEVLDATLIHQSITGLYETRIDLSQLGGDGAPESATESGGTSTESEGSAGTSTESEGSAGSAGSTSGSSSGMKIAVVDKALNNTRYDKHFQLYGEEVDVFHMCNEKLSGRLLKKHITIGTPENPFDPNDYDFVILVGAEPFLYFAGKKGIGDYTGKRVEYNGYANWIASISPAQLHFKPEMKPVFDATVENIHDIINGREKIAKAGDYRPITDPDEAEEYIKMVYNMVIGPVAFASATSALYCRDGYLLGVSISHQEYQGVYIDSDCLTEVAVYYLQKILDSENHTIVFHNLKFDMHFYKYHLGLTFDKAHKERRLHDTMLQHYVLDERRGTHGLKSLAMKYTDMGDYDFELDKFKDDYCKAHKIKKEDFTYDLIPFDIMWPYAAKDTDATIRLHNFFLPKIEKNEKLCSLYYDVLMPGCVFLQRVEDRGVPISIDRLKEAQYQLTHNLNKAREKLYTYPEVKQLEQDQNEAFNPNSVKQLRVLLFDYVGLTPTGKLTDTGADSTDAEALNELATQHPIAKTLLEIRKLTKLISTYVEKILLSIDADGCIRTGFHEHMTTSGRLSSSGKLNLQQLPRDESIIKGCVVAPPGYRVIAWDLTTAEVYYAAVLSGDRNMQQVFINMRNEPDKYPDFHSNIAHMVFKLQCEPRDVKKLFPALRQAAKRITFGILYGSGPAKVAHSVNEALLEQAAKTGEPFVECTVADAKEYIETYFGQFPQLKRWIDKCHDQIKNHGFIYSHFGRKRRLHNIHSEDRGVQGEEIRSGFNAIIQSASSDSLLLGAVDADNEIISLGLEQEMKIVMLVHDSVVAIVREDLIDQYNEILIRNIQKDRGISIPGCPIGIDSDSEAGGSRDYSCGKMKKQHPSIACIDDDEYTRYVKGVLLDAEFEYKKLAAMDKEHPDHSKYKDDKFIAVCKDLDNVKRILGAGGGSGKRTADGSGGGSPKKKRKV

SEQ ID NO: 1148 - RNA, 7393 nt, synthetic construct
  misc_feature 1..7393: note = Synthetic
  source 1..7393: mol_type = other RNA
gggaagctcagaataaacgctcaactttggccggatctgccaccatggacaagaagtactccatcggcctggacatcggcaccaactccgtgggctgggccgtgatcaccgacgagtacaaggtgccctccaagaagttcaaggtgctgggcaacaccgaccggcactccatcaagaagaacctgatcggcgccctgctgttcgactccggcgagaccgccgaggccacccggctgaagcggaccgcccggcggcggtacacccggcggaagaaccggatctgctacctgcaggagatcttctccaacgagatggccaaggtggacgactccttcttccaccggctggaggagtccttcctggtggaggaggacaagaagcacgagcggcaccccatcttcggcaacatcgtggacgaggtggcctaccacgagaagtaccccaccatctaccacctgcggaagaagctggtggactccaccgacaaggccgacctgcggctgatctacctggccctggcccacatgatcaagttccggggccacttcctgatcgagggcgacctgaaccccgacaactccgacgtggacaagctgttcatccagctggtgcagacctacaaccagctgttcgaggagaaccccatcaacgcctccggcgtggacgccaaggccatcctgtccgcccggctgtccaagtcccggcggctggagaacctgatcgcccagctgcccggcgagaagaagaacggcctgttcggcaacctgatcgccctgtccctgggcctgacccccaacttcaagtccaacttcgacctggccgaggacgccaagctgcagctgtccaaggacacctacgacgacgacctggacaacctgctggcccagatcggcgaccagtacgccgacctgttcctggccgccaagaacctgtccgacgccatcctgctgtccgacatcctgcgggtgaacaccgagatcaccaaggcccccctgtccgcctccatgatcaagcggtacgacgagcaccaccaggacctgaccctgctgaaggccctggtgcggcagcagctgcccgagaagtacaaggagatcttcttcgaccagtccaagaacggctacgccggctacatcgacggcggcgcctcccaggaggagttctacaagttcatcaagcccatcctggagaagatggacggcaccgaggagctgctggtgaagctgaaccgggaggacctgctgcggaagcagcggaccttcgacaacggctccatcccccaccagatccacctgggcgagctgcacgccatcctgcggcggcaggaggacttctaccccttcctgaaggacaaccgggagaagatcgagaagatcctgaccttccggatcccctactacgtgggccccctggcccggggcaactcccggttcgcctggatgacccggaagtccgaggagaccatcaccccctggaacttcgaggaggtggtggacaagggcgcctccgcccagtccttcatcgagcggatgaccaacttcgacaagaacctgcccaacgagaaggtgctgcccaagcactccctgctgtacgagtacttcaccgtgtacaacgagctgaccaaggtgaagtacgtgaccgagggcatgcggaagcccgccttcctgtccggcgagcagaagaaggccatcgtggacctgctgttcaagaccaaccggaaggtgaccgtgaagcagctgaaggaggactacttcaagaagatcgagtgcttcgactccgtggagatctccggcgtggaggaccggttcaacgcctccctgggcacctaccacgacctgctgaagatcatcaaggacaaggacttcctggacaacgaggagaacgaggacatcctggaggacatcgtgctgaccctgaccctgttcgaggaccgggagatgatcgaggagcggctgaagacctacgcccacctgttcgacgacaaggtgatgaagcagctgaagcggcggcggtacaccggctggggccggctgtcccggaagctgatcaacggcatccgggacaagcagtccggcaagaccatcctggacttcctgaagtccgacggcttcgccaaccggaacttcatgcagctgatccacgacgactccctgaccttcaaggaggacatccagaaggcccaggtgtccggccagggcgactccctgcacgagcacatcgccaacctggccggctcccccgccatcaagaagggcatcctgcagaccgtgaaggtggtggacgagctggtgaaggtgatgggccggcacaagcccgagaacatcgtgatcgagatggcccgggagaaccagaccacccagaagggccagaagaactcccgggagcggatgaagcggatcgaggagggcatcaaggagctgggctcccagatcctgaaggagcaccccgtggagaacacccagctgcagaacgagaagctgtacctgtactacctgcagaacggccgggacatgtacgtggaccaggagctggacatcaaccggctgtccgactacgacgtggacgccatcgtgccccagtccttcctgaaggacgactccatcgacaacaaggtgctgacccggtccgacaagaaccggggcaagtccgacaacgtgccctccgaggaggtggtgaagaagatgaagaactactggcggcagctgctgaacgccaagctgatcacccagcggaagttcgacaacctgaccaaggccgagcggggcggcctgtccgagctggacaaggccggcttcatcaagcggcagctggtggagacccggcagatcaccaagcacgtggcccagatcctggactcccggatgaacaccaagtacgacgagaacgacaagctgatccgggaggtgaaggtgatcaccctgaagtccaagctggtgtccgacttccggaaggacttccagttctacaaggtgcgggagatcaacaactaccaccacgcccacgacgcctacctgaacgccgtggtgggcaccgccctgatcaagaagtaccccaagctggagtccgagttcgtgtacggcgactacaaggtgtacgacgtgcggaagatgatcgccaagtccgagcaggagatcggcaaggccaccgccaagtacttcttctactccaacatcatgaacttcttcaagaccgagatcaccctggccaacggcgagatccggaagcggcccctgatcgagaccaacggcgagaccggcgagatcgtgtgggacaagggccgggacttcgccaccgtgcggaaggtgctgtccatgccccaggtgaacatcgtgaagaagaccgaggtgcagaccggcggcttctccaaggagtccatcctgcccaagcggaactccgacaagctgatcgcccggaagaaggactgggaccccaagaagtacggcggcttcgactcccccaccgtggcctactccgtgctggtggtggccaaggtggagaagggcaagtccaagaagctgaagtccgtgaaggagctgctgggcatcaccatcatggagcggtcctccttcgagaagaaccccatcgacttcctggaggccaagggctacaaggaggtgaagaaggacctgatcatcaagctgcccaagtactccctgttcgagctggagaacggccggaagcggatgctggcctccgccggcgagctgcagaagggcaacgagctggccctgccctccaagtacgtgaacttcctgtacctggcctcccactacgagaagctgaagggctcccccgaggacaacgagcagaagcagctgttcgtggagcagcacaagcactacctggacgagatcatcgagcagatctccgagttctccaagcgggtgatcctggccgacgccaacctggacaaggtgctgtccgcctacaacaagcaccgggacaagcccatccgggagcaggccgagaacatcatccacctgttcaccctgaccaacctgggcgcccccgccgccttcaagtacttcgacaccaccatcgaccggaagcggtacacctccaccaaggaggtgctggacgccaccctgatccaccagtccatcaccggcctgtacgagacccggatcgacctgtcccagctgggcggcgacggcgcccccgagtccgccaccgagtccggcggcacctccaccgagtccgagggctccgccggcacctccaccgagtccgagggctccgccggctccgccggctccacctccggctcctcctccggcatgtgcaacgagaagctgtccggccggctgctgaagaagcacatcaccatcggcacccccgagaaccccttcgaccccaacgactacgacttcgtgatcctggtgggcgccgagcccttcctgtacttcgccggcaagaagggcatcggcgactacaccggcaagcgggtggagtacaacggctacgccaactggatcgcctccatctcccccgcccagctgcacttcaagcccgagatgaagcccgtgttcgacgccaccgtggagaacatccacgacatcatcaacggccgggagaagatcgccaaggccggcgactaccggcccatcaccgaccccgacgaggccgaggagtacatcaagatggtgtacaacatggtgatcggccccgtggccttcgcctccgccacctccgccctgtactgccgggacggctacctgctgggcgtgtccatctcccaccaggagtaccagggcgtgtacatcgactccgactgcctgaccgaggtggccgtgtactacctgcagaagatcctggactccgagaaccacaccatcgtgttccacaacctgaagttcgacatgcacttctacaagtaccacctgggcctgaccttcgacaaggcccacaaggagcggcggctgcacgacaccatgctgcagcactacgtgctggacgagcggcggggcacccacggcctgaagtccctggccatgaagtacaccgacatgggcgactacgacttcgagctggacaagttcaaggacgactactgcaaggcccacaagatcaagaaggaggacttcacctacgacctgatccccttcgacatcatgtggccctacgccgccaaggacaccgacgccaccatccggctgcacaacttcttcctgcccaagatcgagaagaacgagaagctgtgctccctgtactacgacgtgctgatgcccggctgcgtgttcctgcagcgggtggaggaccggggcgtgcccatctccatcgaccggctgaaggaggcccagtaccagctgacccacaacctgaacaaggcccgggagaagctgtacacctaccccgaggtgaagcagctggagcaggaccagaacgaggccttcaaccccaactccgtgaagcagctgcgggtgctgctgttcgactacgtgggcctgacccccaccggcaagctgaccgacaccggcgccgactccaccgacgccgaggccctgaacgagctggccacccagcaccccatcgccaagaccctgctggagatccggaagctgaccaagctgatctccacctacgtggagaagatcctgctgtccatcgacgccgacggctgcatccggaccggcttccacgagcacatgaccacctccggccggctgtcctcctccggcaagctgaacctgcagcagctgccccgggacgagtccatcatcaagggctgcgtggtggccccccccggctaccgggtgatcgcctgggacctgaccaccgccgaggtgtactacgccgccgtgctgtccggcgaccggaacatgcagcaggtgttcatcaacatgcggaacgagcccgacaagtaccccgacttccactccaacatcgcccacatggtgttcaagctgcagtgcgagccccgggacgtgaagaagctgttccccgccctgcggcaggccgccaaggccatcaccttcggcatcctgtacggctccggccccgccaaggtggcccactccgtgaacgaggccctgctggagcaggccgccaagaccggcgagcccttcgtggagtgcaccgtggccgacgccaaggagtacatcgagacctacttcggccagttcccccagctgaagcggtggatcgacaagtgccacgaccagatcaagaaccacggcttcatctactcccacttcggccggaagcggcggctgcacaacatccactccgaggaccggggcgtgcagggcgaggagatccggtccggcttcaacgccatcatccagtccgcctcctccgactccctgctgctgggcgccgtggacgccgacaacgagatcatctccctgggcctggagcaggagatgaagatcgtgatgctggtgcacgactccgtggtggccatcgtgcgggaggacctgatcgaccagtacaacgagatcctgatccggaacatccagaaggaccggggcatctccatccccggctgccccatcggcatcgactccgactccgaggccggcggctcccgggactactcctgcggcaagatgaagaagcagcacccctccatcgcctgcatcgacgacgacgagtacacccggtacgtgaagggcgtgctgctggacgccgagttcgagtacaagaagctggccgccatggacaaggagcaccccgaccactccaagtacaaggacgacaagttcatcgccgtgtgcaaggacctggacaacgtgaagcggatcctgggcgccggcggcggctccggcaagcggaccgccgacggctccggcggcggctcccccaagaagaagcggaaggtgtccgagtccgccacccccgagtccgtgtccggctggcggctgttcaagaagatctcctagctagcaccagcctcaagaacacccgaatggagtctctaagctacataataccaacttacactttacaaaatgttgtcccccaaaatgtagccattcgtatctgctcctaataaaaagaaagtttcttcacattctctcgagaaaaaaaaaaaatggaaaaaaaaaaaacggaaaaaaaaaaaaggtaaaaaaaaaaaatataaaaaaaaaaaacataaaaaaaaaaaacgaaaaaaaaaaaacgtaaaaaaaaaaaactcaaaaaaaaaaaagataaaaaaaaaaaacctaaaaaaaaaaaatgtaaaaaaaaaaaagggaaaaaaaaaaaacgcaaaaaaaaaaaacacaaaaaaaaaaaatgcaaaaaaaaaaaatcgaaaaaaaaaaaatctaaaaaaaaaaaacgaaaaaaaaaaaacccaaaaaaaaaaaagacaaaaaaaaaaaatagaaaaaaaaaaagttaaaaaaaaaaaactgaaaaaaaaaaaatttaaaaaaaaaaaatctag

SEQ ID NO: 1149 - RNA, 6834 nt, synthetic construct
  misc_feature 1..6834: note = Synthetic
  source 1..6834: mol_type = other RNA
atggacaagaagtactccatcggcctggacatcggcaccaactccgtgggctgggccgtgatcaccgacgagtacaaggtgccctccaagaagttcaaggtgctgggcaacaccgaccggcactccatcaagaagaacctgatcggcgccctgctgttcgactccggcgagaccgccgaggccacccggctgaagcggaccgcccggcggcggtacacccggcggaagaaccggatctgctacctgcaggagatcttctccaacgagatggccaaggtggacgactccttcttccaccggctggaggagtccttcctggtggaggaggacaagaagcacgagcggcaccccatcttcggcaacatcgtggacgaggtggcctaccacgagaagtaccccaccatctaccacctgcggaagaagctggtggactccaccgacaaggccgacctgcggctgatctacctggccctggcccacatgatcaagttccggggccacttcctgatcgagggcgacctgaaccccgacaactccgacgtggacaagctgttcatccagctggtgcagacctacaaccagctgttcgaggagaaccccatcaacgcctccggcgtggacgccaaggccatcctgtccgcccggctgtccaagtcccggcggctggagaacctgatcgcccagctgcccggcgagaagaagaacggcctgttcggcaacctgatcgccctgtccctgggcctgacccccaacttcaagtccaacttcgacctggccgaggacgccaagctgcagctgtccaaggacacctacgacgacgacctggacaacctgctggcccagatcggcgaccagtacgccgacctgttcctggccgccaagaacctgtccgacgccatcctgctgtccgacatcctgcgggtgaacaccgagatcaccaaggcccccctgtccgcctccatgatcaagcggtacgacgagcaccaccaggacctgaccctgctgaaggccctggtgcggcagcagctgcccgagaagtacaaggagatcttcttcgaccagtccaagaacggctacgccggctacatcgacggcggcgcctcccaggaggagttctacaagttcatcaagcccatcctggagaagatggacggcaccgaggagctgctggtgaagctgaaccgggaggacctgctgcggaagcagcggaccttcgacaacggctccatcccccaccagatccacctgggcgagctgcacgccatcctgcggcggcaggaggacttctaccccttcctgaaggacaaccgggagaagatcgagaagatcctgaccttccggatcccctactacgtgggccccctggcccggggcaactcccggttcgcctggatgacccggaagtccgaggagaccatcaccccctggaacttcgaggaggtggtggacaagggcgcctccgcccagtccttcatcgagcggatgaccaacttcgacaagaacctgcccaacgagaaggtgctgcccaagcactccctgctgtacgagtacttcaccgtgtacaacgagctgaccaaggtgaagtacgtgaccgagggcatgcggaagcccgccttcctgtccggcgagcagaagaaggccatcgtggacctgctgttcaagaccaaccggaaggtgaccgtgaagcagctgaaggaggactacttcaagaagatcgagtgcttcgactccgtggagatctccggcgtggaggaccggttcaacgcctccctgggcacctaccacgacctgctgaagatcatcaaggacaaggacttcctggacaacgaggagaacgaggacatcctggaggacatcgtgctgaccctgaccctgttcgaggaccgggagatgatcgaggagcggctgaagacctacgcccacctgttcgacgacaaggtgatgaagcagctgaagcggcggcggtacaccggctggggccggctgtcccggaagctgatcaacggcatccgggacaagcagtccggcaagaccatcctggacttcctgaagtccgacggcttcgccaaccggaacttcatgcagctgatccacgacgactccctgaccttcaaggaggacatccagaaggcccaggtgtccggccagggcgactccctgcacgagcacatcgccaacctggccggctcccccgccatcaagaagggcatcctgcagaccgtgaaggtggtggacgagctggtgaaggtgatgggccggcacaagcccgagaacatcgtgatcgagatggcccgggagaaccagaccacccagaagggccagaagaactcccgggagcggatgaagcggatcgaggagggcatcaaggagctgggctcccagatcctgaaggagcaccccgtggagaacacccagctgcagaacgagaagctgtacctgtactacctgcagaacggccgggacatgtacgtggaccaggagctggacatcaaccggctgtccgactacgacgtggacgccatcgtgccccagtccttcctgaaggacgactccatcgacaacaaggtgctgacccggtccgacaagaaccggggcaagtccgacaacgtgccctccgaggaggtggtgaagaagatgaagaactactggcggcagctgctgaacgccaagctgatcacccagcggaagttcgacaacctgaccaaggccgagcggggcggcctgtccgagctggacaaggccggcttcatcaagcggcagctggtggagacccggcagatcaccaagcacgtggcccagatcctggactcccggatgaacaccaagtacgacgagaacgacaagctgatccgggaggtgaaggtgatcaccctgaagtccaagctggtgtccgacttccggaaggacttccagttctacaaggtgcgggagatcaacaactaccaccacgcccacgacgcctacctgaacgccgtggtgggcaccgccctgatcaagaagtaccccaagctggagtccgagttcgtgtacggcgactacaaggtgtacgacgtgcggaagatgatcgccaagtccgagcaggagatcggcaaggccaccgccaagtacttcttctactccaacatcatgaacttcttcaagaccgagatcaccctggccaacggcgagatccggaagcggcccctgatcgagaccaacggcgagaccggcgagatcgtgtgggacaagggccgggacttcgccaccgtgcggaaggtgctgtccatgccccaggtgaacatcgtgaagaagaccgaggtgcagaccggcggcttctccaaggagtccatcctgcccaagcggaactccgacaagctgatcgcccggaagaaggactgggaccccaagaagtacggcggcttcgactcccccaccgtggcctactccgtgctggtggtggccaaggtggagaagggcaagtccaagaagctgaagtccgtgaaggagctgctgggcatcaccatcatggagcggtcctccttcgagaagaaccccatcgacttcctggaggccaagggctacaaggaggtgaagaaggacctgatcatcaagctgcccaagtactccctgttcgagctggagaacggccggaagcggatgctggcctccgccggcgagctgcagaagggcaacgagctggccctgccctccaagtacgtgaacttcctgtacctggcctcccactacgagaagctgaagggctcccccgaggacaacgagcagaagcagctgttcgtggagcagcacaagcactacctggacgagatcatcgagcagatctccgagttctccaagcgggtgatcctggccgacgccaacctggacaaggtgctgtccgcctacaacaagcaccgggacaagcccatccgggagcaggccgagaacatcatccacctgttcaccctgaccaacctgggcgcccccgccgccttcaagtacttcgacaccaccatcgaccggaagcggtacacctccaccaaggaggtgctggacgccaccctgatccaccagtccatcaccggcctgtacgagacccggatcgacctgtcccagctgggcggcgacggcgcccccgagtccgccaccgagtccggcggcacctccaccgagtccgagggctccgccggcacctccaccgagtccgagggctccgccggctccgccggctccacctccggctcctcctccggcatgtgcaacgagaagctgtccggccggctgctgaagaagcacatcaccatcggcacccccgagaaccccttcgaccccaacgactacgacttcgtgatcctggtgggcgccgagcccttcctgtacttcgccggcaagaagggcatcggcgactacaccggcaagcgggtggagtacaacggctacgccaactggatcgcctccatctcccccgcccagctgcacttcaagcccgagatgaagcccgtgttcgacgccaccgtggagaacatccacgacatcatcaacggccgggagaagatcgccaaggccggcgactaccggcccatcaccgaccccgacgaggccgaggagtacatcaagatggtgtacaacatggtgatcggccccgtggccttcgcctccgccacctccgccctgtactgccgggacggctacctgctgggcgtgtccatctcccaccaggagtaccagggcgtgtacatcgactccgactgcctgaccgaggtggccgtgtactacctgcagaagatcctggactccgagaaccacaccatcgtgttccacaacctgaagttcgacatgcacttctacaagtaccacctgggcctgaccttcgacaaggcccacaaggagcggcggctgcacgacaccatgctgcagcactacgtgctggacgagcggcggggcacccacggcctgaagtccctggccatgaagtacaccgacatgggcgactacgacttcgagctggacaagttcaaggacgactactgcaaggcccacaagatcaagaaggaggacttcacctacgacctgatccccttcgacatcatgtggccctacgccgccaaggacaccgacgccaccatccggctgcacaacttcttcctgcccaagatcgagaagaacgagaagctgtgctccctgtactacgacgtgctgatgcccggctgcgtgttcctgcagcgggtggaggaccggggcgtgcccatctccatcgaccggctgaaggaggcccagtaccagctgacccacaacctgaacaaggcccgggagaagctgtacacctaccccgaggtgaagcagctggagcaggaccagaacgaggccttcaaccccaactccgtgaagcagctgcgggtgctgctgttcgactacgtgggcctgacccccaccggcaagctgaccgacaccggcgccgactccaccgacgccgaggccctgaacgagctggccacccagcaccccatcgccaagaccctgctggagatccggaagctgaccaagctgatctccacctacgtggagaagatcctgctgtccatcgacgccgacggctgcatccggaccggcttccacgagcacatgaccacctccggccggctgtcctcctccggcaagctgaacctgcagcagctgccccgggacgagtccatcatcaagggctgcgtggtggccccccccggctaccgggtgatcgcctgggacctgaccaccgccgaggtgtactacgccgccgtgctgtccggcgaccggaacatgcagcaggtgttcatcaacatgcggaacgagcccgacaagtaccccgacttccactccaacatcgcccacatggtgttcaagctgcagtgcgagccccgggacgtgaagaagctgttccccgccctgcggcaggccgccaaggccatcaccttcggcatcctgtacggctccggccccgccaaggtggcccactccgtgaacgaggccctgctggagcaggccgccaagaccggcgagcccttcgtggagtgcaccgtggccgacgccaaggagtacatcgagacctacttcggccagttcccccagctgaagcggtggatcgacaagtgccacgaccagatcaagaaccacggcttcatctactcccacttcggccggaagcggcggctgcacaacatccactccgaggaccggggcgtgcagggcgaggagatccggtccggcttcaacgccatcatccagtccgcctcctccgactccctgctgctgggcgccgtggacgccgacaacgagatcatctccctgggcctggagcaggagatgaagatcgtgatgctggtgcacgactccgtggtggccatcgtgcgggaggacctgatcgaccagtacaacgagatcctgatccggaacatccagaaggaccggggcatctccatccccggctgccccatcggcatcgactccgactccgaggccggcggctcccgggactactcctgcggcaagatgaagaagcagcacccctccatcgcctgcatcgacgacgacgagtacacccggtacgtgaagggcgtgctgctggacgccgagttcgagtacaagaagctggccgccatggacaaggagcaccccgaccactccaagtacaaggacgacaagttcatcgccgtgtgcaaggacctggacaacgtgaagcggatcctgggcgccggcggcggctccggcaagcggaccgccgacggctccggcggcggctcccccaagaagaagcggaaggtgtccgagtccgccacccccgagtccgtgtccggctggcggctgttcaagaagatctcctag

SEQ ID NO: 1150 - protein, 2277 aa, synthetic construct
  REGION 1..2277: note = Synthetic
MDKKYSIGLDIGTNSVGWAVITDEYKVPSKKFKVLGNTDRHSIKKNLIGALLFDSGETAEATRLKRTARRRYTRRKNRICYLQEIFSNEMAKVDDSFFHRLEESFLVEEDKKHERHPIFGNIVDEVAYHEKYPTIYHLRKKLVDSTDKADLRLIYLALAHMIKFRGHFLIEGDLNPDNSDVDKLFIQLVQTYNQLFEENPINASGVDAKAILSARLSKSRRLENLIAQLPGEKKNGLFGNLIALSLGLTPNFKSNFDLAEDAKLQLSKDTYDDDLDNLLAQIGDQYADLFLAAKNLSDAILLSDILRVNTEITKAPLSASMIKRYDEHHQDLTLLKALVRQQLPEKYKEIFFDQSKNGYAGYIDGGASQEEFYKFIKPILEKMDGTEELLVKLNREDLLRKQRTFDNGSIPHQIHLGELHAILRRQEDFYPFLKDNREKIEKILTFRIPYYVGPLARGNSRFAWMTRKSEETITPWNFEEVVDKGASAQSFIERMTNFDKNLPNEKVLPKHSLLYEYFTVYNELTKVKYVTEGMRKPAFLSGEQKKAIVDLLFKTNRKVTVKQLKEDYFKKIECFDSVEISGVEDRFNASLGTYHDLLKIIKDKDFLDNEENEDILEDIVLTLTLFEDREMIEERLKTYAHLFDDKVMKQLKRRRYTGWGRLSRKLINGIRDKQSGKTILDFLKSDGFANRNFMQLIHDDSLTFKEDIQKAQVSGQGDSLHEHIANLAGSPAIKKGILQTVKVVDELVKVMGRHKPENIVIEMARENQTTQKGQKNSRERMKRIEEGIKELGSQILKEHPVENTQLQNEKLYLYYLQNGRDMYVDQELDINRLSDYDVDAIVPQSFLKDDSIDNKVLTRSDKNRGKSDNVPSEEVVKKMKNYWRQLLNAKLITQRKFDNLTKAERGGLSELDKAGFIKRQLVETRQITKHVAQILDSRMNTKYDENDKLIREVKVITLKSKLVSDFRKDFQFYKVREINNYHHAHDAYLNAVVGTALIKKYPKLESEFVYGDYKVYDVRKMIAKSEQEIGKATAKYFFYSNIMNFFKTEITLANGEIRKRPLIETNGETGEIVWDKGRDFATVRKVLSMPQVNIVKKTEVQTGGFSKESILPKRNSDKLIARKKDWDPKKYGGFDSPTVAYSVLVVAKVEKGKSKKLKSVKELLGITIMERSSFEKNPIDFLEAKGYKEVKKDLIIKLPKYSLFELENGRKRMLASAGELQKGNELALPSKYVNFLYLASHYEKLKGSPEDNEQKQLFVEQHKHYLDEIIEQISEFSKRVILADANLDKVLSAYNKHRDKPIREQAENIIHLFTLTNLGAPAAFKYFDTTIDRKRYTSTKEVLDATLIHQSITGLYETRIDLSQLGGDGAPESATESGGTSTESEGSAGTSTESEGSAGSAGSTSGSSSGMCNEKLSGRLLKKHITIGTPENPFDPNDYDFVILVGAEPFLYFAGKKGIGDYTGKRVEYNGYANWIASISPAQLHFKPEMKPVFDATVENIHDIINGREKIAKAGDYRPITDPDEAEEYIKMVYNMVIGPVAFASATSALYCRDGYLLGVSISHQEYQGVYIDSDCLTEVAVYYLQKILDSENHTIVFHNLKFDMHFYKYHLGLTFDKAHKERRLHDTMLQHYVLDERRGTHGLKSLAMKYTDMGDYDFELDKFKDDYCKAHKIKKEDFTYDLIPFDIMWPYAAKDTDATIRLHNFFLPKIEKNEKLCSLYYDVLMPGCVFLQRVEDRGVPISIDRLKEAQYQLTHNLNKAREKLYTYPEVKQLEQDQNEAFNPNSVKQLRVLLFDYVGLTPTGKLTDTGADSTDAEALNELATQHPIAKTLLEIRKLTKLISTYVEKILLSIDADGCIRTGFHEHMTTSGRLSSSGKLNLQQLPRDESIIKGCVVAPPGYRVIAWDLTTAEVYYAAVLSGDRNMQQVFINMRNEPDKYPDFHSNIAHMVFKLQCEPRDVKKLFPALRQAAKAITFGILYGSGPAKVAHSVNEALLEQAAKTGEPFVECTVADAKEYIETYFGQFPQLKRWIDKCHDQIKNHGFIYSHFGRKRRLHNIHSEDRGVQGEEIRSGFNAIIQSASSDSLLLGAVDADNEIISLGLEQEMKIVMLVHDSVVAIVREDLIDQYNEILIRNIQKDRGISIPGCPIGIDSDSEAGGSRDYSCGKMKKQHPSIACIDDDEYTRYVKGVLLDAEFEYKKLAAMDKEHPDHSKYKDDKFIAVCKDLDNVKRILGAGGGSGKRTADGSGGGSPKKKRKVSESATPESVSGWRLFKKIS

SEQ ID NO: 1151 - RNA, 6774 nt, synthetic construct
  misc_feature 1..6774: note = Synthetic
  source 1..6774: mol_type = other RNA
atggacaagaagtactccatcggcctggacatcggcaccaactccgtgggctgggccgtgatcaccgacgagtacaaggtgccctccaagaagttcaaggtgctgggcaacaccgaccggcactccatcaagaagaacctgatcggcgccctgctgttcgactccggcgagaccgccgaggccacccggctgaagcggaccgcccggcggcggtacacccggcggaagaaccggatctgctacctgcaggagatcttctccaacgagatggccaaggtggacgactccttcttccaccggctggaggagtccttcctggtggaggaggacaagaagcacgagcggcaccccatcttcggcaacatcgtggacgaggtggcctaccacgagaagtaccccaccatctaccacctgcggaagaagctggtggactccaccgacaaggccgacctgcggctgatctacctggccctggcccacatgatcaagttccggggccacttcctgatcgagggcgacctgaaccccgacaactccgacgtggacaagctgttcatccagctggtgcagacctacaaccagctgttcgaggagaaccccatcaacgcctccggcgtggacgccaaggccatcctgtccgcccggctgtccaagtcccggcggctggagaacctgatcgcccagctgcccggcgagaagaagaacggcctgttcggcaacctgatcgccctgtccctgggcctgacccccaacttcaagtccaacttcgacctggccgaggacgccaagctgcagctgtccaaggacacctacgacgacgacctggacaacctgctggcccagatcggcgaccagtacgccgacctgttcctggccgccaagaacctgtccgacgccatcctgctgtccgacatcctgcgggtgaacaccgagatcaccaaggcccccctgtccgcctccatgatcaagcggtacgacgagcaccaccaggacctgaccctgctgaaggccctggtgcggcagcagctgcccgagaagtacaaggagatcttcttcgaccagtccaagaacggctacgccggctacatcgacggcggcgcctcccaggaggagttctacaagttcatcaagcccatcctggagaagatggacggcaccgaggagctgctggtgaagctgaaccgggaggacctgctgcggaagcagcggaccttcgacaacggctccatcccccaccagatccacctgggcgagctgcacgccatcctgcggcggcaggaggacttctaccccttcctgaaggacaaccgggagaagatcgagaagatcctgaccttccggatcccctactacgtgggccccctggcccggggcaactcccggttcgcctggatgacccggaagtccgaggagaccatcaccccctggaacttcgaggaggtggtggacaagggcgcctccgcccagtccttcatcgagcggatgaccaacttcgacaagaacctgcccaacgagaaggtgctgcccaagcactccctgctgtacgagtacttcaccgtgtacaacgagctgaccaaggtgaagtacgtgaccgagggcatgcggaagcccgccttcctgtccggcgagcagaagaaggccatcgtggacctgctgttcaagaccaaccggaaggtgaccgtgaagcagctgaaggaggactacttcaagaagatcgagtgcttcgactccgtggagatctccggcgtggaggaccggttcaacgcctccctgggcacctaccacgacctgctgaagatcatcaaggacaaggacttcctggacaacgaggagaacgaggacatcctggaggacatcgtgctgaccctgaccctgttcgaggaccgggagatgatcgaggagcggctgaagacctacgcccacctgttcgacgacaaggtgatgaagcagctgaagcggcggcggtacaccggctggggccggctgtcccggaagctgatcaacggcatccgggacaagcagtccggcaagaccatcctggacttcctgaagtccgacggcttcgccaaccggaacttcatgcagctgatccacgacgactccctgaccttcaaggaggacatccagaaggcccaggtgtccggccagggcgactccctgcacgagcacatcgccaacctggccggctcccccgccatcaagaagggcatcctgcagaccgtgaaggtggtggacgagctggtgaaggtgatgggccggcacaagcccgagaacatcgtgatcgagatggcccgggagaaccagaccacccagaagggccagaagaactcccgggagcggatgaagcggatcgaggagggcatcaaggagctgggctcccagatcctgaaggagcaccccgtggagaacacccagctgcagaacgagaagctgtacctgtactacctgcagaacggccgggacatgtacgtggaccaggagctggacatcaaccggctgtccgactacgacgtggacgccatcgtgccccagtccttcctgaaggacgactccatcgacaacaaggtgctgacccggtccgacaagaaccggggcaagtccgacaacgtgccctccgaggaggtggtgaagaagatgaagaactactggcggcagctgctgaacgccaagctgatcacccagcggaagttcgacaacctgaccaaggccgagcggggcggcctgtccgagctggacaaggccggcttcatcaagcggcagctggtggagacccggcagatcaccaagcacgtggcccagatcctggactcccggatgaacaccaagtacgacgagaacgacaagctgatccgggaggtgaaggtgatcaccctgaagtccaagctggtgtccgacttccggaaggacttccagttctacaaggtgcgggagatcaacaactaccaccacgcccacgacgcctacctgaacgccgtggtgggcaccgccctgatcaagaagtaccccaagctggagtccgagttcgtgtacggcgactacaaggtgtacgacgtgcggaagatgatcgccaagtccgagcaggagatcggcaaggccaccgccaagtacttcttctactccaacatcatgaacttcttcaagaccgagatcaccctggccaacggcgagatccggaagcggcccctgatcgagaccaacggcgagaccggcgagatcgtgtgggacaagggccgggacttcgccaccgtgcggaaggtgctgtccatgccccaggtgaacatcgtgaagaagaccgaggtgcagaccggcggcttctccaaggagtccatcctgcccaagcggaactccgacaagctgatcgcccggaagaaggactgggaccccaagaagtacggcggcttcgactcccccaccgtggcctactccgtgctggtggtggccaaggtggagaagggcaagtccaagaagctgaagtccgtgaaggagctgctgggcatcaccatcatggagcggtcctccttcgagaagaaccccatcgacttcctggaggccaagggctacaaggaggtgaagaaggacctgatcatcaagctgcccaagtactccctgttcgagctggagaacggccggaagcggatgctggcctccgccggcgagctgcagaagggcaacgagctggccctgccctccaagtacgtgaacttcctgtacctggcctcccactacgagaagctgaagggctcccccgaggacaacgagcagaagcagctgttcgtggagcagcacaagcactacctggacgagatcatcgagcagatctccgagttctccaagcgggtgatcctggccgacgccaacctggacaaggtgctgtccgcctacaacaagcaccgggacaagcccatccgggagcaggccgagaacatcatccacctgttcaccctgaccaacctgggcgcccccgccgccttcaagtacttcgacaccaccatcgaccggaagcggtacacctccaccaaggaggtgctggacgccaccctgatccaccagtccatcaccggcctgtacgagacccggatcgacctgtcccagctgggcggcgacggcgcccccgagtccgccaccgagtccggcggcacctccaccgagtccgagggctccgccggcacctccaccgagtccgagggctccgccggctccgccggctccacctccggctcctcctccggcatgtgcaacgagaagctgtccggccggctgctgaagaagcacatcaccatcggcacccccgagaaccccttcgaccccaacgactacgacttcgtgatcctggtgggcgccgagcccttcctgtacttcgccggcaagaagggcatcggcgactacaccggcaagcgggtggagtacaacggctacgccaactggatcgcctccatctcccccgcccagctgcacttcaagcccgagatgaagcccgtgttcgacgccaccgtggagaacatccacgacatcatcaacggccgggagaagatcgccaaggccggcgactaccggcccatcaccgaccccgacgaggccgaggagtacatcaagatggtgtacaacatggtgatcggccccgtggccttcgcctccgccacctccgccctgtactgccgggacggctacctgctgggcgtgtccatctcccaccaggagtaccagggcgtgtacatcgactccgactgcctgaccgaggtggccgtgtactacctgcagaagatcctggactccgagaaccacaccatcgtgttccacaacctgaagttcgacatgcacttctacaagtaccacctgggcctgaccttcgacaaggcccacaaggagcggcggctgcacgacaccatgctgcagcactacgtgctggacgagcggcggggcacccacggcctgaagtccctggccatgaagtacaccgacatgggcgactacgacttcgagctggacaagttcaaggacgactactgcaaggcccacaagatcaagaaggaggacttcacctacgacctgatccccttcgacatcatgtggccctacgccgccaaggacaccgacgccaccatccggctgcacaacttcttcctgcccaagatcgagaagaacgagaagctgtgctccctgtactacgacgtgctgatgcccggctgcgtgttcctgcagcgggtggaggaccggggcgtgcccatctccatcgaccggctgaaggaggcccagtaccagctgacccacaacctgaacaaggcccgggagaagctgtacacctaccccgaggtgaagcagctggagcaggaccagaacgaggccttcaaccccaactccgtgaagcagctgcgggtgctgctgttcgactacgtgggcctgacccccaccggcaagctgaccgacaccggcgccgactccaccgacgccgaggccctgaacgagctggccacccagcaccccatcgccaagaccctgctggagatccggaagctgaccaagctgatctccacctacgtggagaagatcctgctgtccatcgacgccgacggctgcatccggaccggcttccacgagcacatgaccacctccggccggctgtcctcctccggcaagctgaacctgcagcagctgccccgggacgagtccatcatcaagggctgcgtggtggccccccccggctaccgggtgatcgcctgggacctgaccaccgccgaggtgtactacgccgccgtgctgtccggcgaccggaacatgcagcaggtgttcatcaacatgcggaacgagcccgacaagtaccccgacttccactccaacatcgcccacatggtgttcaagctgcagtgcgagccccgggacgtgaagaagctgttccccgccctgcggcaggccgccaaggccatcaccttcggcatcctgtacggctccggccccgccaaggtggcccactccgtgaacgaggccctgctggagcaggccgccaagaccggcgagcccttcgtggagtgcaccgtggccgacgccaaggagtacatcgagacctacttcggccagttcccccagctgaagcggtggatcgacaagtgccacgaccagatcaagaaccacggcttcatctactcccacttcggccggaagcggcggctgcacaacatccactccgaggaccggggcgtgcagggcgaggagatccggtccggcttcaacgccatcatccagtccgcctcctccgactccctgctgctgggcgccgtggacgccgacaacgagatcatctccctgggcctggagcaggagatgaagatcgtgatgctggtgcacgactccgtggtggccatcgtgcgggaggacctgatcgaccagtacaacgagatcctgatccggaacatccagaaggaccggggcatctccatccccggctgccccatcggcatcgactccgactccgaggccggcggctcccgggactactcctgcggcaagatgaagaagcagcacccctccatcgcctgcatcgacgacgacgagtacacccggtacgtgaagggcgtgctgctggacgccgagttcgagtacaagaagctggccgccatggacaaggagcaccccgaccactccaagtacaaggacgacaagttcatcgccgtgtgcaaggacctggacaacgtgaagcggatcctgggcgccggcggcggctccggcaagcggaccgccgacggctccggcggcggctcccccaagaagaagcggaaggtg

SEQ ID NO: 1152 - protein, 2258 aa, synthetic construct
  REGION 1..2258: note = Synthetic
MDKKYSIGLDIGTNSVGWAVITDEYKVPSKKFKVLGNTDRHSIKKNLIGALLFDSGETAEATRLKRTARRRYTRRKNRICYLQEIFSNEMAKVDDSFFHRLEESFLVEEDKKHERHPIFGNIVDEVAYHEKYPTIYHLRKKLVDSTDKADLRLIYLALAHMIKFRGHFLIEGDLNPDNSDVDKLFIQLVQTYNQLFEENPINASGVDAKAILSARLSKSRRLENLIAQLPGEKKNGLFGNLIALSLGLTPNFKSNFDLAEDAKLQLSKDTYDDDLDNLLAQIGDQYADLFLAAKNLSDAILLSDILRVNTEITKAPLSASMIKRYDEHHQDLTLLKALVRQQLPEKYKEIFFDQSKNGYAGYIDGGASQEEFYKFIKPILEKMDGTEELLVKLNREDLLRKQRTFDNGSIPHQIHLGELHAILRRQEDFYPFLKDNREKIEKILTFRIPYYVGPLARGNSRFAWMTRKSEETITPWNFEEVVDKGASAQSFIERMTNFDKNLPNEKVLPKHSLLYEYFTVYNELTKVKYVTEGMRKPAFLSGEQKKAIVDLLFKTNRKVTVKQLKEDYFKKIECFDSVEISGVEDRFNASLGTYHDLLKIIKDKDFLDNEENEDILEDIVLTLTLFEDREMIEERLKTYAHLFDDKVMKQLKRRRYTGWGRLSRKLINGIRDKQSGKTILDFLKSDGFANRNFMQLIHDDSLTFKEDIQKAQVSGQGDSLHEHIANLAGSPAIKKGILQTVKVVDELVKVMGRHKPENIVIEMARENQTTQKGQKNSRERMKRIEEGIKELGSQILKEHPVENTQLQNEKLYLYYLQNGRDMYVDQELDINRLSDYDVDAIVPQSFLKDDSIDNKVLTRSDKNRGKSDNVPSEEVVKKMKNYWRQLLNAKLITQRKFDNLTKAERGGLSELDKAGFIKRQLVETRQITKHVAQILDSRMNTKYDENDKLIREVKVITLKSKLVSDFRKDFQFYKVREINNYHHAHDAYLNAVVGTALIKKYPKLESEFVYGDYKVYDVRKMIAKSEQEIGKATAKYFFYSNIMNFFKTEITLANGEIRKRPLIETNGETGEIVWDKGRDFATVRKVLSMPQVNIVKKTEVQTGGFSKESILPKRNSDKLIARKKDWDPKKYGGFDSPTVAYSVLVVAKVEKGKSKKLKSVKELLGITIMERSSFEKNPIDFLEAKGYKEVKKDLIIKLPKYSLFELENGRKRMLASAGELQKGNELALPSKYVNFLYLASHYEKLKGSPEDNEQKQLFVEQHKHYLDEIIEQISEFSKRVILADANLDKVLSAYNKHRDKPIREQAENIIHLFTLTNLGAPAAFKYFDTTIDRKRYTSTKEVLDATLIHQSITGLYETRIDLSQLGGDGAPESATESGGTSTESEGSAGTSTESEGSAGSAGSTSGSSSGMCNEKLSGRLLKKHITIGTPENPFDPNDYDFVILVGAEPFLYFAGKKGIGDYTGKRVEYNGYANWIASISPAQLHFKPEMKPVFDATVENIHDIINGREKIAKAGDYRPITDPDEAEEYIKMVYNMVIGPVAFASATSALYCRDGYLLGVSISHQEYQGVYIDSDCLTEVAVYYLQKILDSENHTIVFHNLKFDMHFYKYHLGLTFDKAHKERRLHDTMLQHYVLDERRGTHGLKSLAMKYTDMGDYDFELDKFKDDYCKAHKIKKEDFTYDLIPFDIMWPYAAKDTDATIRLHNFFLPKIEKNEKLCSLYYDVLMPGCVFLQRVEDRGVPISIDRLKEAQYQLTHNLNKAREKLYTYPEVKQLEQDQNEAFNPNSVKQLRVLLFDYVGLTPTGKLTDTGADSTDAEALNELATQHPIAKTLLEIRKLTKLISTYVEKILLSIDADGCIRTGFHEHMTTSGRLSSSGKLNLQQLPRDESIIKGCVVAPPGYRVIAWDLTTAEVYYAAVLSGDRNMQQVFINMRNEPDKYPDFHSNIAHMVFKLQCEPRDVKKLFPALRQAAKAITFGILYGSGPAKVAHSVNEALLEQAAKTGEPFVECTVADAKEYIETYFGQFPQLKRWIDKCHDQIKNHGFIYSHFGRKRRLHNIHSEDRGVQGEEIRSGFNAIIQSASSDSLLLGAVDADNEIISLGLEQEMKIVMLVHDSVVAIVREDLIDQYNEILIRNIQKDRGISIPGCPIGIDSDSEAGGSRDYSCGKMKKQHPSIACIDDDEYTRYVKGVLLDAEFEYKKLAAMDKEHPDHSKYKDDKFIAVCKDLDNVKRILGAGGGSGKRTADGSGGGSPKKKRKV

SEQ ID NO: 1153 - RNA, 7411 nt, synthetic construct
  misc_feature 1..7411: note = Synthetic
  source 1..7411: mol_type = other RNA
gggaagctcagaataaacgctcaactttggccggatctgccaccatggacaagaagtactccatcggcctggacatcggcaccaactccgtgggctgggccgtgatcaccgacgagtacaaggtgccctccaagaagttcaaggtgctgggcaacaccgaccggcactccatcaagaagaacctgatcggcgccctgctgttcgactccggcgagaccgccgaggccacccggctgaagcggaccgcccggcggcggtacacccggcggaagaaccggatctgctacctgcaggagatcttctccaacgagatggccaaggtggacgactccttcttccaccggctggaggagtccttcctggtggaggaggacaagaagcacgagcggcaccccatcttcggcaacatcgtggacgaggtggcctaccacgagaagtaccccaccatctaccacctgcggaagaagctggtggactccaccgacaaggccgacctgcggctgatctacctggccctggcccacatgatcaagttccggggccacttcctgatcgagggcgacctgaaccccgacaactccgacgtggacaagctgttcatccagctggtgcagacctacaaccagctgttcgaggagaaccccatcaacgcctccggcgtggacgccaaggccatcctgtccgcccggctgtccaagtcccggcggctggagaacctgatcgcccagctgcccggcgagaagaagaacggcctgttcggcaacctgatcgccctgtccctgggcctgacccccaacttcaagtccaacttcgacctggccgaggacgccaagctgcagctgtccaaggacacctacgacgacgacctggacaacctgctggcccagatcggcgaccagtacgccgacctgttcctggccgccaagaacctgtccgacgccatcctgctgtccgacatcctgcgggtgaacaccgagatcaccaaggcccccctgtccgcctccatgatcaagcggtacgacgagcaccaccaggacctgaccctgctgaaggccctggtgcggcagcagctgcccgagaagtacaaggagatcttcttcgaccagtccaagaacggctacgccggctacatcgacggcggcgcctcccaggaggagttctacaagttcatcaagcccatcctggagaagatggacggcaccgaggagctgctggtgaagctgaaccgggaggacctgctgcggaagcagcggaccttcgacaacggctccatcccccaccagatccacctgggcgagctgcacgccatcctgcggcggcaggaggacttctaccccttcctgaaggacaaccgggagaagatcgagaagatcctgaccttccggatcccctactacgtgggccccctggcccggggcaactcccggttcgcctggatgacccggaagtccgaggagaccatcaccccctggaacttcgaggaggtggtggacaagggcgcctccgcccagtccttcatcgagcggatgaccaacttcgacaagaacctgcccaacgagaaggtgctgcccaagcactccctgctgtacgagtacttcaccgtgtacaacgagctgaccaaggtgaagtacgtgaccgagggcatgcggaagcccgccttcctgtccggcgagcagaagaaggccatcgtggacctgctgttcaagaccaaccggaaggtgaccgtgaagcagctgaaggaggactacttcaagaagatcgagtgcttcgactccgtggagatctccggcgtggaggaccggttcaacgcctccctgggcacctaccacgacctgctgaagatcatcaaggacaaggacttcctggacaacgaggagaacgaggacatcctggaggacatcgtgctgaccctgaccctgttcgaggaccgggagatgatcgaggagcggctgaagacctacgcccacctgttcgacgacaaggtgatgaagcagctgaagcggcggcggtacaccggctggggccggctgtcccggaagctgatcaacggcatccgggacaagcagtccggcaagaccatcctggacttcctgaagtccgacggcttcgccaaccggaacttcatgcagctgatccacgacgactccctgaccttcaaggaggacatccagaaggcccaggtgtccggccagggcgactccctgcacgagcacatcgccaacctggccggctcccccgccatcaagaagggcatcctgcagaccgtgaaggtggtggacgagctggtgaaggtgatgggccggcacaagcccgagaacatcgtgatcgagatggcccgggagaaccagaccacccagaagggccagaagaactcccgggagcggatgaagcggatcgaggagggcatcaaggagctgggctcccagatcctgaaggagcaccccgtggagaacacccagctgcagaacgagaagctgtacctgtactacctgcagaacggccgggacatgtacgtggaccaggagctggacatcaaccggctgtccgactacgacgtggacgccatcgtgccccagtccttcctgaaggacgactccatcgacaacaaggtgctgacccggtccgacaagaaccggggcaagtccgacaacgtgccctccgaggaggtggtgaagaagatgaagaactactggcggcagctgctgaacgccaagctgatcacccagcggaagttcgacaacctgaccaaggccgagcggggcggcctgtccgagctggacaaggccggcttcatcaagcggcagctggtggagacccggcagatcaccaagcacgtggcccagatcctggactcccggatgaacaccaagtacgacgagaacgacaagctgatccgggaggtgaaggtgatcaccctgaagtccaagctggtgtccgacttccggaaggacttccagttctacaaggtgcgggagatcaacaactaccaccacgcccacgacgcctacctgaacgccgtggtgggcaccgccctgatcaagaagtaccccaagctggagtccgagttcgtgtacggcgactacaaggtgtacgacgtgcggaagatgatcgccaagtccgagcaggagatcggcaaggccaccgccaagtacttcttctactccaacatcatgaacttcttcaagaccgagatcaccctggccaacggcgagatccggaagcggcccctgatcgagaccaacggcgagaccggcgagatcgtgtgggacaagggccgggacttcgccaccgtgcggaaggtgctgtccatgccccaggtgaacatcgtgaagaagaccgaggtgcagaccggcggcttctccaaggagtccatcctgcccaagcggaactccgacaagctgatcgcccggaagaaggactgggaccccaagaagtacggcggcttcgactcccccaccgtggcctactccgtgctggtggtggccaaggtggagaagggcaagtccaagaagctgaagtccgtgaaggagctgctgggcatcaccatcatggagcggtcctccttcgagaagaaccccatcgacttcctggaggccaagggctacaaggaggtgaagaaggacctgatcatcaagctgcccaagtactccctgttcgagctggagaacggccggaagcggatgctggcctccgccggcgagctgcagaagggcaacgagctggccctgccctccaagtacgtgaacttcctgtacctggcctcccactacgagaagctgaagggctcccccgaggacaacgagcagaagcagctgttcgtggagcagcacaagcactacctggacgagatcatcgagcagatctccgagttctccaagcgggtgatcctggccgacgccaacctggacaaggtgctgtccgcctacaacaagcaccgggacaagcccatccgggagcaggccgagaacatcatccacctgttcaccctgaccaacctgggcgcccccgccgccttcaagtacttcgacaccaccatcgaccggaagcggtacacctccaccaaggaggtgctggacgccaccctgatccaccagtccatcaccggcctgtacgagacccggatcgacctgtcccagctgggcggcgacggcgcccccgagtccgccaccgagtccggcggcacctccaccgagtccgagggctccgccggcacctccaccgagtccgagggctccgccggctccgccggctccacctccggctcctcctccggcatgaagatcgccgtggtggacaaggccctgaacaacacccggtacgacaagcacttccagctgtacggcgaggaggtggacgtgttccacatgtgcaacgagaagctgtccggccggctgctgaagaagcacatcaccatcggcacccccgagaaccccttcgaccccaacgactacgacttcgtgatcctggtgggcgccgagcccttcctgtacttcgccggcaagaagggcatcggcgactacaccggcaagcgggtggagtacaacggctacgccaactggatcgcctccatctcccccgcccagctgcacttcaagcccgagatgaagcccgtgttcgacgccaccgtggagaacatccacgacatcatcaacggccgggagaagatcgccaaggccggcgactaccggcccatcaccgaccccgacgaggccgaggagtacatcaagatggtgtacaacatggtgatcggccccgtggccttcgcctccgccacctccgccctgtactgccgggacggctacctgctgggcgtgtccatctcccaccaggagtaccagggcgtgtacatcgactccgactgcctgaccgaggtggccgtgtactacctgcagaagatcctggactccgagaaccacaccatcgtgttccacaacctgaagttcgacatgcacttctacaagtaccacctgggcctgaccttcgacaaggcccacaaggagcggcggctgcacgacaccatgctgcagcactacgtgctggacgagcggcggggcacccacggcctgaagtccctggccatgaagtacaccgacatgggcgactacgacttcgagctggacaagttcaaggacgactactgcaaggcccacaagatcaagaaggaggacttcacctacgacctgatccccttcgacatcatgtggccctacgccgccaaggacaccgacgccaccatccggctgcacaacttcttcctgcccaagatcgagaagaacgagaagctgtgctccctgtactacgacgtgctgatgcccggctgcgtgttcctgcagcgggtggaggaccggggcgtgcccatctccatcgaccggctgaaggaggcccagtaccagctgacccacaacctgaacaaggcccgggagaagctgtacacctaccccgaggtgaagcagctggagcaggaccagaacgaggccttcaaccccaactccgtgaagcagctgcgggtgctgctgttcgactacgtgggcctgacccccaccggcaagctgaccgacaccggcgccgactccaccgacgccgaggccctgaacgagctggccacccagcaccccatcgccaagaccctgctggagatccggaagctgaccaagctgatctccacctacgtggagaagatcctgctgtccatcgacgccgacggctgcatccggaccggcttccacgagcacatgaccacctccggccggctgtcctcctccggcaagctgaacctgcagcagctgccccgggacgagtccatcatcaagggctgcgtggtggccccccccggctaccgggtgatcgcctgggacctgaccaccgccgaggtgtactacgccgccgtgctgtccggcgaccggaacatgcagcaggtgttcatcaacatgcggaacgagcccgacaagtaccccgacttccactccaacatcgcccacatggtgttcaagctgcagtgcgagccccgggacgtgaagaagctgttccccgccctgcggcaggccgccaaggccatcaccttcggcatcctgtacggctccggccccgccaaggtggcccactccgtgaacgaggccctgctggagcaggccgccaagaccggcgagcccttcgtggagtgcaccgtggccgacgccaaggagtacatcgagacctacttcggccagttcccccagctgaagcggtggatcgacaagtgccacgaccagatcaagaaccacggcttcatctactcccacttcggccggaagcggcggctgcacaacatccactccgaggaccggggcgtgcagggcgaggagatccggtccggcttcaacgccatcatccagtccgcctcctccgactccctgctgctgggcgccgtggacgccgacaacgagatcatctccctgggcctggagcaggagatgaagatcgtgatgctggtgcacgactccgtggtggccatcgtgcgggaggacctgatcgaccagtacaacgagatcctgatccggaacatccagaaggaccggggcatctccatccccggctgccccatcggcatcgactccgactccgaggccggcggctcccgggactactcctgcggcaagatgaagaagcagcacccctccatcgcctgcatcgacgacgacgagtacacccggtacgtgaagggcgtgctgctggacgccgagttcgagtacaagaagctggccgccatggacaaggagcaccccgaccacggcggcggctccggcaagcggaccgccgacggctccggcggcggctcccccaagaagaagcggaaggtgtccgagtccgccacccccgagtccgtgtccggctggcggctgttcaagaagatctcctagctagcaccagcctcaagaacacccgaatggagtctctaagctacataataccaacttacactttacaaaatgttgtcccccaaaatgtagccattcgtatctgctcctaataaaaagaaagtttcttcacattctctcgagaaaaaaaaaaaatggaaaaaaaaaaaacggaaaaaaaaaaaaggtaaaaaaaaaaaatataaaaaaaaaaaacataaaaaaaaaaaacgaaaaaaaaaaaacgtaaaaaaaaaaaactcaaaaaaaaaaaagataaaaaaaaaaaacctaaaaaaaaaaaatgtaaaaaaaaaaaagggaaaaaaaaaaaacgcaaaaaaaaaaaacacaaaaaaaaaaaatgcaaaaaaaaaaaatcgaaaaaaaaaaaatctaaaaaaaaaaaacgaaaaaaaaaaaacccaaaaaaaaaaaagacaaaaaaaaaaaatagaaaaaaaaaaagttaaaaaaaaaaaactgaaaaaaaaaaaatttaaaaaaaaaaaatctag

SEQ ID NO: 1154 - RNA, 6852 nt, synthetic construct
  misc_feature 1..6852: note = Synthetic
  source 1..6852: mol_type = other RNA
atggacaagaagtactccatcggcctggacatcggcaccaactccgtgggctgggccgtgatcaccgacgagtacaaggtgccctccaagaagttcaaggtgctgggcaacaccgaccggcactccatcaagaagaacctgatcggcgccctgctgttcgactccggcgagaccgccgaggccacccggctgaagcggaccgcccggcggcggtacacccggcggaagaaccggatctgctacctgcaggagatcttctccaacgagatggccaaggtggacgactccttcttccaccggctggaggagtccttcctggtggaggaggacaagaagcacgagcggcaccccatcttcggcaacatcgtggacgaggtggcctaccacgagaagtaccccaccatctaccacctgcggaagaagctggtggactccaccgacaaggccgacctgcggctgatctacctggccctggcccacatgatcaagttccggggccacttcctgatcgagggcgacctgaaccccgacaactccgacgtggacaagctgttcatccagctggtgcagacctacaaccagctgttcgaggagaaccccatcaacgcctccggcgtggacgccaaggccatcctgtccgcccggctgtccaagtcccggcggctggagaacctgatcgcccagctgcccggcgagaagaagaacggcctgttcggcaacctgatcgccctgtccctgggcctgacccccaacttcaagtccaacttcgacctggccgaggacgccaagctgcagctgtccaaggacacctacgacgacgacctggacaacctgctggcccagatcggcgaccagtacgccgacctgttcctggccgccaagaacctgtccgacgccatcctgctgtccgacatcctgcgggtgaacaccgagatcaccaaggcccccctgtccgcctccatgatcaagcggtacgacgagcaccaccaggacctgaccctgctgaaggccctggtgcggcagcagctgcccgagaagtacaaggagatcttcttcgaccagtccaagaacggctacgccggctacatcgacggcggcgcctcccaggaggagttctacaagttcatcaagcccatcctggagaagatggacggcaccgaggagctgctggtgaagctgaaccgggaggacctgctgcggaagcagcggaccttcgacaacggctccatcccccaccagatccacctgggcgagctgcacgccatcctgcggcggcaggaggacttctaccccttcctgaaggacaaccgggagaagatcgagaagatcctgaccttccggatcccctactacgtgggccccctggcccggggcaactcccggttcgcctggatgacccggaagtccgaggagaccatcaccccctggaacttcgaggaggtggtggacaagggcgcctccgcccagtccttcatcgagcggatgaccaacttcgacaagaacctgcccaacgagaaggtgctgcccaagcactccctgctgtacgagtacttcaccgtgtacaacgagctgaccaaggtgaagtacgtgaccgagggcatgcggaagcccgccttcctgtccggcgagcagaagaaggccatcgtggacctgctgttcaagaccaaccggaaggtgaccgtgaagcagctgaaggaggactacttcaagaagatcgagtgcttcgactccgtggagatctccggcgtggaggaccggttcaacgcctccctgggcacctaccacgacctgctgaagatcatcaaggacaaggacttcctggacaacgaggagaacgaggacatcctggaggacatcgtgctgaccctgaccctgttcgaggaccgggagatgatcgaggagcggctgaagacctacgcccacctgttcgacgacaaggtgatgaagcagctgaagcggcggcggtacaccggctggggccggctgtcccggaagctgatcaacggcatccgggacaagcagtccggcaagaccatcctggacttcctgaagtccgacggcttcgccaaccggaacttcatgcagctgatccacgacgactccctgaccttcaaggaggacatccagaaggcccaggtgtccggccagggcgactccctgcacgagcacatcgccaacctggccggctcccccgccatcaagaagggcatcctgcagaccgtgaaggtggtggacgagctggtgaaggtgatgggccggcacaagcccgagaacatcgtgatcgagatggcccgggagaaccagaccacccagaagggccagaagaactcccgggagcggatgaagcggatcgaggagggcatcaaggagctgggctcccagatcctgaaggagcaccccgtggagaacacccagctgcagaacgagaagctgtacctgtactacctgcagaacggccgggacatgtacgtggaccaggagctggacatcaaccggctgtccgactacgacgtggacgccatcgtgccccagtccttcctgaaggacgactccatcgacaacaaggtgctgacccggtccgacaagaaccggggcaagtccgacaacgtgccctccgaggaggtggtgaagaagatgaagaactactggcggcagctgctgaacgccaagctgatcacccagcggaagttcgacaacctgaccaaggccgagcggggcggcctgtccgagctggacaaggccggcttcatcaagcggcagctggtggagacccggcagatcaccaagcacgtggcccagatcctggactcccggatgaacaccaagtacgacgagaacgacaagctgatccgggaggtgaaggtgatcaccctgaagtccaagctggtgtccgacttccggaaggacttccagttctacaaggtgcgggagatcaacaactaccaccacgcccacgacgcctacctgaacgccgtggtgggcaccgccctgatcaagaagtaccccaagctggagtccgagttcgtgtacggcgactacaaggtgtacgacgtgcggaagatgatcgccaagtccgagcaggagatcggcaaggccaccgccaagtacttcttctactccaacatcatgaacttcttcaagaccgagatcaccctggccaacggcgagatccggaagcggcccctgatcgagaccaacggcgagaccggcgagatcgtgtgggacaagggccgggacttcgccaccgtgcggaaggtgctgtccatgccccaggtgaacatcgtgaagaagaccgaggtgcagaccggcggcttctccaaggagtccatcctgcccaagcggaactccgacaagctgatcgcccggaagaaggactgggaccccaagaagtacggcggcttcgactcccccaccgtggcctactccgtgctggtggtggccaaggtggagaagggcaagtccaagaagctgaagtccgtgaaggagctgctgggcatcaccatcatggagcggtcctccttcgagaagaaccccatcgacttcctggaggccaagggctacaaggaggtgaagaaggacctgatcatcaagctgcccaagtactccctgttcgagctggagaacggccggaagcggatgctggcctccgccggcgagctgcagaagggcaacgagctggccctgccctccaagtacgtgaacttcctgtacctggcctcccactacgagaagctgaagggctcccccgaggacaacgagcagaagcagctgttcgtggagcagcacaagcactacctggacgagatcatcgagcagatctccgagttctccaagcgggtgatcctggccgacgccaacctggacaaggtgctgtccgcctacaacaagcaccgggacaagcccatccgggagcaggccgagaacatcatccacctgttcaccctgaccaacctgggcgcccccgccgccttcaagtacttcgacaccaccatcgaccggaagcggtacacctccaccaaggaggtgctggacgccaccctgatccaccagtccatcaccggcctgtacgagacccggatcgacctgtcccagctgggcggcgacggcgcccccgagtccgccaccgagtccggcggcacctccaccgagtccgagggctccgccggcacctccaccgagtccgagggctccgccggctccgccggctccacctccggctcctcctccggcatgaagatcgccgtggtggacaaggccctgaacaacacccggtacgacaagcacttccagctgtacggcgaggaggtggacgtgttccacatgtgcaacgagaagctgtccggccggctgctgaagaagcacatcaccatcggcacccccgagaaccccttcgaccccaacgactacgacttcgtgatcctggtgggcgccgagcccttcctgtacttcgccggcaagaagggcatcggcgactacaccggcaagcgggtggagtacaacggctacgccaactggatcgcctccatctcccccgcccagctgcacttcaagcccgagatgaagcccgtgttcgacgccaccgtggagaacatccacgacatcatcaacggccgggagaagatcgccaaggccggcgactaccggcccatcaccgaccccgacgaggccgaggagtacatcaagatggtgtacaacatggtgatcggccccgtggccttcgcctccgccacctccgccctgtactgccgggacggctacctgctgggcgtgtccatctcccaccaggagtaccagggcgtgtacatcgactccgactgcctgaccgaggtggccgtgtactacctgcagaagatcctggactccgagaaccacaccatcgtgttccacaacctgaagttcgacatgcacttctacaagtaccacctgggcctgaccttcgacaaggcccacaaggagcggcggctgcacgacaccatgctgcagcactacgtgctggacgagcggcggggcacccacggcctgaagtccctggccatgaagtacaccgacatgggcgactacgacttcgagctggacaagttcaaggacgactactgcaaggcccacaagatcaagaaggaggacttcacctacgacctgatccccttcgacatcatgtggccctacgccgccaaggacaccgacgccaccatccggctgcacaacttcttcctgcccaagatcgagaagaacgagaagctgtgctccctgtactacgacgtgctgatgcccggctgcgtgttcctgcagcgggtggaggaccggggcgtgcccatctccatcgaccggctgaaggaggcccagtaccagctgacccacaacctgaacaaggcccgggagaagctgtacacctaccccgaggtgaagcagctggagcaggaccagaacgaggccttcaaccccaactccgtgaagcagctgcgggtgctgctgttcgactacgtgggcctgacccccaccggcaagctgaccgacaccggcgccgactccaccgacgccgaggccctgaacgagctggccacccagcaccccatcgccaagaccctgctggagatccggaagctgaccaagctgatctccacctacgtggagaagatcctgctgtccatcgacgccgacggctgcatccggaccggcttccacgagcacatgaccacctccggccggctgtcctcctccggcaagctgaacctgcagcagctgccccgggacgagtccatcatcaagggctgcgtggtggccccccccggctaccgggtgatcgcctgggacctgaccaccgccgaggtgtactacgccgccgtgctgtccggcgaccggaacatgcagcaggtgttcatcaacatgcggaacgagcccgacaagtaccccgacttccactccaacatcgcccacatggtgttcaagctgcagtgcgagccccgggacgtgaagaagctgttccccgccctgcggcaggccgccaaggccatcaccttcggcatcctgtacggctccggccccgccaaggtggcccactccgtgaacgaggccctgctggagcaggccgccaagaccggcgagcccttcgtggagtgcaccgtggccgacgccaaggagtacatcgagacctacttcggccagttcccccagctgaagcggtggatcgacaagtgccacgaccagatcaagaaccacggcttcatctactcccacttcggccggaagcggcggctgcacaacatccactccgaggaccggggcgtgcagggcgaggagatccggtccggcttcaacgccatcatccagtccgcctcctccgactccctgctgctgggcgccgtggacgccgacaacgagatcatctccctgggcctggagcaggagatgaagatcgtgatgctggtgcacgactccgtggtggccatcgtgcgggaggacctgatcgaccagtacaacgagatcctgatccggaacatccagaaggaccggggcatctccatccccggctgccccatcggcatcgactccgactccgaggccggcggctcccgggactactcctgcggcaagatgaagaagcagcacccctccatcgcctgcatcgacgacgacgagtacacccggtacgtgaagggcgtgctgctggacgccgagttcgagtacaagaagctggccgccatggacaaggagcaccccgaccacggcggcggctccggcaagcggaccgccgacggctccggcggcggctcccccaagaagaagcggaaggtgtccgagtccgccacccccgagtccgtgtccggctggcggctgttcaagaagatctcctag

SEQ ID NO: 1155 - protein, 2283 aa, synthetic construct
  REGION 1..2283: note = Synthetic
MDKKYSIGLDIGTNSVGWAVITDEYKVPSKKFKVLGNTDRHSIKKNLIGALLFDSGETAEATRLKRTARRRYTRRKNRICYLQEIFSNEMAKVDDSFFHRLEESFLVEEDKKHERHPIFGNIVDEVAYHEKYPTIYHLRKKLVDSTDKADLRLIYLALAHMIKFRGHFLIEGDLNPDNSDVDKLFIQLVQTYNQLFEENPINASGVDAKAILSARLSKSRRLENLIAQLPGEKKNGLFGNLIALSLGLTPNFKSNFDLAEDAKLQLSKDTYDDDLDNLLAQIGDQYADLFLAAKNLSDAILLSDILRVNTEITKAPLSASMIKRYDEHHQDLTLLKALVRQQLPEKYKEIFFDQSKNGYAGYIDGGASQEEFYKFIKPILEKMDGTEELLVKLNREDLLRKQRTFDNGSIPHQIHLGELHAILRRQEDFYPFLKDNREKIEKILTFRIPYYVGPLARGNSRFAWMTRKSEETITPWNFEEVVDKGASAQSFIERMTNFDKNLPNEKVLPKHSLLYEYFTVYNELTKVKYVTEGMRKPAFLSGEQKKAIVDLLFKTNRKVTVKQLKEDYFKKIECFDSVEISGVEDRFNASLGTYHDLLKIIKDKDFLDNEENEDILEDIVLTLTLFEDREMIEERLKTYAHLFDDKVMKQLKRRRYTGWGRLSRKLINGIRDKQSGKTILDFLKSDGFANRNFMQLIHDDSLTFKEDIQKAQVSGQGDSLHEHIANLAGSPAIKKGILQTVKVVDELVKVMGRHKPENIVIEMARENQTTQKGQKNSRERMKRIEEGIKELGSQILKEHPVENTQLQNEKLYLYYLQNGRDMYVDQELDINRLSDYDVDAIVPQSFLKDDSIDNKVLTRSDKNRGKSDNVPSEEVVKKMKNYWRQLLNAKLITQRKFDNLTKAERGGLSELDKAGFIKRQLVETRQITKHVAQILDSRMNTKYDENDKLIREVKVITLKSKLVSDFRKDFQFYKVREINNYHHAHDAYLNAVVGTALIKKYPKLESEFVYGDYKVYDVRKMIAKSEQEIGKATAKYFFYSNIMNFFKTEITLANGEIRKRPLIETNGETGEIVWDKGRDFATVRKVLSMPQVNIVKKTEVQTGGFSKESILPKRNSDKLIARKKDWDPKKYGGFDSPTVAYSVLVVAKVEKGKSKKLKSVKELLGITIMERSSFEKNPIDFLEAKGYKEVKKDLIIKLPKYSLFELENGRKRMLASAGELQKGNELALPSKYVNFLYLASHYEKLKGSPEDNEQKQLFVEQHKHYLDEIIEQISEFSKRVILADANLDKVLSAYNKHRDKPIREQAENIIHLFTLTNLGAPAAFKYFDTTIDRKRYTSTKEVLDATLIHQSITGLYETRIDLSQLGGDGAPESATESGGTSTESEGSAGTSTESEGSAGSAGSTSGSSSGMKIAVVDKALNNTRYDKHFQLYGEEVDVFHMCNEKLSGRLLKKHITIGTPENPFDPNDYDFVILVGAEPFLYFAGKKGIGDYTGKRVEYNGYANWIASISPAQLHFKPEMKPVFDATVENIHDIINGREKIAKAGDYRPITDPDEAEEYIKMVYNMVIGPVAFASATSALYCRDGYLLGVSISHQEYQGVYIDSDCLTEVAVYYLQKILDSENHTIVFHNLKFDMHFYKYHLGLTFDKAHKERRLHDTMLQHYVLDERRGTHGLKSLAMKYTDMGDYDFELDKFKDDYCKAHKIKKEDFTYDLIPFDIMWPYAAKDTDATIRLHNFFLPKIEKNEKLCSLYYDVLMPGCVFLQRVEDRGVPISIDRLKEAQYQLTHNLNKAREKLYTYPEVKQLEQDQNEAFNPNSVKQLRVLLFDYVGLTPTGKLTDTGADSTDAEALNELATQHPIAKTLLEIRKLTKLISTYVEKILLSIDADGCIRTGFHEHMTTSGRLSSSGKLNLQQLPRDESIIKGCVVAPPGYRVIAWDLTTAEVYYAAVLSGDRNMQQVFINMRNEPDKYPDFHSNIAHMVFKLQCEPRDVKKLFPALRQAAKAITFGILYGSGPAKVAHSVNEALLEQAAKTGEPFVECTVADAKEYIETYFGQFPQLKRWIDKCHDQIKNHGFIYSHFGRKRRLHNIHSEDRGVQGEEIRSGFNAIIQSASSDSLLLGAVDADNEIISLGLEQEMKIVMLVHDSVVAIVREDLIDQYNEILIRNIQKDRGISIPGCPIGIDSDSEAGGSRDYSCGKMKKQHPSIACIDDDEYTRYVKGVLLDAEFEYKKLAAMDKEHPDHGGGSGKRTADGSGGGSPKKKRKVSESATPESVSGWRLFKKIS

SEQ ID NO: 1156 - RNA, 6792 nt, synthetic construct
  misc_feature 1..6792: note = Synthetic
  source 1..6792: mol_type = other RNA
atggacaagaagtactccatcggcctggacatcggcaccaactccgtgggctgggccgtgatcaccgacgagtacaaggtgccctccaagaagttcaaggtgctgggcaacaccgaccggcactccatcaagaagaacctgatcggcgccctgctgttcgactccggcgagaccgccgaggccacccggctgaagcggaccgcccggcggcggtacacccggcggaagaaccggatctgctacctgcaggagatcttctccaacgagatggccaaggtggacgactccttcttccaccggctggaggagtccttcctggtggaggaggacaagaagcacgagcggcaccccatcttcggcaacatcgtggacgaggtggcctaccacgagaagtaccccaccatctaccacctgcggaagaagctggtggactccaccgacaaggccgacctgcggctgatctacctggccctggcccacatgatcaagttccggggccacttcctgatcgagggcgacctgaaccccgacaactccgacgtggacaagctgttcatccagctggtgcagacctacaaccagctgttcgaggagaaccccatcaacgcctccggcgtggacgccaaggccatcctgtccgcccggctgtccaagtcccggcggctggagaacctgatcgcccagctgcccggcgagaagaagaacggcctgttcggcaacctgatcgccctgtccctgggcctgacccccaacttcaagtccaacttcgacctggccgaggacgccaagctgcagctgtccaaggacacctacgacgacgacctggacaacctgctggcccagatcggcgaccagtacgccgacctgttcctggccgccaagaacctgtccgacgccatcctgctgtccgacatcctgcgggtgaacaccgagatcaccaaggcccccctgtccgcctccatgatcaagcggtacgacgagcaccaccaggacctgaccctgctgaaggccctggtgcggcagcagctgcccgagaagtacaaggagatcttcttcgaccagtccaagaacggctacgccggctacatcgacggcggcgcctcccaggaggagttctacaagttcatcaagcccatcctggagaagatggacggcaccgaggagctgctggtgaagctgaaccgggaggacctgctgcggaagcagcggaccttcgacaacggctccatcccccaccagatccacctgggcgagctgcacgccatcctgcggcggcaggaggacttctaccccttcctgaaggacaaccgggagaagatcgagaagatcctgaccttccggatcccctactacgtgggccccctggcccggggcaactcccggttcgcctggatgacccggaagtccgaggagaccatcaccccctggaacttcgaggaggtggtggacaagggcgcctccgcccagtccttcatcgagcggatgaccaacttcgacaagaacctgcccaacgagaaggtgctgcccaagcactccctgctgtacgagtacttcaccgtgtacaacgagctgaccaaggtgaagtacgtgaccgagggcatgcggaagcccgccttcctgtccggcgagcagaagaaggccatcgtggacctgctgttcaagaccaaccggaaggtgaccgtgaagcagctgaaggaggactacttcaagaagatcgagtgcttcgactccgtggagatctccggcgtggaggaccggttcaacgcctccctgggcacctaccacgacctgctgaagatcatcaaggacaaggacttcctggacaacgaggagaacgaggacatcctggaggacatcgtgctgaccctgaccctgttcgaggaccgggagatgatcgaggagcggctgaagacctacgcccacctgttcgacgacaaggtgatgaagcagctgaagcggcggcggtacaccggctggggccggctgtcccggaagctgatcaacggcatccgggacaagcagtccggcaagaccatcctggacttcctgaagtccgacggcttcgccaaccggaacttcatgcagctgatccacgacgactccctgaccttcaaggaggacatccagaaggcccaggtgtccggccagggcgactccctgcacgagcacatcgccaacctggccggctcccccgccatcaagaagggcatcctgcagaccgtgaaggtggtggacgagctggtgaaggtgatgggccggcacaagcccgagaacatcgtgatcgagatggcccgggagaaccagaccacccagaagggccagaagaactcccgggagcggatgaagcggatcgaggagggcatcaaggagctgggctcccagatcctgaaggagcaccccgtggagaacacccagctgcagaacgagaagctgtacctgtactacctgcagaacggccgggacatgtacgtggaccaggagctggacatcaaccggctgtccgactacgacgtggacgccatcgtgccccagtccttcctgaaggacgactccatcgacaacaaggtgctgacccggtccgacaagaaccggggcaagtccgacaacgtgccctccgaggaggtggtgaagaagatgaagaactactggcggcagctgctgaacgccaagctgatcacccagcggaagttcgacaacctgaccaaggccgagcggggcggcctgtccgagctggacaaggccggcttcatcaagcggcagctggtggagacccggcagatcaccaagcacgtggcccagatcctggactcccggatgaacaccaagtacgacgagaacgacaagctgatccgggaggtgaaggtgatcaccctgaagtccaagctggtgtccgacttccggaaggacttccagttctacaaggtgcgggagatcaacaactaccaccacgcccacgacgcctacctgaacgccgtggtgggcaccgccctgatcaagaagtaccccaagctggagtccgagttcgtgtacggcgactacaaggtgtacgacgtgcggaagatgatcgccaagtccgagcaggagatcggcaaggccaccgccaagtacttcttctactccaacatcatgaacttcttcaagaccgagatcaccctggccaacggcgagatccggaagcggcccctgatcgagaccaacggcgagaccggcgagatcgtgtgggacaagggccgggacttcgccaccgtgcggaaggtgctgtccatgccccaggtgaacatcgtgaagaagaccgaggtgcagaccggcggcttctccaaggagtccatcctgcccaagcggaactccgacaagctgatcgcccggaagaaggactgggaccccaagaagtacggcggcttcgactcccccaccgtggcctactccgtgctggtggtggccaaggtggagaagggcaagtccaagaagctgaagtccgtgaaggagctgctgggcatcaccatcatggagcggtcctccttcgagaagaaccccatcgacttcctggaggccaagggctacaaggaggtgaagaaggacctgatcatcaagctgcccaagtactccctgttcgagctggagaacggccggaagcggatgctggcctccgccggcgagctgcagaagggcaacgagctggccctgccctccaagtacgtgaacttcctgtacctggcctcccactacgagaagctgaagggctcccccgaggacaacgagcagaagcagctgttcgtggagcagcacaagcactacctggacgagatcatcgagcagatctccgagttctccaagcgggtgatcctggccgacgccaacctggacaaggtgctgtccgcctacaacaagcaccgggacaagcccatccgggagcaggccgagaacatcatccacctgttcaccctgaccaacctgggcgcccccgccgccttcaagtacttcgacaccaccatcgaccggaagcggtacacctccaccaaggaggtgctggacgccaccctgatccaccagtccatcaccggcctgtacgagacccggatcgacctgtcccagctgggcggcgacggcgcccccgagtccgccaccgagtccggcggcacctccaccgagtccgagggctccgccggcacctccaccgagtccgagggctccgccggctccgccggctccacctccggctcctcctccggcatgaagatcgccgtggtggacaaggccctgaacaacacccggtacgacaagcacttccagctgtacggcgaggaggtggacgtgttccacatgtgcaacgagaagctgtccggccggctgctgaagaagcacatcaccatcggcacccccgagaaccccttcgaccccaacgactacgacttcgtgatcctggtgggcgccgagcccttcctgtacttcgccggcaagaagggcatcggcgactacaccggcaagcgggtggagtacaacggctacgccaactggatcgcctccatctcccccgcccagctgcacttcaagcccgagatgaagcccgtgttcgacgccaccgtggagaacatccacgacatcatcaacggccgggagaagatcgccaaggccggcgactaccggcccatcaccgaccccgacgaggccgaggagtacatcaagatggtgtacaacatggtgatcggccccgtggccttcgcctccgccacctccgccctgtactgccgggacggctacctgctgggcgtgtccatctcccaccaggagtaccagggcgtgtacatcgactccgactgcctgaccgaggtggccgtgtactacctgcagaagatcctggactccgagaaccacaccatcgtgttccacaacctgaagttcgacatgcacttctacaagtaccacctgggcctgaccttcgacaaggcccacaaggagcggcggctgcacgacaccatgctgcagcactacgtgctggacgagcggcggggcacccacggcctgaagtccctggccatgaagtacaccgacatgggcgactacgacttcgagctggacaagttcaaggacgactactgcaaggcccacaagatcaagaaggaggacttcacctacgacctgatccccttcgacatcatgtggccctacgccgccaaggacaccgacgccaccatccggctgcacaacttcttcctgcccaagatcgagaagaacgagaagctgtgctccctgtactacgacgtgctgatgcccggctgcgtgttcctgcagcgggtggaggaccggggcgtgcccatctccatcgaccggctgaaggaggcccagtaccagctgacccacaacctgaacaaggcccgggagaagctgtacacctaccccgaggtgaagcagctggagcaggaccagaacgaggccttcaaccccaactccgtgaagcagctgcgggtgctgctgttcgactacgtgggcctgacccccaccggcaagctgaccgacaccggcgccgactccaccgacgccgaggccctgaacgagctggccacccagcaccccatcgccaagaccctgctggagatccggaagctgaccaagctgatctccacctacgtggagaagatcctgctgtccatcgacgccgacggctgcatccggaccggcttccacgagcacatgaccacctccggccggctgtcctcctccggcaagctgaacctgcagcagctgccccgggacgagtccatcatcaagggctgcgtggtggccccccccggctaccgggtgatcgcctgggacctgaccaccgccgaggtgtactacgccgccgtgctgtccggcgaccggaacatgcagcaggtgttcatcaacatgcggaacgagcccgacaagtaccccgacttccactccaacatcgcccacatggtgttcaagctgcagtgcgagccccgggacgtgaagaagctgttccccgccctgcggcaggccgccaaggccatcaccttcggcatcctgtacggctccggccccgccaaggtggcccactccgtgaacgaggccctgctggagcaggccgccaagaccggcgagcccttcgtggagtgcaccgtggccgacgccaaggagtacatcgagacctacttcggccagttcccccagctgaagcggtggatcgacaagtgccacgaccagatcaagaaccacggcttcatctactcccacttcggccggaagcggcggctgcacaacatccactccgaggaccggggcgtgcagggcgaggagatccggtccggcttcaacgccatcatccagtccgcctcctccgactccctgctgctgggcgccgtggacgccgacaacgagatcatctccctgggcctggagcaggagatgaagatcgtgatgctggtgcacgactccgtggtggccatcgtgcgggaggacctgatcgaccagtacaacgagatcctgatccggaacatccagaaggaccggggcatctccatccccggctgccccatcggcatcgactccgactccgaggccggcggctcccgggactactcctgcggcaagatgaagaagcagcacccctccatcgcctgcatcgacgacgacgagtacacccggtacgtgaagggcgtgctgctggacgccgagttcgagtacaagaagctggccgccatggacaaggagcaccccgaccacggcggcggctccggcaagcggaccgccgacggctccggcggcggctcccccaagaagaagcggaaggtg

SEQ ID NO: 1157 - protein, 2264 aa, synthetic construct
  REGION 1..2264: note = Synthetic
MDKKYSIGLDIGTNSVGWAVITDEYKVPSKKFKVLGNTDRHSIKKNLIGALLFDSGETAEATRLKRTARRRYTRRKNRICYLQEIFSNEMAKVDDSFFHRLEESFLVEEDKKHERHPIFGNIVDEVAYHEKYPTIYHLRKKLVDSTDKADLRLIYLALAHMIKFRGHFLIEGDLNPDNSDVDKLFIQLVQTYNQLFEENPINASGVDAKAILSARLSKSRRLENLIAQLPGEKKNGLFGNLIALSLGLTPNFKSNFDLAEDAKLQLSKDTYDDDLDNLLAQIGDQYADLFLAAKNLSDAILLSDILRVNTEITKAPLSASMIKRYDEHHQDLTLLKALVRQQLPEKYKEIFFDQSKNGYAGYIDGGASQEEFYKFIKPILEKMDGTEELLVKLNREDLLRKQRTFDNGSIPHQIHLGELHAILRRQEDFYPFLKDNREKIEKILTFRIPYYVGPLARGNSRFAWMTRKSEETITPWNFEEVVDKGASAQSFIERMTNFDKNLPNEKVLPKHSLLYEYFTVYNELTKVKYVTEGMRKPAFLSGEQKKAIVDLLFKTNRKVTVKQLKEDYFKKIECFDSVEISGVEDRFNASLGTYHDLLKIIKDKDFLDNEENEDILEDIVLTLTLFEDREMIEERLKTYAHLFDDKVMKQLKRRRYTGWGRLSRKLINGIRDKQSGKTILDFLKSDGFANRNFMQLIHDDSLTFKEDIQKAQVSGQGDSLHEHIANLAGSPAIKKGILQTVKVVDELVKVMGRHKPENIVIEMARENQTTQKGQKNSRERMKRIEEGIKELGSQILKEHPVENTQLQNEKLYLYYLQNGRDMYVDQELDINRLSDYDVDAIVPQSFLKDDSIDNKVLTRSDKNRGKSDNVPSEEVVKKMKNYWRQLLNAKLITQRKFDNLTKAERGGLSELDKAGFIKRQLVETRQITKHVAQILDSRMNTKYDENDKLIREVKVITLKSKLVSDFRKDFQFYKVREINNYHHAHDAYLNAVVGTALIKKYPKLESEFVYGDYKVYDVRKMIAKSEQEIGKATAKYFFYSNIMNFFKTEITLANGEIRKRPLIETNGETGEIVWDKGRDFATVRKVLSMPQVNIVKKTEVQTGGFSKESILPKRNSDKLIARKKDWDPKKYGGFDSPTVAYSVLVVAKVEKGKSKKLKSVKELLGITIMERSSFEKNPIDFLEAKGYKEVKKDLIIKLPKYSLFELENGRKRMLASAGELQKGNELALPSKYVNFLYLASHYEKLKGSPEDNEQKQLFVEQHKHYLDEIIEQISEFSKRVILADANLDKVLSAYNKHRDKPIREQAENIIHLFTLTNLGAPAAFKYFDTTIDRKRYTSTKEVLDATLIHQSITGLYETRIDLSQLGGDGAPESATESGGTSTESEGSAGTSTESEGSAGSAGSTSGSSSGMKIAVVDKALNNTRYDKHFQLYGEEVDVFHMCNEKLSGRLLKKHITIGTPENPFDPNDYDFVILVGAEPFLYFAGKKGIGDYTGKRVEYNGYANWIASISPAQLHFKPEMKPVFDATVENIHDIINGREKIAKAGDYRPITDPDEAEEYIKMVYNMVIGPVAFASATSALYCRDGYLLGVSISHQEYQGVYIDSDCLTEVAVYYLQKILDSENHTIVFHNLKFDMHFYKYHLGLTFDKAHKERRLHDTMLQHYVLDERRGTHGLKSLAMKYTDMGDYDFELDKFKDDYCKAHKIKKEDFTYDLIPFDIMWPYAAKDTDATIRLHNFFLPKIEKNEKLCSLYYDVLMPGCVFLQRVEDRGVPISIDRLKEAQYQLTHNLNKAREKLYTYPEVKQLEQDQNEAFNPNSVKQLRVLLFDYVGLTPTGKLTDTGADSTDAEALNELATQHPIAKTLLEIRKLTKLISTYVEKILLSIDADGCIRTGFHEHMTTSGRLSSSGKLNLQQLPRDESIIKGCVVAPPGYRVIAWDLTTAEVYYAAVLSGDRNMQQVFINMRNEPDKYPDFHSNIAHMVFKLQCEPRDVKKLFPALRQAAKAITFGILYGSGPAKVAHSVNEALLEQAAKTGEPFVECTVADAKEYIETYFGQFPQLKRWIDKCHDQIKNHGFIYSHFGRKRRLHNIHSEDRGVQGEEIRSGFNAIIQSASSDSLLLGAVDADNEIISLGLEQEMKIVMLVHDSVVAIVREDLIDQYNEILIRNIQKDRGISIPGCPIGIDSDSEAGGSRDYSCGKMKKQHPSIACIDDDEYTRYVKGVLLDAEFEYKKLAAMDKEHPDHGGGSGKRTADGSGGGSPKKKRKV

SEQ ID NO: 1158 - RNA, 7294 nt, synthetic construct
  misc_feature 1..7294: note = Synthetic
  source 1..7294: mol_type = other RNA
gggaagctcagaataaacgctcaactttggccggatctgccaccatggacaagaagtactccatcggcctggacatcggcaccaactccgtgggctgggccgtgatcaccgacgagtacaaggtgccctccaagaagttcaaggtgctgggcaacaccgaccggcactccatcaagaagaacctgatcggcgccctgctgttcgactccggcgagaccgccgaggccacccggctgaagcggaccgcccggcggcggtacacccggcggaagaaccggatctgctacctgcaggagatcttctccaacgagatggccaaggtggacgactccttcttccaccggctggaggagtccttcctggtggaggaggacaagaagcacgagcggcaccccatcttcggcaacatcgtggacgaggtggcctaccacgagaagtaccccaccatctaccacctgcggaagaagctggtggactccaccgacaaggccgacctgcggctgatctacctggccctggcccacatgatcaagttccggggccacttcctgatcgagggcgacctgaaccccgacaactccgacgtggacaagctgttcatccagctggtgcagacctacaaccagctgttcgaggagaaccccatcaacgcctccggcgtggacgccaaggccatcctgtccgcccggctgtccaagtcccggcggctggagaacctgatcgcccagctgcccggcgagaagaagaacggcctgttcggcaacctgatcgccctgtccctgggcctgacccccaacttcaagtccaacttcgacctggccgaggacgccaagctgcagctgtccaaggacacctacgacgacgacctggacaacctgctggcccagatcggcgaccagtacgccgacctgttcctggccgccaagaacctgtccgacgccatcctgctgtccgacatcctgcgggtgaacaccgagatcaccaaggcccccctgtccgcctccatgatcaagcggtacgacgagcaccaccaggacctgaccctgctgaaggccctggtgcggcagcagctgcccgagaagtacaaggagatcttcttcgaccagtccaagaacggctacgccggctacatcgacggcggcgcctcccaggaggagttctacaagttcatcaagcccatcctggagaagatggacggcaccgaggagctgctggtgaagctgaaccgggaggacctgctgcggaagcagcggaccttcgacaacggctccatcccccaccagatccacctgggcgagctgcacgccatcctgcggcggcaggaggacttctaccccttcctgaaggacaaccgggagaagatcgagaagatcctgaccttccggatcccctactacgtgggccccctggcccggggcaactcccggttcgcctggatgacccggaagtccgaggagaccatcaccccctggaacttcgaggaggtggtggacaagggcgcctccgcccagtccttcatcgagcggatgaccaacttcgacaagaacctgcccaacgagaaggtgctgcccaagcactccctgctgtacgagtacttcaccgtgtacaacgagctgaccaaggtgaagtacgtgaccgagggcatgcggaagcccgccttcctgtccggcgagcagaagaaggccatcgtggacctgctgttcaagaccaaccggaaggtgaccgtgaagcagctgaaggaggactacttcaagaagatcgagtgcttcgactccgtggagatctccggcgtggaggaccggttcaacgcctccctgggcacctaccacgacctgctgaagatcatcaaggacaaggacttcctggacaacgaggagaacgaggacatcctggaggacatcgtgctgaccctgaccctgttcgaggaccgggagatgatcgaggagcggctgaagacctacgcccacctgttcgacgacaaggtgatgaagcagctgaagcggcggcggtacaccggctggggccggctgtcccggaagctgatcaacggcatccgggacaagcagtccggcaagaccatcctggacttcctgaagtccgacggcttcgccaaccggaacttcatgcagctgatccacgacgactccctgaccttcaaggaggacatccagaaggcccaggtgtccggccagggcgactccctgcacgagcacatcgccaacctggccggctcccccgccatcaagaagggcatcctgcagaccgtgaaggtggtggacgagctggtgaaggtgatgggccggcacaagcccgagaacatcgtgatcgagatggcccgggagaaccagaccacccagaagggccagaagaactcccgggagcggatgaagcggatcgaggagggcatcaaggagctgggctcccagatcctgaaggagcaccccgtggagaacacccagctgcagaacgagaagctgtacctgtactacctgcagaacggccgggacatgtacgtggaccaggagctggacatcaaccggctgtccgactacgacgtggacgccatcgtgccccagtccttcctgaaggacgactccatcgacaacaaggtgctgacccggtccgacaagaaccggggcaagtccgacaacgtgccctccgaggaggtggtgaagaagatgaagaactactggcggcagctgctgaacgccaagctgatcacccagcggaagttcgacaacctgaccaaggccgagcggggcggcctgtccgagctggacaaggccggcttcatcaagcggcagctggtggagacccggcagatcaccaagcacgtggcccagatcctggactcccggatgaacaccaagtacgacgagaacgacaagctgatccgggaggtgaaggtgatcaccctgaagtccaagctggtgtccgacttccggaaggacttccagttctacaaggtgcgggagatcaacaactaccaccacgcccacgacgcctacctgaacgccgtggtgggcaccgccctgatcaagaagtaccccaagctggagtccgagttcgtgtacggcgactacaaggtgtacgacgtgcggaagatgatcgccaagtccgagcaggagatcggcaaggccaccgccaagtacttcttctactccaacatcatgaacttcttcaagaccgagatcaccctggccaacggcgagatccggaagcggcccctgatcgagaccaacggcgagaccggcgagatcgtgtgggacaagggccgggacttcgccaccgtgcggaaggtgctgtccatgccccaggtgaacatcgtgaagaagaccgaggtgcagaccggcggcttctccaaggagtccatcctgcccaagcggaactccgacaagctgatcgcccggaagaaggactgggaccccaagaagtacggcggcttcgactcccccaccgtggcctactccgtgctggtggtggccaaggtggagaagggcaagtccaagaagctgaagtccgtgaaggagctgctgggcatcaccatcatggagcggtcctccttcgagaagaaccccatcgacttcctggaggccaagggctacaaggaggtgaagaaggacctgatcatcaagctgcccaagtactccctgttcgagctggagaacggccggaagcggatgctggcctccgccggcgagctgcagaagggcaacgagctggccctgccctccaagtacgtgaacttcctgtacctggcctcccactacgagaagctgaagggctcccccgaggacaacgagcagaagcagctgttcgtggagcagcacaagcactacctggacgagatcatcgagcagatctccgagttctccaagcgggtgatcctggccgacgccaacctggacaaggtgctgtccgcctacaacaagcaccgggacaagcccatccgggagcaggccgagaacatcatccacctgttcaccctgaccaacctgggcgcccccgccgccttcaagtacttcgacaccaccatcgaccggaagcggtacacctccaccaaggaggtgctggacgccaccctgatccaccagtccatcaccggcctgtacgagacccggatcgacctgtcccagctgggcggcgacggcgcccccgagtccgccaccgagtccggcggcacctccaccgagtccgagggctccgccggcacctccaccgagtccgagggctccgccggctccgccggctccacctccggctcctcctccggcatgaagatcgccgtggtggacaaggccctgaacaacacccggtacgacaagcacttccagctgtacggcgaggaggtggacgtgttccacatgtgcaacgagaagctgtccggccggctgctgaagaagcacatcaccatcggcacccccgagaaccccttcgaccccaacgactacgacttcgtgatcctggtgggcgccgagcccttcctgtacttcgccggcaagaagggcatcggcgactacaccggcaagcgggtggagtacaacggctacgccaactggatcgcctccatctcccccgcccagctgcacttcaagcccgagatgaagcccgtgttcgacgccaccgtggagaacatccacgacatcatcaacggccgggagaagatcgccaaggccggcgactaccggcccatcaccgaccccgacgaggccgaggagtacatcaagatggtgtacaacatggtgatcggccccgtggccttcgcctccgccacctccgccctgtactgccgggacggctacctgctgggcgtgtccatctcccaccaggagtaccagggcgtgtacatcgactccgactgcctgaccgaggtggccgtgtactacctgcagaagatcctggactccgagaaccacaccatcgtgttccacaacctgaagttcgacatgcacttctacaagtaccacctgggcctgaccttcgacaaggcccacaaggagcggcggctgcacgacaccatgctgcagcactacgtgctggacgagcggcggggcacccacggcctgaagtccctggccatgaagtacaccgacatgggcgactacgacttcgagctggacaagttcaaggacgactactgcaaggcccacaagatcaagaaggaggacttcacctacgacctgatccccttcgacatcatgtggccctacgccgccaaggacaccgacgccaccatccggctgcacaacttcttcctgcccaagatcgagaagaacgagaagctgtgctccctgtactacgacgtgctgatgcccggctgcgtgttcctgcagcgggtggaggaccggggcgtgcccatctccatcgaccggctgaaggaggcccagtaccagctgacccacaacctgaacaaggcccgggagaagctgtacacctaccccgaggtgaagcagctggagcaggaccagaacgaggccttcaaccccaactccgtgaagcagctgcgggtgctgctgttcgactacgtgggcctgacccccaccggcaagctgaccgacaccggcgccgactccaccgacgccgaggccctgaacgagctggccacccagcaccccatcgccaagaccctgctggagatccggaagctgaccaagctgatctccacctacgtggagaagatcctgctgtccatcgacgccgacggctgcatccggaccggcttccacgagcacatgaccacctccggccggctgtcctcctccggcaagctgaacctgcagcagctgccccgggacgagtccatcatcaagggctgcgtggtggccccccccggctaccgggtgatcgcctgggacctgaccaccgccgaggtgtactacgccgccgtgctgtccggcgaccggaacatgcagcaggtgttcatcaacatgcggaacgagcccgacaagtaccccgacttccactccaacatcgcccacatggtgttcaagctgcagtgcgagccccgggacgtgaagaagctgttccccgccctgcggcaggccgccaaggccatcaccttcggcatcctgtacggctccggccccgccaaggtggcccactccgtgaacgaggccctgctggagcaggccgccaagaccggcgagcccttcgtggagtgcaccgtggccgacgccaaggagtacatcgagacctacttcggccagttcccccagctgaagcggtggatcgacaagtgccacgaccagatcaagaaccacggcttcatctactcccacttcggccggaagcggcggctgcacaacatccactccgaggaccggggcgtgcagggcgaggagatccggtccggcttcaacgccatcatccagtccgcctcctccgactccctgctgctgggcgccgtggacgccgacaacgagatcatctccctgggcctggagcaggagatgaagatcgtgatgctggtgcacgactccgtggtggccatcgtgcgggaggacctgatcgaccagtacaacgagatcctgatccggaacatccagaaggaccggggcatctccatccccggctgccccatcggcatcgactccgactccgaggccggcggctcccgggactactcctgcggcaagatgaagaagcagcacggcggcggctccggcaagcggaccgccgacggctccggcggcggctcccccaagaagaagcggaaggtgtccgagtccgccacccccgagtccgtgtccggctggcggctgttcaagaagatctcctagctagcaccagcctcaagaacacccgaatggagtctctaagctacataataccaacttacactttacaaaatgttgtcccccaaaatgtagccattcgtatctgctcctaataaaaagaaagtttcttcacattctctcgagaaaaaaaaaaaatggaaaaaaaaaaaacggaaaaaaaaaaaaggtaaaaaaaaaaaatataaaaaaaaaaaacataaaaaaaaaaaacgaaaaaaaaaaaacgtaaaaaaaaaaaactcaaaaaaaaaaaagataaaaaaaaaaaacctaaaaaaaaaaaatgtaaaaaaaaaaaagggaaaaaaaaaaaacgcaaaaaaaaaaaacacaaaaaaaaaaaatgcaaaaaaaaaaaatcgaaaaaaaaaaaatctaaaaaaaaaaaacgaaaaaaaaaaaacccaaaaaaaaaaaagacaaaaaaaaaaaatagaaaaaaaaaaagttaaaaaaaaaaaactgaaaaaaaaaaaatttaaaaaaaaaaaatctag

SEQ ID NO: 1159 - RNA, 6735 nt, synthetic construct
  misc_feature 1..6735: note = Synthetic
  source 1..6735: mol_type = other RNA
atggacaagaagtactccatcggcctggacatcggcaccaactccgtgggctgggccgtgatcaccgacgagtacaaggtgccctccaagaagttcaaggtgctgggcaacaccgaccggcactccatcaagaagaacctgatcggcgccctgctgttcgactccggcgagaccgccgaggccacccggctgaagcggaccgcccggcggcggtacacccggcggaagaaccggatctgctacctgcaggagatcttctccaacgagatggccaaggtggacgactccttcttccaccggctggaggagtccttcctggtggaggaggacaagaagcacgagcggcaccccatcttcggcaacatcgtggacgaggtggcctaccacgagaagtaccccaccatctaccacctgcggaagaagctggtggactccaccgacaaggccgacctgcggctgatctacctggccctggcccacatgatcaagttccggggccacttcctgatcgagggcgacctgaaccccgacaactccgacgtggacaagctgttcatccagctggtgcagacctacaaccagctgttcgaggagaaccccatcaacgcctccggcgtggacgccaaggccatcctgtccgcccggctgtccaagtcccggcggctggagaacctgatcgcccagctgcccggcgagaagaagaacggcctgttcggcaacctgatcgccctgtccctgggcctgacccccaacttcaagtccaacttcgacctggccgaggacgccaagctgcagctgtccaaggacacctacgacgacgacctggacaacctgctggcccagatcggcgaccagtacgccgacctgttcctggccgccaagaacctgtccgacgccatcctgctgtccgacatcctgcgggtgaacaccgagatcaccaaggcccccctgtccgcctccatgatcaagcggtacgacgagcaccaccaggacctgaccctgctgaaggccctggtgcggcagcagctgcccgagaagtacaaggagatcttcttcgaccagtccaagaacggctacgccggctacatcgacggcggcgcctcccaggaggagttctacaagttcatcaagcccatcctggagaagatggacggcaccgaggagctgctggtgaagctgaaccgggaggacctgctgcggaagcagcggaccttcgacaacggctccatcccccaccagatccacctgggcgagctgcacgccatcctgcggcggcaggaggacttctaccccttcctgaaggacaaccgggagaagatcgagaagatcctgaccttccggatcccctactacgtgggccccctggcccggggcaactcccggttcgcctggatgacccggaagtccgaggagaccatcaccccctggaacttcgaggaggtggtggacaagggcgcctccgcccagtccttcatcgagcggatgaccaacttcgacaagaacctgcccaacgagaaggtgctgcccaagcactccctgctgtacgagtacttcaccgtgtacaacgagctgaccaaggtgaagtacgtgaccgagggcatgcggaagcccgccttcctgtccggcgagcagaagaaggccatcgtggacctgctgttcaagaccaaccggaaggtgaccgtgaagcagctgaaggaggactacttcaagaagatcgagtgcttcgactccgtggagatctccggcgtggaggaccggttcaacgcctccctgggcacctaccacgacctgctgaagatcatcaaggacaaggacttcctggacaacgaggagaacgaggacatcctggaggacatcgtgctgaccctgaccctgttcgaggaccgggagatgatcgaggagcggctgaagacctacgcccacctgttcgacgacaaggtgatgaagcagctgaagcggcggcggtacaccggctggggccggctgtcccggaagctgatcaacggcatccgggacaagcagtccggcaagaccatcctggacttcctgaagtccgacggcttcgccaaccggaacttcatgcagctgatccacgacgactccctgaccttcaaggaggacatccagaaggcccaggtgtccggccagggcgactccctgcacgagcacatcgccaacctggccggctcccccgccatcaagaagggcatcctgcagaccgtgaaggtggtggacgagctggtgaaggtgatgggccggcacaagcccgagaacatcgtgatcgagatggcccgggagaaccagaccacccagaagggccagaagaactcccgggagcggatgaagcggatcgaggagggcatcaaggagctgggctcccagatcctgaaggagcaccccgtggagaacacccagctgcagaacgagaagctgtacctgtactacctgcagaacggccgggacatgtacgtggaccaggagctggacatcaaccggctgtccgactacgacgtggacgccatcgtgccccagtccttcctgaaggacgactccatcgacaacaaggtgctgacccggtccgacaagaaccggggcaagtccgacaacgtgccctccgaggaggtggtgaagaagatgaagaactactggcggcagctgctgaacgccaagctgatcacccagcggaagttcgacaacctgaccaaggccgagcggggcggcctgtccgagctggacaaggccggcttcatcaagcggcagctggtggagacccggcagatcaccaagcacgtggcccagatcctggactcccggatgaacaccaagtacgacgagaacgacaagctgatccgggaggtgaaggtgatcaccctgaagtccaagctggtgtccgacttccggaaggacttccagttctacaaggtgcgggagatcaacaactaccaccacgcccacgacgcctacctgaacgccgtggtgggcaccgccctgatcaagaagtaccccaagctggagtccgagttcgtgtacggcgactacaaggtgtacgacgtgcggaagatgatcgccaagtccgagcaggagatcggcaaggccaccgccaagtacttcttctactccaacatcatgaacttcttcaagaccgagatcaccctggccaacggcgagatccggaagcggcccctgatcgagaccaacggcgagaccggcgagatcgtgtgggacaagggccgggacttcgccaccgtgcggaaggtgctgtccatgccccaggtgaacatcgtgaagaagaccgaggtgcagaccggcggcttctccaaggagtccatcctgcccaagcggaactccgacaagctgatcgcccggaagaaggactgggaccccaagaagtacggcggcttcgactcccccaccgtggcctactccgtgctggtggtggccaaggtggagaagggcaagtccaagaagctgaagtccgtgaaggagctgctgggcatcaccatcatggagcggtcctccttcgagaagaaccccatcgacttcctggaggccaagggctacaaggaggtgaagaaggacctgatcatcaagctgcccaagtactccctgttcgagctggagaacggccggaagcggatgctggcctccgccggcgagctgcagaagggcaacgagctggccctgccctccaagtacgtgaacttcctgtacctggcctcccactacgagaagctgaagggctcccccgaggacaacgagcagaagcagctgttcgtggagcagcacaagcactacctggacgagatcatcgagcagatctccgagttctccaagcgggtgatcctggccgacgccaacctggacaaggtgctgtccgcctacaacaagcaccgggacaagcccatccgggagcaggccgagaacatcatccacctgttcaccctgaccaacctgggcgcccccgccgccttcaagtacttcgacaccaccatcgaccggaagcggtacacctccaccaaggaggtgctggacgccaccctgatccaccagtccatcaccggcctgtacgagacccggatcgacctgtcccagctgggcggcgacggcgcccccgagtccgccaccgagtccggcggcacctccaccgagtccgagggctccgccggcacctccaccgagtccgagggctccgccggctccgccggctccacctccggctcctcctccggcatgaagatcgccgtggtggacaaggccctgaacaacacccggtacgacaagcacttccagctgtacggcgaggaggtggacgtgttccacatgtgcaacgagaagctgtccggccggctgctgaagaagcacatcaccatcggcacccccgagaaccccttcgaccccaacgactacgacttcgtgatcctggtgggcgccgagcccttcctgtacttcgccggcaagaagggcatcggcgactacaccggcaagcgggtggagtacaacggctacgccaactggatcgcctccatctcccccgcccagctgcacttcaagcccgagatgaagcccgtgttcgacgccaccgtggagaacatccacgacatcatcaacggccgggagaagatcgccaaggccggcgactaccggcccatcaccgaccccgacgaggccgaggagtacatcaagatggtgtacaacatggtgatcggccccgtggccttcgcctccgccacctccgccctgtactgccgggacggctacctgctgggcgtgtccatctcccaccaggagtaccagggcgtgtacatcgactccgactgcctgaccgaggtggccgtgtactacctgcagaagatcctggactccgagaaccacaccatcgtgttccacaacctgaagttcgacatgcacttctacaagtaccacctgggcctgaccttcgacaaggcccacaaggagcggcggctgcacgacaccatgctgcagcactacgtgctggacgagcggcggggcacccacggcctgaagtccctggccatgaagtacaccgacatgggcgactacgacttcgagctggacaagttcaaggacgactactgcaaggcccacaagatcaagaaggaggacttcacctacgacctgatccccttcgacatcatgtggccctacgccgccaaggacaccgacgccaccatccggctgcacaacttcttcctgcccaagatcgagaagaacgagaagctgtgctccctgtactacgacgtgctgatgcccggctgcgtgttcctgcagcgggtggaggaccggggcgtgcccatctccatcgaccggctgaaggaggcccagtaccagctgacccacaacctgaacaaggcccgggagaagctgtacacctaccccgaggtgaagcagctggagcaggaccagaacgaggccttcaaccccaactccgtgaagcagctgcgggtgctgctgttcgactacgtgggcctgacccccaccggcaagctgaccgacaccggcgccgactccaccgacgccgaggccctgaacgagctggccacccagcaccccatcgccaagaccctgctggagatccggaagctgaccaagctgatctccacctacgtggagaagatcctgctgtccatcgacgccgacggctgcatccggaccggcttccacgagcacatgaccacctccggccggctgtcctcctccggcaagctgaacctgcagcagctgccccgggacgagtccatcatcaagggctgcgtggtggccccccccggctaccgggtgatcgcctgggacctgaccaccgccgaggtgtactacgccgccgtgctgtccggcgaccggaacatgcagcaggtgttcatcaacatgcggaacgagcccgacaagtaccccgacttccactccaacatcgcccacatggtgttcaagctgcagtgcgagccccgggacgtgaagaagctgttccccgccctgcggcaggccgccaaggccatcaccttcggcatcctgtacggctccggccccgccaaggtggcccactccgtgaacgaggccctgctggagcaggccgccaagaccggcgagcccttcgtggagtgcaccgtggccgacgccaaggagtacatcgagacctacttcggccagttcccccagctgaagcggtggatcgacaagtgccacgaccagatcaagaaccacggcttcatctactcccacttcggccggaagcggcggctgcacaacatccactccgaggaccggggcgtgcagggcgaggagatccggtccggcttcaacgccatcatccagtccgcctcctccgactccctgctgctgggcgccgtggacgccgacaacgagatcatctccctgggcctggagcaggagatgaagatcgtgatgctggtgcacgactccgtggtggccatcgtgcgggaggacctgatcgaccagtacaacgagatcctgatccggaacatccagaaggaccggggcatctccatccccggctgccccatcggcatcgactccgactccgaggccggcggctcccgggactactcctgcggcaagatgaagaagcagcacggcggcggctccggcaagcggaccgccgacggctccggcggcggctcccccaagaagaagcggaaggtgtccgagtccgccacccccgagtccgtgtccggctggcggctgttcaagaagatctcctag

SEQ ID NO: 1160 - protein, 2244 aa, synthetic construct
  REGION 1..2244: note = Synthetic
MDKKYSIGLDIGTNSVGWAVITDEYKVPSKKFKVLGNTDRHSIKKNLIGALLFDSGETAEATRLKRTARRRYTRRKNRICYLQEIFSNEMAKVDDSFFHRLEESFLVEEDKKHERHPIFGNIVDEVAYHEKYPTIYHLRKKLVDSTDKADLRLIYLALAHMIKFRGHFLIEGDLNPDNSDVDKLFIQLVQTYNQLFEENPINASGVDAKAILSARLSKSRRLENLIAQLPGEKKNGLFGNLIALSLGLTPNFKSNFDLAEDAKLQLSKDTYDDDLDNLLAQIGDQYADLFLAAKNLSDAILLSDILRVNTEITKAPLSASMIKRYDEHHQDLTLLKALVRQQLPEKYKEIFFDQSKNGYAGYIDGGASQEEFYKFIKPILEKMDGTEELLVKLNREDLLRKQRTFDNGSIPHQIHLGELHAILRRQEDFYPFLKDNREKIEKILTFRIPYYVGPLARGNSRFAWMTRKSEETITPWNFEEVVDKGASAQSFIERMTNFDKNLPNEKVLPKHSLLYEYFTVYNELTKVKYVTEGMRKPAFLSGEQKKAIVDLLFKTNRKVTVKQLKEDYFKKIECFDSVEISGVEDRFNASLGTYHDLLKIIKDKDFLDNEENEDILEDIVLTLTLFEDREMIEERLKTYAHLFDDKVMKQLKRRRYTGWGRLSRKLINGIRDKQSGKTILDFLKSDGFANRNFMQLIHDDSLTFKEDIQKAQVSGQGDSLHEHIANLAGSPAIKKGILQTVKVVDELVKVMGRHKPENIVIEMARENQTTQKGQKNSRERMKRIEEGIKELGSQILKEHPVENTQLQNEKLYLYYLQNGRDMYVDQELDINRLSDYDVDAIVPQSFLKDDSIDNKVLTRSDKNRGKSDNVPSEEVVKKMKNYWRQLLNAKLITQRKFDNLTKAERGGLSELDKAGFIKRQLVETRQITKHVAQILDSRMNTKYDENDKLIREVKVITLKSKLVSDFRKDFQFYKVREINNYHHAHDAYLNAVVGTALIKKYPKLESEFVYGDYKVYDVRKMIAKSEQEIGKATAKYFFYSNIMNFFKTEITLANGEIRKRPLIETNGETGEIVWDKGRDFATVRKVLSMPQVNIVKKTEVQTGGFSKESILPKRNSDKLIARKKDWDPKKYGGFDSPTVAYSVLVVAKVEKGKSKKLKSVKELLGITIMERSSFEKNPIDFLEAKGYKEVKKDLIIKLPKYSLFELENGRKRMLASAGELQKGNELALPSKYVNFLYLASHYEKLKGSPEDNEQKQLFVEQHKHYLDEIIEQISEFSKRVILADANLDKVLSAYNKHRDKPIREQAENIIHLFTLTNLGAPAAFKYFDTTIDRKRYTSTKEVLDATLIHQSITGLYETRIDLSQLGGDGAPESATESGGTSTESEGSAGTSTESEGSAGSAGSTSGSSSGMKIAVVDKALNNTRYDKHFQLYGEEVDVFHMCNEKLSGRLLKKHITIGTPENPFDPNDYDFVILVGAEPFLYFAGKKGIGDYTGKRVEYNGYANWIASISPAQLHFKPEMKPVFDATVENIHDIINGREKIAKAGDYRPITDPDEAEEYIKMVYNMVIGPVAFASATSALYCRDGYLLGVSISHQEYQGVYIDSDCLTEVAVYYLQKILDSENHTIVFHNLKFDMHFYKYHLGLTFDKAHKERRLHDTMLQHYVLDERRGTHGLKSLAMKYTDMGDYDFELDKFKDDYCKAHKIKKEDFTYDLIPFDIMWPYAAKDTDATIRLHNFFLPKIEKNEKLCSLYYDVLMPGCVFLQRVEDRGVPISIDRLKEAQYQLTHNLNKAREKLYTYPEVKQLEQDQNEAFNPNSVKQLRVLLFDYVGLTPTGKLTDTGADSTDAEALNELATQHPIAKTLLEIRKLTKLISTYVEKILLSIDADGCIRTGFHEHMTTSGRLSSSGKLNLQQLPRDESIIKGCVVAPPGYRVIAWDLTTAEVYYAAVLSGDRNMQQVFINMRNEPDKYPDFHSNIAHMVFKLQCEPRDVKKLFPALRQAAKAITFGILYGSGPAKVAHSVNEALLEQAAKTGEPFVECTVADAKEYIETYFGQFPQLKRWIDKCHDQIKNHGFIYSHFGRKRRLHNIHSEDRGVQGEEIRSGFNAIIQSASSDSLLLGAVDADNEIISLGLEQEMKIVMLVHDSVVAIVREDLIDQYNEILIRNIQKDRGISIPGCPIGIDSDSEAGGSRDYSCGKMKKQHGGGSGKRTADGSGGGSPKKKRKVSESATPESVSGWRLFKKIS

SEQ ID NO: 1161 - RNA, 6675 nt, synthetic construct
  misc_feature 1..6675: note = Synthetic
  source 1..6675: mol_type = other RNA
atggacaagaagtactccatcggcctggacatcggcaccaactccgtgggctgggccgtgatcaccgacgagtacaaggtgccctccaagaagttcaaggtgctgggcaacaccgaccggcactccatcaagaagaacctgatcggcgccctgctgttcgactccggcgagaccgccgaggccacccggctgaagcggaccgcccggcggcggtacacccggcggaagaaccggatctgctacctgcaggagatcttctccaacgagatggccaaggtggacgactccttcttccaccggctggaggagtccttcctggtggaggaggacaagaagcacgagcggcaccccatcttcggcaacatcgtggacgaggtggcctaccacgagaagtaccccaccatctaccacctgcggaagaagctggtggactccaccgacaaggccgacctgcggctgatctacctggccctggcccacatgatcaagttccggggccacttcctgatcgagggcgacctgaaccccgacaactccgacgtggacaagctgttcatccagctggtgcagacctacaaccagctgttcgaggagaaccccatcaacgcctccggcgtggacgccaaggccatcctgtccgcccggctgtccaagtcccggcggctggagaacctgatcgcccagctgcccggcgagaagaagaacggcctgttcggcaacctgatcgccctgtccctgggcctgacccccaacttcaagtccaacttcgacctggccgaggacgccaagctgcagctgtccaaggacacctacgacgacgacctggacaacctgctggcccagatcggcgaccagtacgccgacctgttcctggccgccaagaacctgtccgacgccatcctgctgtccgacatcctgcgggtgaacaccgagatcaccaaggcccccctgtccgcctccatgatcaagcggtacgacgagcaccaccaggacctgaccctgctgaaggccctggtgcggcagcagctgcccgagaagtacaaggagatcttcttcgaccagtccaagaacggctacgccggctacatcgacggcggcgcctcccaggaggagttctacaagttcatcaagcccatcctggagaagatggacggcaccgaggagctgctggtgaagctgaaccgggaggacctgctgcggaagcagcggaccttcgacaacggctccatcccccaccagatccacctgggcgagctgcacgccatcctgcggcggcaggaggacttctaccccttcctgaaggacaaccgggagaagatcgagaagatcctgaccttccggatcccctactacgtgggccccctggcccggggcaactcccggttcgcctggatgacccggaagtccgaggagaccatcaccccctggaacttcgaggaggtggtggacaagggcgcctccgcccagtccttcatcgagcggatgaccaacttcgacaagaacctgcccaacgagaaggtgctgcccaagcactccctgctgtacgagtacttcaccgtgtacaacgagctgaccaaggtgaagtacgtgaccgagggcatgcggaagcccgccttcctgtccggcgagcagaagaaggccatcgtggacctgctgttcaagaccaaccggaaggtgaccgtgaagcagctgaaggaggactacttcaagaagatcgagtgcttcgactccgtggagatctccggcgtggaggaccggttcaacgcctccctgggcacctaccacgacctgctgaagatcatcaaggacaaggacttcctggacaacgaggagaacgaggacatcctggaggacatcgtgctgaccctgaccctgttcgaggaccgggagatgatcgaggagcggctgaagacctacgcccacctgttcgacgacaaggtgatgaagcagctgaagcggcggcggtacaccggctggggccggctgtcccggaagctgatcaacggcatccgggacaagcagtccggcaagaccatcctggacttcctgaagtccgacggcttcgccaaccggaacttcatgcagctgatccacgacgactccctgaccttcaaggaggacatccagaaggcccaggtgtccggccagggcgactccctgcacgagcacatcgccaacctggccggctcccccgccatcaagaagggcatcctgcagaccgtgaaggtggtggacgagctggtgaaggtgatgggccggcacaagcccgagaacatcgtgatcgagatggcccgggagaaccagaccacccagaagggccagaagaactcccgggagcggatgaagcggatcgaggagggcatcaaggagctgggctcccagatcctgaaggagcaccccgtggagaacacccagctgcagaacgagaagctgtacctgtactacctgcagaacggccgggacatgtacgtggaccaggagctggacatcaaccggctgtccgactacgacgtggacgccatcgtgccccagtccttcctgaaggacgactccatcgacaacaaggtgctgacccggtccgacaagaaccggggcaagtccgacaacgtgccctccgaggaggtggtgaagaagatgaagaactactggcggcagctgctgaacgccaagctgatcacccagcggaagttcgacaacctgaccaaggccgagcggggcggcctgtccgagctggacaaggccggcttcatcaagcggcagctggtggagacccggcagatcaccaagcacgtggcccagatcctggactcccggatgaacaccaagtacgacgagaacgacaagctgatccgggaggtgaaggtgatcaccctgaagtccaagctggtgtccgacttccggaaggacttccagttctacaaggtgcgggagatcaacaactaccaccacgcccacgacgcctacctgaacgccgtggtgggcaccgccctgatcaagaagtaccccaagctggagtccgagttcgtgtacggcgactacaaggtgtacgacgtgcggaagatgatcgccaagtccgagcaggagatcggcaaggccaccgccaagtacttcttctactccaacatcatgaacttcttcaagaccgagatcaccctggccaacggcgagatccggaagcggcccctgatcgagaccaacggcgagaccggcgagatcgtgtgggacaagggccgggacttcgccaccgtgcggaaggtgctgtccatgccccaggtgaacatcgtgaagaagaccgaggtgcagaccggcggcttctccaaggagtccatcctgcccaagcggaactccgacaagctgatcgcccggaagaaggactgggaccccaagaagtacggcggcttcgactcccccaccgtggcctactccgtgctggtggtggccaaggtggagaagggcaagtccaagaagctgaagtccgtgaaggagctgctgggcatcaccatcatggagcggtcctccttcgagaagaaccccatcgacttcctggaggccaagggctacaaggaggtgaagaaggacctgatcatcaagctgcccaagtactccctgttcgagctggagaacggccggaagcggatgctggcctccgccggcgagctgcagaagggcaacgagctggccctgccctccaagtacgtgaacttcctgtacctggcctcccactacgagaagctgaagggctcccccgaggacaacgagcagaagcagctgttcgtggagcagcacaagcactacctggacgagatcatcgagcagatctccgagttctccaagcgggtgatcctggccgacgccaacctggacaaggtgctgtccgcctacaacaagcaccgggacaagcccatccgggagcaggccgagaacatcatccacctgttcaccctgaccaacctgggcgcccccgccgccttcaagtacttcgacaccaccatcgaccggaagcggtacacctccaccaaggaggtgctggacgccaccctgatccaccagtccatcaccggcctgtacgagacccggatcgacctgtcccagctgggcggcgacggcgcccccgagtccgccaccgagtccggcggcacctccaccgagtccgagggctccgccggcacctccaccgagtccgagggctccgccggctccgccggctccacctccggctcctcctccggcatgaagatcgccgtggtggacaaggccctgaacaacacccggtacgacaagcacttccagctgtacggcgaggaggtggacgtgttccacatgtgcaacgagaagctgtccggccggctgctgaagaagcacatcaccatcggcacccccgagaaccccttcgaccccaacgactacgacttcgtgatcctggtgggcgccgagcccttcctgtacttcgccggcaagaagggcatcggcgactacaccggcaagcgggtggagtacaacggctacgccaactggatcgcctccatctcccccgcccagctgcacttcaagcccgagatgaagcccgtgttcgacgccaccgtggagaacatccacgacatcatcaacggccgggagaagatcgccaaggccggcgactaccggcccatcaccgaccccgacgaggccgaggagtacatcaagatggtgtacaacatggtgatcggccccgtggccttcgcctccgccacctccgccctgtactgccgggacggctacctgctgggcgtgtccatctcccaccaggagtaccagggcgtgtacatcgactccgactgcctgaccgaggtggccgtgtactacctgcagaagatcctggactccgagaaccacaccatcgtgttccacaacctgaagttcgacatgcacttctacaagtaccacctgggcctgaccttcgacaaggcccacaaggagcggcggctgcacgacaccatgctgcagcactacgtgctggacgagcggcggggcacccacggcctgaagtccctggccatgaagtacaccgacatgggcgactacgacttcgagctggacaagttcaaggacgactactgcaaggcccacaagatcaagaaggaggacttcacctacgacctgatccccttcgacatcatgtggccctacgccgccaaggacaccgacgccaccatccggctgcacaacttcttcctgcccaagatcgagaagaacgagaagctgtgctccctgtactacgacgtgctgatgcccggctgcgtgttcctgcagcgggtggaggaccggggcgtgcccatctccatcgaccggctgaaggaggcccagtaccagctgacccacaacctgaacaaggcccgggagaagctgtacacctaccccgaggtgaagcagctggagcaggaccagaacgaggccttcaaccccaactccgtgaagcagctgcgggtgctgctgttcgactacgtgggcctgacccccaccggcaagctgaccgacaccggcgccgactccaccgacgccgaggccctgaacgagctggccacccagcaccccatcgccaagaccctgctggagatccggaagctgaccaagctgatctccacctacgtggagaagatcctgctgtccatcgacgccgacggctgcatccggaccggcttccacgagcacatgaccacctccggccggctgtcctcctccggcaagctgaacctgcagcagctgccccgggacgagtccatcatcaagggctgcgtggtggccccccccggctaccgggtgatcgcctgggacctgaccaccgccgaggtgtactacgccgccgtgctgtccggcgaccggaacatgcagcaggtgttcatcaacatgcggaacgagcccgacaagtaccccgacttccactccaacatcgcccacatggtgttcaagctgcagtgcgagccccgggacgtgaagaagctgttccccgccctgcggcaggccgccaaggccatcaccttcggcatcctgtacggctccggccccgccaaggtggcccactccgtgaacgaggccctgctggagcaggccgccaagaccggcgagcccttcgtggagtgcaccgtggccgacgccaaggagtacatcgagacctacttcggccagttcccccagctgaagcggtggatcgacaagtgccacgaccagatcaagaaccacggcttcatctactcccacttcggccggaagcggcggctgcacaacatccactccgaggaccggggcgtgcagggcgaggagatccggtccggcttcaacgccatcatccagtccgcctcctccgactccctgctgctgggcgccgtggacgccgacaacgagatcatctccctgggcctggagcaggagatgaagatcgtgatgctggtgcacgactccgtggtggccatcgtgcgggaggacctgatcgaccagtacaacgagatcctgatccggaacatccagaaggaccggggcatctccatccccggctgccccatcggcatcgactccgactccgaggccggcggctcccgggactactcctgcggcaagatgaagaagcagcacggcggcggctccggcaagcggaccgccgacggctccggcggcggctcccccaagaagaagcggaaggtg

SEQ ID NO: 1162 - protein, 2225 aa, synthetic construct
  REGION 1..2225: note = Synthetic
MDKKYSIGLDIGTNSVGWAVITDEYKVPSKKFKVLGNTDRHSIKKNLIGALLFDSGETAEATRLKRTARRRYTRRKNRICYLQEIFSNEMAKVDDSFFHRLEESFLVEEDKKHERHPIFGNIVDEVAYHEKYPTIYHLRKKLVDSTDKADLRLIYLALAHMIKFRGHFLIEGDLNPDNSDVDKLFIQLVQTYNQLFEENPINASGVDAKAILSARLSKSRRLENLIAQLPGEKKNGLFGNLIALSLGLTPNFKSNFDLAEDAKLQLSKDTYDDDLDNLLAQIGDQYADLFLAAKNLSDAILLSDILRVNTEITKAPLSASMIKRYDEHHQDLTLLKALVRQQLPEKYKEIFFDQSKNGYAGYIDGGASQEEFYKFIKPILEKMDGTEELLVKLNREDLLRKQRTFDNGSIPHQIHLGELHAILRRQEDFYPFLKDNREKIEKILTFRIPYYVGPLARGNSRFAWMTRKSEETITPWNFEEVVDKGASAQSFIERMTNFDKNLPNEKVLPKHSLLYEYFTVYNELTKVKYVTEGMRKPAFLSGEQKKAIVDLLFKTNRKVTVKQLKEDYFKKIECFDSVEISGVEDRFNASLGTYHDLLKIIKDKDFLDNEENEDILEDIVLTLTLFEDREMIEERLKTYAHLFDDKVMKQLKRRRYTGWGRLSRKLINGIRDKQSGKTILDFLKSDGFANRNFMQLIHDDSLTFKEDIQKAQVSGQGDSLHEHIANLAGSPAIKKGILQTVKVVDELVKVMGRHKPENIVIEMARENQTTQKGQKNSRERMKRIEEGIKELGSQILKEHPVENTQLQNEKLYLYYLQNGRDMYVDQELDINRLSDYDVDAIVPQSFLKDDSIDNKVLTRSDKNRGKSDNVPSEEVVKKMKNYWRQLLNAKLITQRKFDNLTKAERGGLSELDKAGFIKRQLVETRQITKHVAQILDSRMNTKYDENDKLIREVKVITLKSKLVSDFRKDFQFYKVREINNYHHAHDAYLNAVVGTALIKKYPKLESEFVYGDYKVYDVRKMIAKSEQEIGKATAKYFFYSNIMNFFKTEITLANGEIRKRPLIETNGETGEIVWDKGRDFATVRKVLSMPQVNIVKKTEVQTGGFSKESILPKRNSDKLIARKKDWDPKKYGGFDSPTVAYSVLVVAKVEKGKSKKLKSVKELLGITIMERSSFEKNPIDFLEAKGYKEVKKDLIIKLPKYSLFELENGRKRMLASAGELQKGNELALPSKYVNFLYLASHYEKLKGSPEDNEQKQLFVEQHKHYLDEIIEQISEFSKRVILADANLDKVLSAYNKHRDKPIREQAENIIHLFTLTNLGAPAAFKYFDTTIDRKRYTSTKEVLDATLIHQSITGLYETRIDLSQLGGDGAPESATESGGTSTESEGSAGTSTESEGSAGSAGSTSGSSSGMKIAVVDKALNNTRYDKHFQLYGEEVDVFHMCNEKLSGRLLKKHITIGTPENPFDPNDYDFVILVGAEPFLYFAGKKGIGDYTGKRVEYNGYANWIASISPAQLHFKPEMKPVFDATVENIHDIINGREKIAKAGDYRPITDPDEAEEYIKMVYNMVIGPVAFASATSALYCRDGYLLGVSISHQEYQGVYIDSDCLTEVAVYYLQKILDSENHTIVFHNLKFDMHFYKYHLGLTFDKAHKERRLHDTMLQHYVLDERRGTHGLKSLAMKYTDMGDYDFELDKFKDDYCKAHKIKKEDFTYDLIPFDIMWPYAAKDTDATIRLHNFFLPKIEKNEKLCSLYYDVLMPGCVFLQRVEDRGVPISIDRLKEAQYQLTHNLNKAREKLYTYPEVKQLEQDQNEAFNPNSVKQLRVLLFDYVGLTPTGKLTDTGADSTDAEALNELATQHPIAKTLLEIRKLTKLISTYVEKILLSIDADGCIRTGFHEHMTTSGRLSSSGKLNLQQLPRDESIIKGCVVAPPGYRVIAWDLTTAEVYYAAVLSGDRNMQQVFINMRNEPDKYPDFHSNIAHMVFKLQCEPRDVKKLFPALRQAAKAITFGILYGSGPAKVAHSVNEALLEQAAKTGEPFVECTVADAKEYIETYFGQFPQLKRWIDKCHDQIKNHGFIYSHFGRKRRLHNIHSEDRGVQGEEIRSGFNAIIQSASSDSLLLGAVDADNEIISLGLEQEMKIVMLVHDSVVAIVREDLIDQYNEILIRNIQKDRGISIPGCPIGIDSDSEAGGSRDYSCGKMKKQHGGGSGKRTADGSGGGSPKKKRKV

SEQ ID NO: 1163 - RNA, 7483 nt, synthetic construct
  misc_feature 1..7483: note = Synthetic
  source 1..7483: mol_type = other RNA
gggaagctcagaataaacgctcaactttggccggatctgccaccatggacaagaagtactccatcggcctggacatcggcaccaactccgtgggctgggccgtgatcaccgacgagtacaaggtgccctccaagaagttcaaggtgctgggcaacaccgaccggcactccatcaagaagaacctgatcggcgccctgctgttcgactccggcgagaccgccgaggccacccggctgaagcggaccgcccggcggcggtacacccggcggaagaaccggatctgctacctgcaggagatcttctccaacgagatggccaaggtggacgactccttcttccaccggctggaggagtccttcctggtggaggaggacaagaagcacgagcggcaccccatcttcggcaacatcgtggacgaggtggcctaccacgagaagtaccccaccatctaccacctgcggaagaagctggtggactccaccgacaaggccgacctgcggctgatctacctggccctggcccacatgatcaagttccggggccacttcctgatcgagggcgacctgaaccccgacaactccgacgtggacaagctgttcatccagctggtgcagacctacaaccagctgttcgaggagaaccccatcaacgcctccggcgtggacgccaaggccatcctgtccgcccggctgtccaagtcccggcggctggagaacctgatcgcccagctgcccggcgagaagaagaacggcctgttcggcaacctgatcgccctgtccctgggcctgacccccaacttcaagtccaacttcgacctggccgaggacgccaagctgcagctgtccaaggacacctacgacgacgacctggacaacctgctggcccagatcggcgaccagtacgccgacctgttcctggccgccaagaacctgtccgacgccatcctgctgtccgacatcctgcgggtgaacaccgagatcaccaaggcccccctgtccgcctccatgatcaagcggtacgacgagcaccaccaggacctgaccctgctgaaggccctggtgcggcagcagctgcccgagaagtacaaggagatcttcttcgaccagtccaagaacggctacgccggctacatcgacggcggcgcctcccaggaggagttctacaagttcatcaagcccatcctggagaagatggacggcaccgaggagctgctggtgaagctgaaccgggaggacctgctgcggaagcagcggaccttcgacaacggctccatcccccaccagatccacctgggcgagctgcacgccatcctgcggcggcaggaggacttctaccccttcctgaaggacaaccgggagaagatcgagaagatcctgaccttccggatcccctactacgtgggccccctggcccggggcaactcccggttcgcctggatgacccggaagtccgaggagaccatcaccccctggaacttcgaggaggtggtggacaagggcgcctccgcccagtccttcatcgagcggatgaccaacttcgacaagaacctgcccaacgagaaggtgctgcccaagcactccctgctgtacgagtacttcaccgtgtacaacgagctgaccaaggtgaagtacgtgaccgagggcatgcggaagcccgccttcctgtccggcgagcagaagaaggccatcgtggacctgctgttcaagaccaaccggaaggtgaccgtgaagcagctgaaggaggactacttcaagaagatcgagtgcttcgactccgtggagatctccggcgtggaggaccggttcaacgcctccctgggcacctaccacgacctgctgaagatcatcaaggacaaggacttcctggacaacgaggagaacgaggacatcctggaggacatcgtgctgaccctgaccctgttcgaggaccgggagatgatcgaggagcggctgaagacctacgcccacctgttcgacgacaaggtgatgaagcagctgaagcggcggcggtacaccggctggggccggctgtcccggaagctgatcaacggcatccgggacaagcagtccggcaagaccatcctggacttcctgaagtccgacggcttcgccaaccggaacttcatgcagctgatccacgacgactccctgaccttcaaggaggacatccagaaggcccaggtgtccggccagggcgactccctgcacgagcacatcgccaacctggccggctcccccgccatcaagaagggcatcctgcagaccgtgaaggtggtggacgagctggtgaaggtgatgggccggcacaagcccgagaacatcgtgatcgagatggcccgggagaaccagaccacccagaagggccagaagaactcccgggagcggatgaagcggatcgaggagggcatcaaggagctgggctcccagatcctgaaggagcaccccgtggagaacacccagctgcagaacgagaagctgtacctgtactacctgcagaacggccgggacatgtacgtggaccaggagctggacatcaaccggctgtccgactacgacgtggacgccatcgtgccccagtccttcctgaaggacgactccatcgacaacaaggtgctgacccggtccgacaagaaccggggcaagtccgacaacgtgccctccgaggaggtggtgaagaagatgaagaactactggcggcagctgctgaacgccaagctgatcacccagcggaagttcgacaacctgaccaaggccgagcggggcggcctgtccgagctggacaaggccggcttcatcaagcggcagctggtggagacccggcagatcaccaagcacgtggcccagatcctggactcccggatgaacaccaagtacgacgagaacgacaagctgatccgggaggtgaaggtgatcaccctgaagtccaagctggtgtccgacttccggaaggacttccagttctacaaggtgcgggagatcaacaactaccaccacgcccacgacgcctacctgaacgccgtggtgggcaccgccctgatcaagaagtaccccaagctggagtccgagttcgtgtacggcgactacaaggtgtacgacgtgcggaagatgatcgccaagtccgagcaggagatcggcaaggccaccgccaagtacttcttctactccaacatcatgaacttcttcaagaccgagatcaccctggccaacggcgagatccggaagcggcccctgatcgagaccaacggcgagaccggcgagatcgtgtgggacaagggccgggacttcgccaccgtgcggaaggtgctgtccatgccccaggtgaacatcgtgaagaagaccgaggtgcagaccggcggcttctccaaggagtccatcctgcccaagcggaactccgacaagctgatcgcccggaagaaggactgggaccccaagaagtacggcggcttcgactcccccaccgtggcctactccgtgctggtggtggccaaggtggagaagggcaagtccaagaagctgaagtccgtgaaggagctgctgggcatcaccatcatggagcggtcctccttcgagaagaaccccatcgacttcctggaggccaagggctacaaggaggtgaagaaggacctgatcatcaagctgcccaagtactccctgttcgagctggagaacggccggaagcggatgctggcctccgccggcgagctgcagaagggcaacgagctggccctgccctccaagtacgtgaacttcctgtacctggcctcccactacgagaagctgaagggctcccccgaggacaacgagcagaagcagctgttcgtggagcagcacaagcactacctggacgagatcatcgagcagatctccgagttctccaagcgggtgatcctggccgacgccaacctggacaaggtgctgtccgcctacaacaagcaccgggacaagcccatccgggagcaggccgagaacatcatccacctgttcaccctgaccaacctgggcgcccccgccgccttcaagtacttcgacaccaccatcgaccggaagcggtacacctccaccaaggaggtgctggacgccaccctgatccaccagtccatcaccggcctgtacgagacccggatcgacctgtcccagctgggcggcgacggcgcccccgagtccgccaccgagtccggcggcacctccaccgagtccgagggctccgccggcacctccaccgagtccgagggctccgccggctccgccggctccacctccggctcctcctccggcatgaagatcgccgtggtggacaaggccctgaacaacacccggtacgacaagcacttccagctgtacggcgaggaggtggacgtgttccacatgtgcaacgagaagctgtccggccggctgctgaagaagcacatcaccatcggcacccccgagaaccccttcgaccccaacgactacgacttcgtgatcctggtgggcgccgagcccttcctgtacttcgccggcaagaagggcatcggcgactacaccggcaagcgggtggagtacaacggctacgccaactggatcgcctccatctcccccgcccagctgcacttcaagcccgagatgaagcccgtgttcgacgccaccgtggagaacatccacgacatcatcaacggccgggagaagatcgccaaggccggcgactaccggcccatcaccgaccccgacgaggccgaggagtacatcaagatggtgtacaacatggtgatcggccccgtggccttcgcctccgccacctccgccctgtactgccgggacggctacctgctgggcgtgtccatctcccaccaggagtaccagggcgtgtacatcgactccgactgcctgaccgaggtggccgtgtactacctgcagaagatcctggactccgagaaccacaccatcgtgttccacaacctgaagttcgacatgcacttctacaagtaccacctgggcctgaccttcgacaaggcccacaaggagcggcggctgcacgacaccatgctgcagcactacgtgctggacgagcggcggggcacccacggcctgaagtccctggccatgaagtacaccgacatgggcgactacgacttcgagctggacaagttcaaggacgactactgcaaggcccacaagatcaagaaggaggacttcacctacgacctgatccccttcgacatcatgtggccctacgccgccaaggacaccgacgccaccatccggctgcacaacttcttcctgcccaagatcgagaagaacgagaagctgtgctccctgtactacgacgtgctgatgcccggctgcgtgttcctgcagcgggtggaggaccggggcgtgcccatctccatcgaccggctgaaggaggcccagtaccagctgacccacaacctgaacaaggcccgggagaagctgtacacctaccccgaggtgaagcagctggagcaggaccagaacgaggccttcaaccccaactccgtgaagcagctgcgggtgctgctgttcgactacgtgggcctgacccccaccggcatcctgaccgacaccggcgccgactccaccgacgccgaggccctgaacgagctggccacccagcaccccatcgccaagaccctgctggagatccggaagctgaccaagctgatctccacctacgtggagaagatcctgctgtccatcgacgccgacggctgcatccggaccggcttccacgagcacatgaccacctccggccggctgtcctcctccggcaagctgaacctgcagcagctgccccgggacgagtccatcatcaagggctgcgtggtggccccccccggctaccgggtgatcgcctgggacctgaccaccgccgaggtgtactacgccgccgtgctgtccggcgaccggaacatgcagcaggtgttcatcaacatgcggaacgagcccgacaagtaccccgacttccactccaacatcgcccacatggtgttcaagctgcagtgcgagccccgggacgtgaagaagctgttccccgccctgcggcaggccgccaaggccatcaccttcggcatcctgtacggctccggccccgccaaggtggcccactccgtgaacgaggccctgctggagcaggccgccaagaccggcgagcccttcgtggagtgcaccgtggccgacgccaaggagtacatcgagacctacttcggccagttcccccagctgaagcggtggatcgacaagtgccacgaccagatcaagaaccacggcttcatctactcccacttcggccggaagcggcggctgcacaacatccactccgaggaccggggcgtgcagggcgaggagatccggtccggcttcaacgccatcatccagtccgcctcctccgactccctgctgctgggcgccgtggacgccgacaacgagatcatctccctgggcctggagcaggagatgaagatcgtgatgctggtgcacgactccgtggtggccatcgtgcgggaggacctgatcgaccagtacaacgagatcctgatccggaacatccagaaggaccggggcatctccatccccggctgccccatcggcatcgactccgactccgaggccggcggctcccgggactactcctgcggcaagatgaagaagcagcacccctccatcgcctgcatcgacgacgacgagtacacccggtacgtgaagggcgtgctgctggacgccgagttcgagtacaagaagctggccgccatggacaaggagcaccccgaccactccaagtacaaggacgacaagttcatcgccgtgtgcaaggacctggacaacgtgaagcggatcctgggcgccggcggcggctccggcaagcggaccgccgacggctccggcggcggctcccccaagaagaagcggaaggtgtccgagtccgccacccccgagtccgtgtccggctggcggctgttcaagaagatctcctagctagcaccagcctcaagaacacccgaatggagtctctaagctacataataccaacttacactttacaaaatgttgtcccccaaaatgtagccattcgtatctgctcctaataaaaagaaagtttcttcacattctctcgagaaaaaaaaaaaatggaaaaaaaaaaaacggaaaaaaaaaaaaggtaaaaaaaaaaaatataaaaaaaaaaaacataaaaaaaaaaaacgaaaaaaaaaaaacgtaaaaaaaaaaaactcaaaaaaaaaaaagataaaaaaaaaaaacctaaaaaaaaaaaatgtaaaaaaaaaaaagggaaaaaaaaaaaacgcaaaaaaaaaaaacacaaaaaaaaaaaatgcaaaaaaaaaaaatcgaaaaaaaaaaaatctaaaaaaaaaaaacgaaaaaaaaaaaacccaaaaaaaaaaaagacaaaaaaaaaaaatagaaaaaaaaaaagttaaaaaaaaaaaactgaaaaaaaaaaaatttaaaaaaaaaaaatctag

SEQ ID NO: 1164 - RNA, 6924 nt, synthetic construct
  misc_feature 1..6924: note = Synthetic
  source 1..6924: mol_type = other RNA
atggacaagaagtactccatcggcctggacatcggcaccaactccgtgggctgggccgtgatcaccgacgagtacaaggtgccctccaagaagttcaaggtgctgggcaacaccgaccggcactccatcaagaagaacctgatcggcgccctgctgttcgactccggcgagaccgccgaggccacccggctgaagcggaccgcccggcggcggtacacccggcggaagaaccggatctgctacctgcaggagatcttctccaacgagatggccaaggtggacgactccttcttccaccggctggaggagtccttcctggtggaggaggacaagaagcacgagcggcaccccatcttcggcaacatcgtggacgaggtggcctaccacgagaagtaccccaccatctaccacctgcggaagaagctggtggactccaccgacaaggccgacctgcggctgatctacctggccctggcccacatgatcaagttccggggccacttcctgatcgagggcgacctgaaccccgacaactccgacgtggacaagctgttcatccagctggtgcagacctacaaccagctgttcgaggagaaccccatcaacgcctccggcgtggacgccaaggccatcctgtccgcccggctgtccaagtcccggcggctggagaacctgatcgcccagctgcccggcgagaagaagaacggcctgttcggcaacctgatcgccctgtccctgggcctgacccccaacttcaagtccaacttcgacctggccgaggacgccaagctgcagctgtccaaggacacctacgacgacgacctggacaacctgctggcccagatcggcgaccagtacgccgacctgttcctggccgccaagaacctgtccgacgccatcctgctgtccgacatcctgcgggtgaacaccgagatcaccaaggcccccctgtccgcctccatgatcaagcggtacgacgagcaccaccaggacctgaccctgctgaaggccctggtgcggcagcagctgcccgagaagtacaaggagatcttcttcgaccagtccaagaacggctacgccggctacatcgacggcggcgcctcccaggaggagttctacaagttcatcaagcccatcctggagaagatggacggcaccgaggagctgctggtgaagctgaaccgggaggacctgctgcggaagcagcggaccttcgacaacggctccatcccccaccagatccacctgggcgagctgcacgccatcctgcggcggcaggaggacttctaccccttcctgaaggacaaccgggagaagatcgagaagatcctgaccttccggatcccctactacgtgggccccctggcccggggcaactcccggttcgcctggatgacccggaagtccgaggagaccatcaccccctggaacttcgaggaggtggtggacaagggcgcctccgcccagtccttcatcgagcggatgaccaacttcgacaagaacctgcccaacgagaaggtgctgcccaagcactccctgctgtacgagtacttcaccgtgtacaacgagctgaccaaggtgaagtacgtgaccgagggcatgcggaagcccgccttcctgtccggcgagcagaagaaggccatcgtggacctgctgttcaagaccaaccggaaggtgaccgtgaagcagctgaaggaggactacttcaagaagatcgagtgcttcgactccgtggagatctccggcgtggaggaccggttcaacgcctccctgggcacctaccacgacctgctgaagatcatcaaggacaaggacttcctggacaacgaggagaacgaggacatcctggaggacatcgtgctgaccctgaccctgttcgaggaccgggagatgatcgaggagcggctgaagacctacgcccacctgttcgacgacaaggtgatgaagcagctgaagcggcggcggtacaccggctggggccggctgtcccggaagctgatcaacggcatccgggacaagcagtccggcaagaccatcctggacttcctgaagtccgacggcttcgccaaccggaacttcatgcagctgatccacgacgactccctgaccttcaaggaggacatccagaaggcccaggtgtccggccagggcgactccctgcacgagcacatcgccaacctggccggctcccccgccatcaagaagggcatcctgcagaccgtgaaggtggtggacgagctggtgaaggtgatgggccggcacaagcccgagaacatcgtgatcgagatggcccgggagaaccagaccacccagaagggccagaagaactcccgggagcggatgaagcggatcgaggagggcatcaaggagctgggctcccagatcctgaaggagcaccccgtggagaacacccagctgcagaacgagaagctgtacctgtactacctgcagaacggccgggacatgtacgtggaccaggagctggacatcaaccggctgtccgactacgacgtggacgccatcgtgccccagtccttcctgaaggacgactccatcgacaacaaggtgctgacccggtccgacaagaaccggggcaagtccgacaacgtgccctccgaggaggtggtgaagaagatgaagaactactggcggcagctgctgaacgccaagctgatcacccagcggaagttcgacaacctgaccaaggccgagcggggcggcctgtccgagctggacaaggccggcttcatcaagcggcagctggtggagacccggcagatcaccaagcacgtggcccagatcctggactcccggatgaacaccaagtacgacgagaacgacaagctgatccgggaggtgaaggtgatcaccctgaagtccaagctggtgtccgacttccggaaggacttccagttctacaaggtgcgggagatcaacaactaccaccacgcccacgacgcctacctgaacgccgtggtgggcaccgccctgatcaagaagtaccccaagctggagtccgagttcgtgtacggcgactacaaggtgtacgacgtgcggaagatgatcgccaagtccgagcaggagatcggcaaggccaccgccaagtacttcttctactccaacatcatgaacttcttcaagaccgagatcaccctggccaacggcgagatccggaagcggcccctgatcgagaccaacggcgagaccggcgagatcgtgtgggacaagggccgggacttcgccaccgtgcggaaggtgctgtccatgccccaggtgaacatcgtgaagaagaccgaggtgcagaccggcggcttctccaaggagtccatcctgcccaagcggaactccgacaagctgatcgcccggaagaaggactgggaccccaagaagtacggcggcttcgactcccccaccgtggcctactccgtgctggtggtggccaaggtggagaagggcaagtccaagaagctgaagtccgtgaaggagctgctgggcatcaccatcatggagcggtcctccttcgagaagaaccccatcgacttcctggaggccaagggctacaaggaggtgaagaaggacctgatcatcaagctgcccaagtactccctgttcgagctggagaacggccggaagcggatgctggcctccgccggcgagctgcagaagggcaacgagctggccctgccctccaagtacgtgaacttcctgtacctggcctcccactacgagaagctgaagggctcccccgaggacaacgagcagaagcagctgttcgtggagcagcacaagcactacctggacgagatcatcgagcagatctccgagttctccaagcgggtgatcctggccgacgccaacctggacaaggtgctgtccgcctacaacaagcaccgggacaagcccatccgggagcaggccgagaacatcatccacctgttcaccctgaccaacctgggcgcccccgccgccttcaagtacttcgacaccaccatcgaccggaagcggtacacctccaccaaggaggtgctggacgccaccctgatccaccagtccatcaccggcctgtacgagacccggatcgacctgtcccagctgggcggcgacggcgcccccgagtccgccaccgagtccggcggcacctccaccgagtccgagggctccgccggcacctccaccgagtccgagggctccgccggctccgccggctccacctccggctcctcctccggcatgaagatcgccgtggtggacaaggccctgaacaacacccggtacgacaagcacttccagctgtacggcgaggaggtggacgtgttccacatgtgcaacgagaagctgtccggccggctgctgaagaagcacatcaccatcggcacccccgagaaccccttcgaccccaacgactacgacttcgtgatcctggtgggcgccgagcccttcctgtacttcgccggcaagaagggcatcggcgactacaccggcaagcgggtggagtacaacggctacgccaactggatcgcctccatctcccccgcccagctgcacttcaagcccgagatgaagcccgtgttcgacgccaccgtggagaacatccacgacatcatcaacggccgggagaagatcgccaaggccggcgactaccggcccatcaccgaccccgacgaggccgaggagtacatcaagatggtgtacaacatggtgatcggccccgtggccttcgcctccgccacctccgccctgtactgccgggacggctacctgctgggcgtgtccatctcccaccaggagtaccagggcgtgtacatcgactccgactgcctgaccgaggtggccgtgtactacctgcagaagatcctggactccgagaaccacaccatcgtgttccacaacctgaagttcgacatgcacttctacaagtaccacctgggcctgaccttcgacaaggcccacaaggagcggcggctgcacgacaccatgctgcagcactacgtgctggacgagcggcggggcacccacggcctgaagtccctggccatgaagtacaccgacatgggcgactacgacttcgagctggacaagttcaaggacgactactgcaaggcccacaagatcaagaaggaggacttcacctacgacctgatccccttcgacatcatgtggccctacgccgccaaggacaccgacgccaccatccggctgcacaacttcttcctgcccaagatcgagaagaacgagaagctgtgctccctgtactacgacgtgctgatgcccggctgcgtgttcctgcagcgggtggaggaccggggcgtgcccatctccatcgaccggctgaaggaggcccagtaccagctgacccacaacctgaacaaggcccgggagaagctgtacacctaccccgaggtgaagcagctggagcaggaccagaacgaggccttcaaccccaactccgtgaagcagctgcgggtgctgctgttcgactacgtgggcctgacccccaccggcatcctgaccgacaccggcgccgactccaccgacgccgaggccctgaacgagctggccacccagcaccccatcgccaagaccctgctggagatccggaagctgaccaagctgatctccacctacgtggagaagatcctgctgtccatcgacgccgacggctgcatccggaccggcttccacgagcacatgaccacctccggccggctgtcctcctccggcaagctgaacctgcagcagctgccccgggacgagtccatcatcaagggctgcgtggtggccccccccggctaccgggtgatcgcctgggacctgaccaccgccgaggtgtactacgccgccgtgctgtccggcgaccggaacatgcagcaggtgttcatcaacatgcggaacgagcccgacaagtaccccgacttccactccaacatcgcccacatggtgttcaagctgcagtgcgagccccgggacgtgaagaagctgttccccgccctgcggcaggccgccaaggccatcaccttcggcatcctgtacggctccggccccgccaaggtggcccactccgtgaacgaggccctgctggagcaggccgccaagaccggcgagcccttcgtggagtgcaccgtggccgacgccaaggagtacatcgagacctacttcggccagttcccccagctgaagcggtggatcgacaagtgccacgaccagatcaagaaccacggcttcatctactcccacttcggccggaagcggcggctgcacaacatccactccgaggaccggggcgtgcagggcgaggagatccggtccggcttcaacgccatcatccagtccgcctcctccgactccctgctgctgggcgccgtggacgccgacaacgagatcatctccctgggcctggagcaggagatgaagatcgtgatgctggtgcacgactccgtggtggccatcgtgcgggaggacctgatcgaccagtacaacgagatcctgatccggaacatccagaaggaccggggcatctccatccccggctgccccatcggcatcgactccgactccgaggccggcggctcccgggactactcctgcggcaagatgaagaagcagcacccctccatcgcctgcatcgacgacgacgagtacacccggtacgtgaagggcgtgctgctggacgccgagttcgagtacaagaagctggccgccatggacaaggagcaccccgaccactccaagtacaaggacgacaagttcatcgccgtgtgcaaggacctggacaacgtgaagcggatcctgggcgccggcggcggctccggcaagcggaccgccgacggctccggcggcggctcccccaagaagaagcggaaggtgtccgagtccgccacccccgagtccgtgtccggctggcggctgttcaagaagatctcctag

SEQ ID NO: 1165 - protein, 2307 aa, synthetic construct
  REGION 1..2307: note = Synthetic
MDKKYSIGLDIGTNSVGWAVITDEYKVPSKKFKVLGNTDRHSIKKNLIGALLFDSGETAEATRLKRTARRRYTRRKNRICYLQEIFSNEMAKVDDSFFHRLEESFLVEEDKKHERHPIFGNIVDEVAYHEKYPTIYHLRKKLVDSTDKADLRLIYLALAHMIKFRGHFLIEGDLNPDNSDVDKLFIQLVQTYNQLFEENPINASGVDAKAILSARLSKSRRLENLIAQLPGEKKNGLFGNLIALSLGLTPNFKSNFDLAEDAKLQLSKDTYDDDLDNLLAQIGDQYADLFLAAKNLSDAILLSDILRVNTEITKAPLSASMIKRYDEHHQDLTLLKALVRQQLPEKYKEIFFDQSKNGYAGYIDGGASQEEFYKFIKPILEKMDGTEELLVKLNREDLLRKQRTFDNGSIPHQIHLGELHAILRRQEDFYPFLKDNREKIEKILTFRIPYYVGPLARGNSRFAWMTRKSEETITPWNFEEVVDKGASAQSFIERMTNFDKNLPNEKVLPKHSLLYEYFTVYNELTKVKYVTEGMRKPAFLSGEQKKAIVDLLFKTNRKVTVKQLKEDYFKKIECFDSVEISGVEDRFNASLGTYHDLLKIIKDKDFLDNEENEDILEDIVLTLTLFEDREMIEERLKTYAHLFDDKVMKQLKRRRYTGWGRLSRKLINGIRDKQSGKTILDFLKSDGFANRNFMQLIHDDSLTFKEDIQKAQVSGQGDSLHEHIANLAGSPAIKKGILQTVKVVDELVKVMGRHKPENIVIEMARENQTTQKGQKNSRERMKRIEEGIKELGSQILKEHPVENTQLQNEKLYLYYLQNGRDMYVDQELDINRLSDYDVDAIVPQSFLKDDSIDNKVLTRSDKNRGKSDNVPSEEVVKKMKNYWRQLLNAKLITQRKFDNLTKAERGGLSELDKAGFIKRQLVETRQITKHVAQILDSRMNTKYDENDKLIREVKVITLKSKLVSDFRKDFQFYKVREINNYHHAHDAYLNAVVGTALIKKYPKLESEFVYGDYKVYDVRKMIAKSEQEIGKATAKYFFYSNIMNFFKTEITLANGEIRKRPLIETNGETGEIVWDKGRDFATVRKVLSMPQVNIVKKTEVQTGGFSKESILPKRNSDKLIARKKDWDPKKYGGFDSPTVAYSVLVVAKVEKGKSKKLKSVKELLGITIMERSSFEKNPIDFLEAKGYKEVKKDLIIKLPKYSLFELENGRKRMLASAGELQKGNELALPSKYVNFLYLASHYEKLKGSPEDNEQKQLFVEQHKHYLDEIIEQISEFSKRVILADANLDKVLSAYNKHRDKPIREQAENIIHLFTLTNLGAPAAFKYFDTTIDRKRYTSTKEVLDATLIHQSITGLYETRIDLSQLGGDGAPESATESGGTSTESEGSAGTSTESEGSAGSAGSTSGSSSGMKIAVVDKALNNTRYDKHFQLYGEEVDVFHMCNEKLSGRLLKKHITIGTPENPFDPNDYDFVILVGAEPFLYFAGKKGIGDYTGKRVEYNGYANWIASISPAQLHFKPEMKPVFDATVENIHDIINGREKIAKAGDYRPITDPDEAEEYIKMVYNMVIGPVAFASATSALYCRDGYLLGVSISHQEYQGVYIDSDCLTEVAVYYLQKILDSENHTIVFHNLKFDMHFYKYHLGLTFDKAHKERRLHDTMLQHYVLDERRGTHGLKSLAMKYTDMGDYDFELDKFKDDYCKAHKIKKEDFTYDLIPFDIMWPYAAKDTDATIRLHNFFLPKIEKNEKLCSLYYDVLMPGCVFLQRVEDRGVPISIDRLKEAQYQLTHNLNKAREKLYTYPEVKQLEQDQNEAFNPNSVKQLRVLLFDYVGLTPTGILTDTGADSTDAEALNELATQHPIAKTLLEIRKLTKLISTYVEKILLSIDADGCIRTGFHEHMTTSGRLSSSGKLNLQQLPRDESIIKGCVVAPPGYRVIAWDLTTAEVYYAAVLSGDRNMQQVFINMRNEPDKYPDFHSNIAHMVFKLQCEPRDVKKLFPALRQAAKAITFGILYGSGPAKVAHSVNEALLEQAAKTGEPFVECTVADAKEYIETYFGQFPQLKRWIDKCHDQIKNHGFIYSHFGRKRRLHNIHSEDRGVQGEEIRSGFNAIIQSASSDSLLLGAVDADNEIISLGLEQEMKIVMLVHDSVVAIVREDLIDQYNEILIRNIQKDRGISIPGCPIGIDSDSEAGGSRDYSCGKMKKQHPSIACIDDDEYTRYVKGVLLDAEFEYKKLAAMDKEHPDHSKYKDDKFIAVCKDLDNVKRILGAGGGSGKRTADGSGGGSPKKKRKVSESATPESVSGWRLFKKIS

SEQ ID NO: 1166 - RNA, 6864 nt, synthetic construct
  misc_feature 1..6864: note = Synthetic
  source 1..6864: mol_type = other RNA
atggacaagaagtactccatcggcctggacatcggcaccaactccgtgggctgggccgtgatcaccgacgagtacaaggtgccctccaagaagttcaaggtgctgggcaacaccgaccggcactccatcaagaagaacctgatcggcgccctgctgttcgactccggcgagaccgccgaggccacccggctgaagcggaccgcccggcggcggtacacccggcggaagaaccggatctgctacctgcaggagatcttctccaacgagatggccaaggtggacgactccttcttccaccggctggaggagtccttcctggtggaggaggacaagaagcacgagcggcaccccatcttcggcaacatcgtggacgaggtggcctaccacgagaagtaccccaccatctaccacctgcggaagaagctggtggactccaccgacaaggccgacctgcggctgatctacctggccctggcccacatgatcaagttccggggccacttcctgatcgagggcgacctgaaccccgacaactccgacgtggacaagctgttcatccagctggtgcagacctacaaccagctgttcgaggagaaccccatcaacgcctccggcgtggacgccaaggccatcctgtccgcccggctgtccaagtcccggcggctggagaacctgatcgcccagctgcccggcgagaagaagaacggcctgttcggcaacctgatcgccctgtccctgggcctgacccccaacttcaagtccaacttcgacctggccgaggacgccaagctgcagctgtccaaggacacctacgacgacgacctggacaacctgctggcccagatcggcgaccagtacgccgacctgttcctggccgccaagaacctgtccgacgccatcctgctgtccgacatcctgcgggtgaacaccgagatcaccaaggcccccctgtccgcctccatgatcaagcggtacgacgagcaccaccaggacctgaccctgctgaaggccctggtgcggcagcagctgcccgagaagtacaaggagatcttcttcgaccagtccaagaacggctacgccggctacatcgacggcggcgcctcccaggaggagttctacaagttcatcaagcccatcctggagaagatggacggcaccgaggagctgctggtgaagctgaaccgggaggacctgctgcggaagcagcggaccttcgacaacggctccatcccccaccagatccacctgggcgagctgcacgccatcctgcggcggcaggaggacttctaccccttcctgaaggacaaccgggagaagatcgagaagatcctgaccttccggatcccctactacgtgggccccctggcccggggcaactcccggttcgcctggatgacccggaagtccgaggagaccatcaccccctggaacttcgaggaggtggtggacaagggcgcctccgcccagtccttcatcgagcggatgaccaacttcgacaagaacctgcccaacgagaaggtgctgcccaagcactccctgctgtacgagtacttcaccgtgtacaacgagctgaccaaggtgaagtacgtgaccgagggcatgcggaagcccgccttcctgtccggcgagcagaagaaggccatcgtggacctgctgttcaagaccaaccggaaggtgaccgtgaagcagctgaaggaggactacttcaagaagatcgagtgcttcgactccgtggagatctccggcgtggaggaccggttcaacgcctccctgggcacctaccacgacctgctgaagatcatcaaggacaaggacttcctggacaacgaggagaacgaggacatcctggaggacatcgtgctgaccctgaccctgttcgaggaccgggagatgatcgaggagcggctgaagacctacgcccacctgttcgacgacaaggtgatgaagcagctgaagcggcggcggtacaccggctggggccggctgtcccggaagctgatcaacggcatccgggacaagcagtccggcaagaccatcctggacttcctgaagtccgacggcttcgccaaccggaacttcatgcagctgatccacgacgactccctgaccttcaaggaggacatccagaaggcccaggtgtccggccagggcgactccctgcacgagcacatcgccaacctggccggctcccccgccatcaagaagggcatcctgcagaccgtgaaggtggtggacgagctggtgaaggtgatgggccggcacaagcccgagaacatcgtgatcgagatggcccgggagaaccagaccacccagaagggccagaagaactcccgggagcggatgaagcggatcgaggagggcatcaaggagctgggctcccagatcctgaaggagcaccccgtggagaacacccagctgcagaacgagaagctgtacctgtactacctgcagaacggccgggacatgtacgtggaccaggagctggacatcaaccggctgtccgactacgacgtggacgccatcgtgccccagtccttcctgaaggacgactccatcgacaacaaggtgctgacccggtccgacaagaaccggggcaagtccgacaacgtgccctccgaggaggtggtgaagaagatgaagaactactggcggcagctgctgaacgccaagctgatcacccagcggaagttcgacaacctgaccaaggccgagcggggcggcctgtccgagctggacaaggccggcttcatcaagcggcagctggtggagacccggcagatcaccaagcacgtggcccagatcctggactcccggatgaacaccaagtacgacgagaacgacaagctgatccgggaggtgaaggtgatcaccctgaagtccaagctggtgtccgacttccggaaggacttccagttctacaaggtgcgggagatcaacaactaccaccacgcccacgacgcctacctgaacgccgtggtgggcaccgccctgatcaagaagtaccccaagctggagtccgagttcgtgtacggcgactacaaggtgtacgacgtgcggaagatgatcgccaagtccgagcaggagatcggcaaggccaccgccaagtacttcttctactccaacatcatgaacttcttcaagaccgagatcaccctggccaacggcgagatccggaagcggcccctgatcgagaccaacggcgagaccggcgagatcgtgtgggacaagggccgggacttcgccaccgtgcggaaggtgctgtccatgccccaggtgaacatcgtgaagaagaccgaggtgcagaccggcggcttctccaaggagtccatcctgcccaagcggaactccgacaagctgatcgcccggaagaaggactgggaccccaagaagtacggcggcttcgactcccccaccgtggcctactccgtgctggtggtggccaaggtggagaagggcaagtccaagaagctgaagtccgtgaaggagctgctgggcatcaccatcatggagcggtcctccttcgagaagaaccccatcgacttcctggaggccaagggctacaaggaggtgaagaaggacctgatcatcaagctgcccaagtactccctgttcgagctggagaacggccggaagcggatgctggcctccgccggcgagctgcagaagggcaacgagctggccctgccctccaagtacgtgaacttcctgtacctggcctcccactacgagaagctgaagggctcccccgaggacaacgagcagaagcagctgttcgtggagcagcacaagcactacctggacgagatcatcgagcagatctccgagttctccaagcgggtgatcctggccgacgccaacctggacaaggtgctgtccgcctacaacaagcaccgggacaagcccatccgggagcaggccgagaacatcatccacctgttcaccctgaccaacctgggcgcccccgccgccttcaagtacttcgacaccaccatcgaccggaagcggtacacctccaccaaggaggtgctggacgccaccctgatccaccagtccatcaccggcctgtacgagacccggatcgacctgtcccagctgggcggcgacggcgcccccgagtccgccaccgagtccggcggcacctccaccgagtccgagggctccgccggcacctccaccgagtccgagggctccgccggctccgccggctccacctccggctcctcctccggcatgaagatcgccgtggtggacaaggccctgaacaacacccggtacgacaagcacttccagctgtacggcgaggaggtggacgtgttccacatgtgcaacgagaagctgtccggccggctgctgaagaagcacatcaccatcggcacccccgagaaccccttcgaccccaacgactacgacttcgtgatcctggtgggcgccgagcccttcctgtacttcgccggcaagaagggcatcggcgactacaccggcaagcgggtggagtacaacggctacgccaactggatcgcctccatctcccccgcccagctgcacttcaagcccgagatgaagcccgtgttcgacgccaccgtggagaacatccacgacatcatcaacggccgggagaagatcgccaaggccggcgactaccggcccatcaccgaccccgacgaggccgaggagtacatcaagatggtgtacaacatggtgatcggccccgtggccttcgcctccgccacctccgccctgtactgccgggacggctacctgctgggcgtgtccatctcccaccaggagtaccagggcgtgtacatcgactccgactgcctgaccgaggtggccgtgtactacctgcagaagatcctggactccgagaaccacaccatcgtgttccacaacctgaagttcgacatgcacttctacaagtaccacctgggcctgaccttcgacaaggcccacaaggagcggcggctgcacgacaccatgctgcagcactacgtgctggacgagcggcggggcacccacggcctgaagtccctggccatgaagtacaccgacatgggcgactacgacttcgagctggacaagttcaaggacgactactgcaaggcccacaagatcaagaaggaggacttcacctacgacctgatccccttcgacatcatgtggccctacgccgccaaggacaccgacgccaccatccggctgcacaacttcttcctgcccaagatcgagaagaacgagaagctgtgctccctgtactacgacgtgctgatgcccggctgcgtgttcctgcagcgggtggaggaccggggcgtgcccatctccatcgaccggctgaaggaggcccagtaccagctgacccacaacctgaacaaggcccgggagaagctgtacacctaccccgaggtgaagcagctggagcaggaccagaacgaggccttcaaccccaactccgtgaagcagctgcgggtgctgctgttcgactacgtgggcctgacccccaccggcatcctgaccgacaccggcgccgactccaccgacgccgaggccctgaacgagctggccacccagcaccccatcgccaagaccctgctggagatccggaagctgaccaagctgatctccacctacgtggagaagatcctgctgtccatcgacgccgacggctgcatccggaccggcttccacgagcacatgaccacctccggccggctgtcctcctccggcaagctgaacctgcagcagctgccccgggacgagtccatcatcaagggctgcgtggtggccccccccggctaccgggtgatcgcctgggacctgaccaccgccgaggtgtactacgccgccgtgctgtccggcgaccggaacatgcagcaggtgttcatcaacatgcggaacgagcccgacaagtaccccgacttccactccaacatcgcccacatggtgttcaagctgcagtgcgagccccgggacgtgaagaagctgttccccgccctgcggcaggccgccaaggccatcaccttcggcatcctgtacggctccggccccgccaaggtggcccactccgtgaacgaggccctgctggagcaggccgccaagaccggcgagcccttcgtggagtgcaccgtggccgacgccaaggagtacatcgagacctacttcggccagttcccccagctgaagcggtggatcgacaagtgccacgaccagatcaagaaccacggcttcatctactcccacttcggccggaagcggcggctgcacaacatccactccgaggaccggggcgtgcagggcgaggagatccggtccggcttcaacgccatcatccagtccgcctcctccgactccctgctgctgggcgccgtggacgccgacaacgagatcatctccctgggcctggagcaggagatgaagatcgtgatgctggtgcacgactccgtggtggccatcgtgcgggaggacctgatcgaccagtacaacgagatcctgatccggaacatccagaaggaccggggcatctccatccccggctgccccatcggcatcgactccgactccgaggccggcggctcccgggactactcctgcggcaagatgaagaagcagcacccctccatcgcctgcatcgacgacgacgagtacacccggtacgtgaagggcgtgctgctggacgccgagttcgagtacaagaagctggccgccatggacaaggagcaccccgaccactccaagtacaaggacgacaagttcatcgccgtgtgcaaggacctggacaacgtgaagcggatcctgggcgccggcggcggctccggcaagcggaccgccgacggctccggcggcggctcccccaagaagaagcggaaggtg

SEQ ID NO: 1167 - protein, 2288 aa, synthetic construct
  REGION 1..2288: note = Synthetic
MDKKYSIGLDIGTNSVGWAVITDEYKVPSKKFKVLGNTDRHSIKKNLIGALLFDSGETAEATRLKRTARRRYTRRKNRICYLQEIFSNEMAKVDDSFFHRLEESFLVEEDKKHERHPIFGNIVDEVAYHEKYPTIYHLRKKLVDSTDKADLRLIYLALAHMIKFRGHFLIEGDLNPDNSDVDKLFIQLVQTYNQLFEENPINASGVDAKAILSARLSKSRRLENLIAQLPGEKKNGLFGNLIALSLGLTPNFKSNFDLAEDAKLQLSKDTYDDDLDNLLAQIGDQYADLFLAAKNLSDAILLSDILRVNTEITKAPLSASMIKRYDEHHQDLTLLKALVRQQLPEKYKEIFFDQSKNGYAGYIDGGASQEEFYKFIKPILEKMDGTEELLVKLNREDLLRKQRTFDNGSIPHQIHLGELHAILRRQEDFYPFLKDNREKIEKILTFRIPYYVGPLARGNSRFAWMTRKSEETITPWNFEEVVDKGASAQSFIERMTNFDKNLPNEKVLPKHSLLYEYFTVYNELTKVKYVTEGMRKPAFLSGEQKKAIVDLLFKTNRKVTVKQLKEDYFKKIECFDSVEISGVEDRFNASLGTYHDLLKIIKDKDFLDNEENEDILEDIVLTLTLFEDREMIEERLKTYAHLFDDKVMKQLKRRRYTGWGRLSRKLINGIRDKQSGKTILDFLKSDGFANRNFMQLIHDDSLTFKEDIQKAQVSGQGDSLHEHIANLAGSPAIKKGILQTVKVVDELVKVMGRHKPENIVIEMARENQTTQKGQKNSRERMKRIEEGIKELGSQILKEHPVENTQLQNEKLYLYYLQNGRDMYVDQELDINRLSDYDVDAIVPQSFLKDDSIDNKVLTRSDKNRGKSDNVPSEEVVKKMKNYWRQLLNAKLITQRKFDNLTKAERGGLSELDKAGFIKRQLVETRQITKHVAQILDSRMNTKYDENDKLIREVKVITLKSKLVSDFRKDFQFYKVREINNYHHAHDAYLNAVVGTALIKKYPKLESEFVYGDYKVYDVRKMIAKSEQEIGKATAKYFFYSNIMNFFKTEITLANGEIRKRPLIETNGETGEIVWDKGRDFATVRKVLSMPQVNIVKKTEVQTGGFSKESILPKRNSDKLIARKKDWDPKKYGGFDSPTVAYSVLVVAKVEKGKSKKLKSVKELLGITIMERSSFEKNPIDFLEAKGYKEVKKDLIIKLPKYSLFELENGRKRMLASAGELQKGNELALPSKYVNFLYLASHYEKLKGSPEDNEQKQLFVEQHKHYLDEIIEQISEFSKRVILADANLDKVLSAYNKHRDKPIREQAENIIHLFTLTNLGAPAAFKYFDTTIDRKRYTSTKEVLDATLIHQSITGLYETRIDLSQLGGDGAPESATESGGTSTESEGSAGTSTESEGSAGSAGSTSGSSSGMKIAVVDKALNNTRYDKHFQLYGEEVDVFHMCNEKLSGRLLKKHITIGTPENPFDPNDYDFVILVGAEPFLYFAGKKGIGDYTGKRVEYNGYANWIASISPAQLHFKPEMKPVFDATVENIHDIINGREKIAKAGDYRPITDPDEAEEYIKMVYNMVIGPVAFASATSALYCRDGYLLGVSISHQEYQGVYIDSDCLTEVAVYYLQKILDSENHTIVFHNLKFDMHFYKYHLGLTFDKAHKERRLHDTMLQHYVLDERRGTHGLKSLAMKYTDMGDYDFELDKFKDDYCKAHKIKKEDFTYDLIPFDIMWPYAAKDTDATIRLHNFFLPKIEKNEKLCSLYYDVLMPGCVFLQRVEDRGVPISIDRLKEAQYQLTHNLNKAREKLYTYPEVKQLEQDQNEAFNPNSVKQLRVLLFDYVGLTPTGILTDTGADSTDAEALNELATQHPIAKTLLEIRKLTKLISTYVEKILLSIDADGCIRTGFHEHMTTSGRLSSSGKLNLQQLPRDESIIKGCVVAPPGYRVIAWDLTTAEVYYAAVLSGDRNMQQVFINMRNEPDKYPDFHSNIAHMVFKLQCEPRDVKKLFPALRQAAKAITFGILYGSGPAKVAHSVNEALLEQAAKTGEPFVECTVADAKEYIETYFGQFPQLKRWIDKCHDQIKNHGFIYSHFGRKRRLHNIHSEDRGVQGEEIRSGFNAIIQSASSDSLLLGAVDADNEIISLGLEQEMKIVMLVHDSVVAIVREDLIDQYNEILIRNIQKDRGISIPGCPIGIDSDSEAGGSRDYSCGKMKKQHPSIACIDDDEYTRYVKGVLLDAEFEYKKLAAMDKEHPDHSKYKDDKFIAVCKDLDNVKRILGAGGGSGKRTADGSGGGSPKKKRKV

SEQ ID NO: 1168 - RNA, 8059 nt, synthetic construct
  misc_feature 1..8059: note = Synthetic
  source 1..8059: mol_type = other RNA
gggaagctcagaataaacgctcaactttggccggatctgccaccatgaaacggacagccgacggaagcgagttcgagtcaccaaagaagaagcggaaagtcgacaagaagtactccatcggcctggacatcggcaccaactccgtgggctgggccgtgatcaccgacgagtacaaggtgccctccaagaagttcaaggtgctgggcaacaccgaccggcactccatcaagaagaacctgatcggcgccctgctgttcgactccggcgagaccgccgaggccacccggctgaagcggaccgcccggcggcggtacacccggcggaagaaccggatctgctacctgcaggagatcttctccaacgagatggccaaggtggacgactccttcttccaccggctggaggagtccttcctggtggaggaggacaagaagcacgagcggcaccccatcttcggcaacatcgtggacgaggtggcctaccacgagaagtaccccaccatctaccacctgcggaagaagctggtggactccaccgacaaggccgacctgcggctgatctacctggccctggcccacatgatcaagttccggggccacttcctgatcgagggcgacctgaaccccgacaactccgacgtggacaagctgttcatccagctggtgcagacctacaaccagctgttcgaggagaaccccatcaacgcctccggcgtggacgccaaggccatcctgtccgcccggctgtccaagtcccggcggctggagaacctgatcgcccagctgcccggcgagaagaagaacggcctgttcggcaacctgatcgccctgtccctgggcctgacccccaacttcaagtccaacttcgacctggccgaggacgccaagctgcagctgtccaaggacacctacgacgacgacctggacaacctgctggcccagatcggcgaccagtacgccgacctgttcctggccgccaagaacctgtccgacgccatcctgctgtccgacatcctgcgggtgaacaccgagatcaccaaggcccccctgtccgcctccatgatcaagcggtacgacgagcaccaccaggacctgaccctgctgaaggccctggtgcggcagcagctgcccgagaagtacaaggagatcttcttcgaccagtccaagaacggctacgccggctacatcgacggcggcgcctcccaggaggagttctacaagttcatcaagcccatcctggagaagatggacggcaccgaggagctgctggtgaagctgaaccgggaggacctgctgcggaagcagcggaccttcgacaacggctccatcccccaccagatccacctgggcgagctgcacgccatcctgcggcggcaggaggacttctaccccttcctgaaggacaaccgggagaagatcgagaagatcctgaccttccggatcccctactacgtgggccccctggcccggggcaactcccggttcgcctggatgacccggaagtccgaggagaccatcaccccctggaacttcgaggaggtggtggacaagggcgcctccgcccagtccttcatcgagcggatgaccaacttcgacaagaacctgcccaacgagaaggtgctgcccaagcactccctgctgtacgagtacttcaccgtgtacaacgagctgaccaaggtgaagtacgtgaccgagggcatgcggaagcccgccttcctgtccggcgagcagaagaaggccatcgtggacctgctgttcaagaccaaccggaaggtgaccgtgaagcagctgaaggaggactacttcaagaagatcgagtgcttcgactccgtggagatctccggcgtggaggaccggttcaacgcctccctgggcacctaccacgacctgctgaagatcatcaaggacaaggacttcctggacaacgaggagaacgaggacatcctggaggacatcgtgctgaccctgaccctgttcgaggaccgggagatgatcgaggagcggctgaagacctacgcccacctgttcgacgacaaggtgatgaagcagctgaagcggcggcggtacaccggctggggccggctgtcccggaagctgatcaacggcatccgggacaagcagtccggcaagaccatcctggacttcctgaagtccgacggcttcgccaaccggaacttcatgcagctgatccacgacgactccctgaccttcaaggaggacatccagaaggcccaggtgtccggccagggcgactccctgcacgagcacatcgccaacctggccggctcccccgccatcaagaagggcatcctgcagaccgtgaaggtggtggacgagctggtgaaggtgatgggccggcacaagcccgagaacatcgtgatcgagatggcccgggagaaccagaccacccagaagggccagaagaactcccgggagcggatgaagcggatcgaggagggcatcaaggagctgggctcccagatcctgaaggagcaccccgtggagaacacccagctgcagaacgagaagctgtacctgtactacctgcagaacggccgggacatgtacgtggaccaggagctggacatcaaccggctgtccgactacgacgtggacgccatcgtgccccagtccttcctgaaggacgactccatcgacaacaaggtgctgacccggtccgacaagaaccggggcaagtccgacaacgtgccctccgaggaggtggtgaagaagatgaagaactactggcggcagctgctgaacgccaagctgatcacccagcggaagttcgacaacctgaccaaggccgagcggggcggcctgtccgagctggacaaggccggcttcatcaagcggcagctggtggagacccggcagatcaccaagcacgtggcccagatcctggactcccggatgaacaccaagtacgacgagaacgacaagctgatccgggaggtgaaggtgatcaccctgaagtccaagctggtgtccgacttccggaaggacttccagttctacaaggtgcgggagatcaacaactaccaccacgcccacgacgcctacctgaacgccgtggtgggcaccgccctgatcaagaagtaccccaagctggagtccgagttcgtgtacggcgactacaaggtgtacgacgtgcggaagatgatcgccaagtccgagcaggagatcggcaaggccaccgccaagtacttcttctactccaacatcatgaacttcttcaagaccgagatcaccctggccaacggcgagatccggaagcggcccctgatcgagaccaacggcgagaccggcgagatcgtgtgggacaagggccgggacttcgccaccgtgcggaaggtgctgtccatgccccaggtgaacatcgtgaagaagaccgaggtgcagaccggcggcttctccaaggagtccatcctgcccaagcggaactccgacaagctgatcgcccggaagaaggactgggaccccaagaagtacggcggcttcgactcccccaccgtggcctactccgtgctggtggtggccaaggtggagaagggcaagtccaagaagctgaagtccgtgaaggagctgctgggcatcaccatcatggagcggtcctccttcgagaagaaccccatcgacttcctggaggccaagggctacaaggaggtgaagaaggacctgatcatcaagctgcccaagtactccctgttcgagctggagaacggccggaagcggatgctggcctccgccggcgagctgcagaagggcaacgagctggccctgccctccaagtacgtgaacttcctgtacctggcctcccactacgagaagctgaagggctcccccgaggacaacgagcagaagcagctgttcgtggagcagcacaagcactacctggacgagatcatcgagcagatctccgagttctccaagcgggtgatcctggccgacgccaacctggacaaggtgctgtccgcctacaacaagcaccgggacaagcccatccgggagcaggccgagaacatcatccacctgttcaccctgaccaacctgggcgcccccgccgccttcaagtacttcgacaccaccatcgaccggaagcggtacacctccaccaaggaggtgctggacgccaccctgatccaccagtccatcaccggcctgtacgagacccggatcgacctgtcccagctgggcggcgactccggcggaagctctggtggcagcaagcggaccgccgacggctctgaattcgagagccctaagaagaaaagaaaggtgagcggaggctctagcggcggaagcatgaagatcgccgtggtggacaaggccctgaacaacacccggtacgacaagcacttccagctgtacggcgaggaggtggacgtgttccacatgtgcaacgagaagctgtccggccggctgctgaagaagcacatcaccatcggcacccccgagaaccccttcgaccccaacgactacgacttcgtgatcctggtgggcgccgagcccttcctgtacttcgccggcaagaagggcatcggcgactacaccggcaagcgggtggagtacaacggctacgccaactggatcgcctccatctcccccgcccagctgcacttcaagcccgagatgaagcccgtgttcgacgccaccgtggagaacatccacgacatcatcaacggccgggagaagatcgccaaggccggcgactaccggcccatcaccgaccccgacgaggccgaggagtacatcaagatggtgtacaacatggtgatcggccccgtggccttcgcctccgccacctccgccctgtactgccgggacggctacctgctgggcgtgtccatctcccaccaggagtaccagggcgtgtacatcgactccgactgcctgaccgaggtggccgtgtactacctgcagaagatcctggactccgagaaccacaccatcgtgttccacaacctgaagttcgacatgcacttctacaagtaccacctgggcctgaccttcgacaaggcccacaaggagcggcggctgcacgacaccatgctgcagcactacgtgctggacgagcggcggggcacccacggcctgaagtccctggccatgaagtacaccgacatgggcgactacgacttcgagctggacaagttcaaggacgactactgcaaggcccacaagatcaagaaggaggacttcacctacgacctgatccccttcgacatcatgtggccctacgccgccaaggacaccgacgccaccatccggctgcacaacttcttcctgcccaagatcgagaagaacgagaagctgtgctccctgtactacgacgtgctgatgcccggctgcgtgttcctgcagcgggtggaggaccggggcgtgcccatctccatcgaccggctgaaggaggcccagtaccagctgacccacaacctgaacaaggcccgggagaagctgtacacctaccccgaggtgaagcagctggagcaggaccagaacgaggccttcaaccccaactccgtgaagcagctgcgggtgctgctgttcgactacgtgggcctgacccccaccggcaagctgaccgacaccggcgccgactccaccgacgccgaggccctgaacgagctggccacccagcaccccatcgccaagaccctgctggagatccggaagctgaccaagctgatctccacctacgtggagaagatcctgctgtccatcgacgccgacggctgcatccggaccggcttccacgagcacatgaccacctccggccggctgtcctcctccggcaagctgaacctgcagcagctgccccgggacgagtccatcatcaagggctgcgtggtggccccccccggctaccgggtgatcgcctgggacctgaccaccgccgaggtgtactacgccgccgtgctgtccggcgaccggaacatgcagcaggtgttcatcaacatgcggaacgagcccgacaagtaccccgacttccactccaacatcgcccacatggtgttcaagctgcagtgcgagccccgggacgtgaagaagctgttccccgccctgcggcaggccgccaaggccatcaccttcggcatcctgtacggctccggccccgccaaggtggcccactccgtgaacgaggccctgctggagcaggccgccaagaccggcgagcccttcgtggagtgcaccgtggccgacgccaaggagtacatcgagacctacttcggccagttcccccagctgaagcggtggatcgacaagtgccacgaccagatcaagaaccacggcttcatctactcccacttcggccggaagcggcggctgcacaacatccactccgaggaccggggcgtgcagggcgaggagatccggtccggcttcaacgccatcatccagtccgcctcctccgactccctgctgctgggcgccgtggacgccgacaacgagatcatctccctgggcctggagcaggagatgaagatcgtgatgctggtgcacgactccgtggtggccatcgtgcgggaggacctgatcgaccagtacaacgagatcctgatccggaacatccagaaggaccggggcatctccatccccggctgccccatcggcatcgactccgactccgaggccggcggctcccgggactactcctgcggcaagatgaagaagcagcacccctccatcgcctgcatcgacgacgacgagtacacccggtacgtgaagggcgtgctgctggacgccgagttcgagtacaagaagctggccgccatggacaaggagcaccccgaccactccaagtacaaggacgacaagttcatcgccgtgtgcaaggacctggacaacgtgaagcggatcctgggcgccggcgcccccgagtccgccaccgagtccggcggcacctccaccgagtccgagggctccgccggcacctccaccgagtccgagggctccgccggctccgccggctccacctccggctccggctcctccgcctccaacttcacccagttcgtgctggtggacaacggcggcaccggcgacgtgaccgtggccccctccaacttcgccaacggcgtggccgagtggatctcctccaactcccggtcccaggcctacaaggtgacctgctccgtgcggcagtcctccgcccagaaccggaagtacaccatcaaggtggaggtgcccaaggtggccacccagaccgtgggcggcgtggagctgcccgtggccgcctggcggtcctacctgaacatggagctgaccatccccatcttcgccaccaactccgactgcgagctgatcgtgaaggccatgcagggcctgctgaaggacggcaaccccatcccctccgccatcgccgccaactccggcatctactctggcggctcaaaaagaaccgccgacggcagcgaattcgagtctcccaagaagaagaggaaagtcggctctggccctgccgctaagagagtgaagctggactccgagtccgccacccccgagtccgtgtccggctggcggctgttcaagaagatctcctagctagcaccagcctcaagaacacccgaatggagtctctaagctacataataccaacttacactttacaaaatgttgtcccccaaaatgtagccattcgtatctgctcctaataaaaagaaagtttcttcacattctctcgagaaaaaaaaaaaatggaaaaaaaaaaaacggaaaaaaaaaaaaggtaaaaaaaaaaaatataaaaaaaaaaaacataaaaaaaaaaaacgaaaaaaaaaaaacgtaaaaaaaaaaaactcaaaaaaaaaaaagataaaaaaaaaaaacctaaaaaaaaaaaatgtaaaaaaaaaaaagggaaaaaaaaaaaacgcaaaaaaaaaaaacacaaaaaaaaaaaatgcaaaaaaaaaaaatcgaaaaaaaaaaaatctaaaaaaaaaaaacgaaaaaaaaaaaacccaaaaaaaaaaaagacaaaaaaaaaaaatagaaaaaaaaaaagttaaaaaaaaaaaactgaaaaaaaaaaaatttaaaaaaaaaaaatctag

SEQ ID NO: 1169 - RNA, 7500 nt, synthetic construct
  misc_feature 1..7500: note = Synthetic
  source 1..7500: mol_type = other RNA
atgaaacggacagccgacggaagcgagttcgagtcaccaaagaagaagcggaaagtcgacaagaagtactccatcggcctggacatcggcaccaactccgtgggctgggccgtgatcaccgacgagtacaaggtgccctccaagaagttcaaggtgctgggcaacaccgaccggcactccatcaagaagaacctgatcggcgccctgctgttcgactccggcgagaccgccgaggccacccggctgaagcggaccgcccggcggcggtacacccggcggaagaaccggatctgctacctgcaggagatcttctccaacgagatggccaaggtggacgactccttcttccaccggctggaggagtccttcctggtggaggaggacaagaagcacgagcggcaccccatcttcggcaacatcgtggacgaggtggcctaccacgagaagtaccccaccatctaccacctgcggaagaagctggtggactccaccgacaaggccgacctgcggctgatctacctggccctggcccacatgatcaagttccggggccacttcctgatcgagggcgacctgaaccccgacaactccgacgtggacaagctgttcatccagctggtgcagacctacaaccagctgttcgaggagaaccccatcaacgcctccggcgtggacgccaaggccatcctgtccgcccggctgtccaagtcccggcggctggagaacctgatcgcccagctgcccggcgagaagaagaacggcctgttcggcaacctgatcgccctgtccctgggcctgacccccaacttcaagtccaacttcgacctggccgaggacgccaagctgcagctgtccaaggacacctacgacgacgacctggacaacctgctggcccagatcggcgaccagtacgccgacctgttcctggccgccaagaacctgtccgacgccatcctgctgtccgacatcctgcgggtgaacaccgagatcaccaaggcccccctgtccgcctccatgatcaagcggtacgacgagcaccaccaggacctgaccctgctgaaggccctggtgcggcagcagctgcccgagaagtacaaggagatcttcttcgaccagtccaagaacggctacgccggctacatcgacggcggcgcctcccaggaggagttctacaagttcatcaagcccatcctggagaagatggacggcaccgaggagctgctggtgaagctgaaccgggaggacctgctgcggaagcagcggaccttcgacaacggctccatcccccaccagatccacctgggcgagctgcacgccatcctgcggcggcaggaggacttctaccccttcctgaaggacaaccgggagaagatcgagaagatcctgaccttccggatcccctactacgtgggccccctggcccggggcaactcccggttcgcctggatgacccggaagtccgaggagaccatcaccccctggaacttcgaggaggtggtggacaagggcgcctccgcccagtccttcatcgagcggatgaccaacttcgacaagaacctgcccaacgagaaggtgctgcccaagcactccctgctgtacgagtacttcaccgtgtacaacgagctgaccaaggtgaagtacgtgaccgagggcatgcggaagcccgccttcctgtccggcgagcagaagaaggccatcgtggacctgctgttcaagaccaaccggaaggtgaccgtgaagcagctgaaggaggactacttcaagaagatcgagtgcttcgactccgtggagatctccggcgtggaggaccggttcaacgcctccctgggcacctaccacgacctgctgaagatcatcaaggacaaggacttcctggacaacgaggagaacgaggacatcctggaggacatcgtgctgaccctgaccctgttcgaggaccgggagatgatcgaggagcggctgaagacctacgcccacctgttcgacgacaaggtgatgaagcagctgaagcggcggcggtacaccggctggggccggctgtcccggaagctgatcaacggcatccgggacaagcagtccggcaagaccatcctggacttcctgaagtccgacggcttcgccaaccggaacttcatgcagctgatccacgacgactccctgaccttcaaggaggacatccagaaggcccaggtgtccggccagggcgactccctgcacgagcacatcgccaacctggccggctcccccgccatcaagaagggcatcctgcagaccgtgaaggtggtggacgagctggtgaaggtgatgggccggcacaagcccgagaacatcgtgatcgagatggcccgggagaaccagaccacccagaagggccagaagaactcccgggagcggatgaagcggatcgaggagggcatcaaggagctgggctcccagatcctgaaggagcaccccgtggagaacacccagctgcagaacgagaagctgtacctgtactacctgcagaacggccgggacatgtacgtggaccaggagctggacatcaaccggctgtccgactacgacgtggacgccatcgtgccccagtccttcctgaaggacgactccatcgacaacaaggtgctgacccggtccgacaagaaccggggcaagtccgacaacgtgccctccgaggaggtggtgaagaagatgaagaactactggcggcagctgctgaacgccaagctgatcacccagcggaagttcgacaacctgaccaaggccgagcggggcggcctgtccgagctggacaaggccggcttcatcaagcggcagctggtggagacccggcagatcaccaagcacgtggcccagatcctggactcccggatgaacaccaagtacgacgagaacgacaagctgatccgggaggtgaaggtgatcaccctgaagtccaagctggtgtccgacttccggaaggacttccagttctacaaggtgcgggagatcaacaactaccaccacgcccacgacgcctacctgaacgccgtggtgggcaccgccctgatcaagaagtaccccaagctggagtccgagttcgtgtacggcgactacaaggtgtacgacgtgcggaagatgatcgccaagtccgagcaggagatcggcaaggccaccgccaagtacttcttctactccaacatcatgaacttcttcaagaccgagatcaccctggccaacggcgagatccggaagcggcccctgatcgagaccaacggcgagaccggcgagatcgtgtgggacaagggccgggacttcgccaccgtgcggaaggtgctgtccatgccccaggtgaacatcgtgaagaagaccgaggtgcagaccggcggcttctccaaggagtccatcctgcccaagcggaactccgacaagctgatcgcccggaagaaggactgggaccccaagaagtacggcggcttcgactcccccaccgtggcctactccgtgctggtggtggccaaggtggagaagggcaagtccaagaagctgaagtccgtgaaggagctgctgggcatcaccatcatggagcggtcctccttcgagaagaaccccatcgacttcctggaggccaagggctacaaggaggtgaagaaggacctgatcatcaagctgcccaagtactccctgttcgagctggagaacggccggaagcggatgctggcctccgccggcgagctgcagaagggcaacgagctggccctgccctccaagtacgtgaacttcctgtacctggcctcccactacgagaagctgaagggctcccccgaggacaacgagcagaagcagctgttcgtggagcagcacaagcactacctggacgagatcatcgagcagatctccgagttctccaagcgggtgatcctggccgacgccaacctggacaaggtgctgtccgcctacaacaagcaccgggacaagcccatccgggagcaggccgagaacatcatccacctgttcaccctgaccaacctgggcgcccccgccgccttcaagtacttcgacaccaccatcgaccggaagcggtacacctccaccaaggaggtgctggacgccaccctgatccaccagtccatcaccggcctgtacgagacccggatcgacctgtcccagctgggcggcgactccggcggaagctctggtggcagcaagcggaccgccgacggctctgaattcgagagccctaagaagaaaagaaaggtgagcggaggctctagcggcggaagcatgaagatcgccgtggtggacaaggccctgaacaacacccggtacgacaagcacttccagctgtacggcgaggaggtggacgtgttccacatgtgcaacgagaagctgtccggccggctgctgaagaagcacatcaccatcggcacccccgagaaccccttcgaccccaacgactacgacttcgtgatcctggtgggcgccgagcccttcctgtacttcgccggcaagaagggcatcggcgactacaccggcaagcgggtggagtacaacggctacgccaactggatcgcctccatctcccccgcccagctgcacttcaagcccgagatgaagcccgtgttcgacgccaccgtggagaacatccacgacatcatcaacggccgggagaagatcgccaaggccggcgactaccggcccatcaccgaccccgacgaggccgaggagtacatcaagatggtgtacaacatggtgatcggccccgtggccttcgcctccgccacctccgccctgtactgccgggacggctacctgctgggcgtgtccatctcccaccaggagtaccagggcgtgtacatcgactccgactgcctgaccgaggtggccgtgtactacctgcagaagatcctggactccgagaaccacaccatcgtgttccacaacctgaagttcgacatgcacttctacaagtaccacctgggcctgaccttcgacaaggcccacaaggagcggcggctgcacgacaccatgctgcagcactacgtgctggacgagcggcggggcacccacggcctgaagtccctggccatgaagtacaccgacatgggcgactacgacttcgagctggacaagttcaaggacgactactgcaaggcccacaagatcaagaaggaggacttcacctacgacctgatccccttcgacatcatgtggccctacgccgccaaggacaccgacgccaccatccggctgcacaacttcttcctgcccaagatcgagaagaacgagaagctgtgctccctgtactacgacgtgctgatgcccggctgcgtgttcctgcagcgggtggaggaccggggcgtgcccatctccatcgaccggctgaaggaggcccagtaccagctgacccacaacctgaacaaggcccgggagaagctgtacacctaccccgaggtgaagcagctggagcaggaccagaacgaggccttcaaccccaactccgtgaagcagctgcgggtgctgctgttcgactacgtgggcctgacccccaccggcaagctgaccgacaccggcgccgactccaccgacgccgaggccctgaacgagctggccacccagcaccccatcgccaagaccctgctggagatccggaagctgaccaagctgatctccacctacgtggagaagatcctgctgtccatcgacgccgacggctgcatccggaccggcttccacgagcacatgaccacctccggccggctgtcctcctccggcaagctgaacctgcagcagctgccccgggacgagtccatcatcaagggctgcgtggtggccccccccggctaccgggtgatcgcctgggacctgaccaccgccgaggtgtactacgccgccgtgctgtccggcgaccggaacatgcagcaggtgttcatcaacatgcggaacgagcccgacaagtaccccgacttccactccaacatcgcccacatggtgttcaagctgcagtgcgagccccgggacgtgaagaagctgttccccgccctgcggcaggccgccaaggccatcaccttcggcatcctgtacggctccggccccgccaaggtggcccactccgtgaacgaggccctgctggagcaggccgccaagaccggcgagcccttcgtggagtgcaccgtggccgacgccaaggagtacatcgagacctacttcggccagttcccccagctgaagcggtggatcgacaagtgccacgaccagatcaagaaccacggcttcatctactcccacttcggccggaagcggcggctgcacaacatccactccgaggaccggggcgtgcagggcgaggagatccggtccggcttcaacgccatcatccagtccgcctcctccgactccctgctgctgggcgccgtggacgccgacaacgagatcatctccctgggcctggagcaggagatgaagatcgtgatgctggtgcacgactccgtggtggccatcgtgcgggaggacctgatcgaccagtacaacgagatcctgatccggaacatccagaaggaccggggcatctccatccccggctgccccatcggcatcgactccgactccgaggccggcggctcccgggactactcctgcggcaagatgaagaagcagcacccctccatcgcctgcatcgacgacgacgagtacacccggtacgtgaagggcgtgctgctggacgccgagttcgagtacaagaagctggccgccatggacaaggagcaccccgaccactccaagtacaaggacgacaagttcatcgccgtgtgcaaggacctggacaacgtgaagcggatcctgggcgccggcgcccccgagtccgccaccgagtccggcggcacctccaccgagtccgagggctccgccggcacctccaccgagtccgagggctccgccggctccgccggctccacctccggctccggctcctccgcctccaacttcacccagttcgtgctggtggacaacggcggcaccggcgacgtgaccgtggccccctccaacttcgccaacggcgtggccgagtggatctcctccaactcccggtcccaggcctacaaggtgacctgctccgtgcggcagtcctccgcccagaaccggaagtacaccatcaaggtggaggtgcccaaggtggccacccagaccgtgggcggcgtggagctgcccgtggccgcctggcggtcctacctgaacatggagctgaccatccccatcttcgccaccaactccgactgcgagctgatcgtgaaggccatgcagggcctgctgaaggacggcaaccccatcccctccgccatcgccgccaactccggcatctactctggcggctcaaaaagaaccgccgacggcagcgaattcgagtctcccaagaagaagaggaaagtcggctctggccctgccgctaagagagtgaagctggactccgagtccgccacccccgagtccgtgtccggctggcggctgttcaagaagatctcctag

SEQ ID NO: 1170 - protein, 2499 aa, synthetic construct
  REGION 1..2499: note = Synthetic
MKRTADGSEFESPKKKRKVDKKYSIGLDIGTNSVGWAVITDEYKVPSKKFKVLGNTDRHSIKKNLIGALLFDSGETAEATRLKRTARRRYTRRKNRICYLQEIFSNEMAKVDDSFFHRLEESFLVEEDKKHERHPIFGNIVDEVAYHEKYPTIYHLRKKLVDSTDKADLRLIYLALAHMIKFRGHFLIEGDLNPDNSDVDKLFIQLVQTYNQLFEENPINASGVDAKAILSARLSKSRRLENLIAQLPGEKKNGLFGNLIALSLGLTPNFKSNFDLAEDAKLQLSKDTYDDDLDNLLAQIGDQYADLFLAAKNLSDAILLSDILRVNTEITKAPLSASMIKRYDEHHQDLTLLKALVRQQLPEKYKEIFFDQSKNGYAGYIDGGASQEEFYKFIKPILEKMDGTEELLVKLNREDLLRKQRTFDNGSIPHQIHLGELHAILRRQEDFYPFLKDNREKIEKILTFRIPYYVGPLARGNSRFAWMTRKSEETITPWNFEEVVDKGASAQSFIERMTNFDKNLPNEKVLPKHSLLYEYFTVYNELTKVKYVTEGMRKPAFLSGEQKKAIVDLLFKTNRKVTVKQLKEDYFKKIECFDSVEISGVEDRFNASLGTYHDLLKIIKDKDFLDNEENEDILEDIVLTLTLFEDREMIEERLKTYAHLFDDKVMKQLKRRRYTGWGRLSRKLINGIRDKQSGKTILDFLKSDGFANRNFMQLIHDDSLTFKEDIQKAQVSGQGDSLHEHIANLAGSPAIKKGILQTVKVVDELVKVMGRHKPENIVIEMARENQTTQKGQKNSRERMKRIEEGIKELGSQILKEHPVENTQLQNEKLYLYYLQNGRDMYVDQELDINRLSDYDVDAIVPQSFLKDDSIDNKVLTRSDKNRGKSDNVPSEEVVKKMKNYWRQLLNAKLITQRKFDNLTKAERGGLSELDKAGFIKRQLVETRQITKHVAQILDSRMNTKYDENDKLIREVKVITLKSKLVSDFRKDFQFYKVREINNYHHAHDAYLNAVVGTALIKKYPKLESEFVYGDYKVYDVRKMIAKSEQEIGKATAKYFFYSNIMNFFKTEITLANGEIRKRPLIETNGETGEIVWDKGRDFATVRKVLSMPQVNIVKKTEVQTGGFSKESILPKRNSDKLIARKKDWDPKKYGGFDSPTVAYSVLVVAKVEKGKSKKLKSVKELLGITIMERSSFEKNPIDFLEAKGYKEVKKDLIIKLPKYSLFELENGRKRMLASAGELQKGNELALPSKYVNFLYLASHYEKLKGSPEDNEQKQLFVEQHKHYLDEIIEQISEFSKRVILADANLDKVLSAYNKHRDKPIREQAENIIHLFTLTNLGAPAAFKYFDTTIDRKRYTSTKEVLDATLIHQSITGLYETRIDLSQLGGDSGGSSGGSKRTADGSEFESPKKKRKVSGGSSGGSMKIAVVDKALNNTRYDKHFQLYGEEVDVFHMCNEKLSGRLLKKHITIGTPENPFDPNDYDFVILVGAEPFLYFAGKKGIGDYTGKRVEYNGYANWIASISPAQLHFKPEMKPVFDATVENIHDIINGREKIAKAGDYRPITDPDEAEEYIKMVYNMVIGPVAFASATSALYCRDGYLLGVSISHQEYQGVYIDSDCLTEVAVYYLQKILDSENHTIVFHNLKFDMHFYKYHLGLTFDKAHKERRLHDTMLQHYVLDERRGTHGLKSLAMKYTDMGDYDFELDKFKDDYCKAHKIKKEDFTYDLIPFDIMWPYAAKDTDATIRLHNFFLPKIEKNEKLCSLYYDVLMPGCVFLQRVEDRGVPISIDRLKEAQYQLTHNLNKAREKLYTYPEVKQLEQDQNEAFNPNSVKQLRVLLFDYVGLTPTGKLTDTGADSTDAEALNELATQHPIAKTLLEIRKLTKLISTYVEKILLSIDADGCIRTGFHEHMTTSGRLSSSGKLNLQQLPRDESIIKGCVVAPPGYRVIAWDLTTAEVYYAAVLSGDRNMQQVFINMRNEPDKYPDFHSNIAHMVFKLQCEPRDVKKLFPALRQAAKAITFGILYGSGPAKVAHSVNEALLEQAAKTGEPFVECTVADAKEYIETYFGQFPQLKRWIDKCHDQIKNHGFIYSHFGRKRRLHNIHSEDRGVQGEEIRSGFNAIIQSASSDSLLLGAVDADNEIISLGLEQEMKIVMLVHDSVVAIVREDLIDQYNEILIRNIQKDRGISIPGCPIGIDSDSEAGGSRDYSCGKMKKQHPSIACIDDDEYTRYVKGVLLDAEFEYKKLAAMDKEHPDHSKYKDDKFIAVCKDLDNVKRILGAGAPESATESGGTSTESEGSAGTSTESEGSAGSAGSTSGSGSSASNFTQFVLVDNGGTGDVTVAPSNFANGVAEWISSNSRSQAYKVTCSVRQSSAQNRKYTIKVEVPKVATQTVGGVELPVAAWRSYLNMELTIPIFATNSDCELIVKAMQGLLKDGNPIPSAIAANSGIYSGGSKRTADGSEFESPKKKRKVGSGPAAKRVKLDSESATPESVSGWRLFKKIS

SEQ ID NO: 1171 - RNA, 7440 nt, synthetic construct
  misc_feature 1..7440: note = Synthetic
  source 1..7440: mol_type = other RNA
atgaaacggacagccgacggaagcgagttcgagtcaccaaagaagaagcggaaagtcgacaagaagtactccatcggcctggacatcggcaccaactccgtgggctgggccgtgatcaccgacgagtacaaggtgccctccaagaagttcaaggtgctgggcaacaccgaccggcactccatcaagaagaacctgatcggcgccctgctgttcgactccggcgagaccgccgaggccacccggctgaagcggaccgcccggcggcggtacacccggcggaagaaccggatctgctacctgcaggagatcttctccaacgagatggccaaggtggacgactccttcttccaccggctggaggagtccttcctggtggaggaggacaagaagcacgagcggcaccccatcttcggcaacatcgtggacgaggtggcctaccacgagaagtaccccaccatctaccacctgcggaagaagctggtggactccaccgacaaggccgacctgcggctgatctacctggccctggcccacatgatcaagttccggggccacttcctgatcgagggcgacctgaaccccgacaactccgacgtggacaagctgttcatccagctggtgcagacctacaaccagctgttcgaggagaaccccatcaacgcctccggcgtggacgccaaggccatcctgtccgcccggctgtccaagtcccggcggctggagaacctgatcgcccagctgcccggcgagaagaagaacggcctgttcggcaacctgatcgccctgtccctgggcctgacccccaacttcaagtccaacttcgacctggccgaggacgccaagctgcagctgtccaaggacacctacgacgacgacctggacaacctgctggcccagatcggcgaccagtacgccgacctgttcctggccgccaagaacctgtccgacgccatcctgctgtccgacatcctgcgggtgaacaccgagatcaccaaggcccccctgtccgcctccatgatcaagcggtacgacgagcaccaccaggacctgaccctgctgaaggccctggtgcggcagcagctgcccgagaagtacaaggagatcttcttcgaccagtccaagaacggctacgccggctacatcgacggcggcgcctcccaggaggagttctacaagttcatcaagcccatcctggagaagatggacggcaccgaggagctgctggtgaagctgaaccgggaggacctgctgcggaagcagcggaccttcgacaacggctccatcccccaccagatccacctgggcgagctgcacgccatcctgcggcggcaggaggacttctaccccttcctgaaggacaaccgggagaagatcgagaagatcctgaccttccggatcccctactacgtgggccccctggcccggggcaactcccggttcgcctggatgacccggaagtccgaggagaccatcaccccctggaacttcgaggaggtggtggacaagggcgcctccgcccagtccttcatcgagcggatgaccaacttcgacaagaacctgcccaacgagaaggtgctgcccaagcactccctgctgtacgagtacttcaccgtgtacaacgagctgaccaaggtgaagtacgtgaccgagggcatgcggaagcccgccttcctgtccggcgagcagaagaaggccatcgtggacctgctgttcaagaccaaccggaaggtgaccgtgaagcagctgaaggaggactacttcaagaagatcgagtgcttcgactccgtggagatctccggcgtggaggaccggttcaacgcctccctgggcacctaccacgacctgctgaagatcatcaaggacaaggacttcctggacaacgaggagaacgaggacatcctggaggacatcgtgctgaccctgaccctgttcgaggaccgggagatgatcgaggagcggctgaagacctacgcccacctgttcgacgacaaggtgatgaagcagctgaagcggcggcggtacaccggctggggccggctgtcccggaagctgatcaacggcatccgggacaagcagtccggcaagaccatcctggacttcctgaagtccgacggcttcgccaaccggaacttcatgcagctgatccacgacgactccctgaccttcaaggaggacatccagaaggcccaggtgtccggccagggcgactccctgcacgagcacatcgccaacctggccggctcccccgccatcaagaagggcatcctgcagaccgtgaaggtggtggacgagctggtgaaggtgatgggccggcacaagcccgagaacatcgtgatcgagatggcccgggagaaccagaccacccagaagggccagaagaactcccgggagcggatgaagcggatcgaggagggcatcaaggagctgggctcccagatcctgaaggagcaccccgtggagaacacccagctgcagaacgagaagctgtacctgtactacctgcagaacggccgggacatgtacgtggaccaggagctggacatcaaccggctgtccgactacgacgtggacgccatcgtgccccagtccttcctgaaggacgactccatcgacaacaaggtgctgacccggtccgacaagaaccggggcaagtccgacaacgtgccctccgaggaggtggtgaagaagatgaagaactactggcggcagctgctgaacgccaagctgatcacccagcggaagttcgacaacctgaccaaggccgagcggggcggcctgtccgagctggacaaggccggcttcatcaagcggcagctggtggagacccggcagatcaccaagcacgtggcccagatcctggactcccggatgaacaccaagtacgacgagaacgacaagctgatccgggaggtgaaggtgatcaccctgaagtccaagctggtgtccgacttccggaaggacttccagttctacaaggtgcgggagatcaacaactaccaccacgcccacgacgcctacctgaacgccgtggtgggcaccgccctgatcaagaagtaccccaagctggagtccgagttcgtgtacggcgactacaaggtgtacgacgtgcggaagatgatcgccaagtccgagcaggagatcggcaaggccaccgccaagtacttcttctactccaacatcatgaacttcttcaagaccgagatcaccctggccaacggcgagatccggaagcggcccctgatcgagaccaacggcgagaccggcgagatcgtgtgggacaagggccgggacttcgccaccgtgcggaaggtgctgtccatgccccaggtgaacatcgtgaagaagaccgaggtgcagaccggcggcttctccaaggagtccatcctgcccaagcggaactccgacaagctgatcgcccggaagaaggactgggaccccaagaagtacggcggcttcgactcccccaccgtggcctactccgtgctggtggtggccaaggtggagaagggcaagtccaagaagctgaagtccgtgaaggagctgctgggcatcaccatcatggagcggtcctccttcgagaagaaccccatcgacttcctggaggccaagggctacaaggaggtgaagaaggacctgatcatcaagctgcccaagtactccctgttcgagctggagaacggccggaagcggatgctggcctccgccggcgagctgcagaagggcaacgagctggccctgccctccaagtacgtgaacttcctgtacctggcctcccactacgagaagctgaagggctcccccgaggacaacgagcagaagcagctgttcgtggagcagcacaagcactacctggacgagatcatcgagcagatctccgagttctccaagcgggtgatcctggccgacgccaacctggacaaggtgctgtccgcctacaacaagcaccgggacaagcccatccgggagcaggccgagaacatcatccacctgttcaccctgaccaacctgggcgcccccgccgccttcaagtacttcgacaccaccatcgaccggaagcggtacacctccaccaaggaggtgctggacgccaccctgatccaccagtccatcaccggcctgtacgagacccggatcgacctgtcccagctgggcggcgactccggcggaagctctggtggcagcaagcggaccgccgacggctctgaattcgagagccctaagaagaaaagaaaggtgagcggaggctctagcggcggaagcatgaagatcgccgtggtggacaaggccctgaacaacacccggtacgacaagcacttccagctgtacggcgaggaggtggacgtgttccacatgtgcaacgagaagctgtccggccggctgctgaagaagcacatcaccatcggcacccccgagaaccccttcgaccccaacgactacgacttcgtgatcctggtgggcgccgagcccttcctgtacttcgccggcaagaagggcatcggcgactacaccggcaagcgggtggagtacaacggctacgccaactggatcgcctccatctcccccgcccagctgcacttcaagcccgagatgaagcccgtgttcgacgccaccgtggagaacatccacgacatcatcaacggccgggagaagatcgccaaggccggcgactaccggcccatcaccgaccccgacgaggccgaggagtacatcaagatggtgtacaacatggtgatcggccccgtggccttcgcctccgccacctccgccctgtactgccgggacggctacctgctgggcgtgtccatctcccaccaggagtaccagggcgtgtacatcgactccgactgcctgaccgaggtggccgtgtactacctgcagaagatcctggactccgagaaccacaccatcgtgttccacaacctgaagttcgacatgcacttctacaagtaccacctgggcctgaccttcgacaaggcccacaaggagcggcggctgcacgacaccatgctgcagcactacgtgctggacgagcggcggggcacccacggcctgaagtccctggccatgaagtacaccgacatgggcgactacgacttcgagctggacaagttcaaggacgactactgcaaggcccacaagatcaagaaggaggacttcacctacgacctgatccccttcgacatcatgtggccctacgccgccaaggacaccgacgccaccatccggctgcacaacttcttcctgcccaagatcgagaagaacgagaagctgtgctccctgtactacgacgtgctgatgcccggctgcgtgttcctgcagcgggtggaggaccggggcgtgcccatctccatcgaccggctgaaggaggcccagtaccagctgacccacaacctgaacaaggcccgggagaagctgtacacctaccccgaggtgaagcagctggagcaggaccagaacgaggccttcaaccccaactccgtgaagcagctgcgggtgctgctgttcgactacgtgggcctgacccccaccggcaagctgaccgacaccggcgccgactccaccgacgccgaggccctgaacgagctggccacccagcaccccatcgccaagaccctgctggagatccggaagctgaccaagctgatctccacctacgtggagaagatcctgctgtccatcgacgccgacggctgcatccggaccggcttccacgagcacatgaccacctccggccggctgtcctcctccggcaagctgaacctgcagcagctgccccgggacgagtccatcatcaagggctgcgtggtggccccccccggctaccgggtgatcgcctgggacctgaccaccgccgaggtgtactacgccgccgtgctgtccggcgaccggaacatgcagcaggtgttcatcaacatgcggaacgagcccgacaagtaccccgacttccactccaacatcgcccacatggtgttcaagctgcagtgcgagccccgggacgtgaagaagctgttccccgccctgcggcaggccgccaaggccatcaccttcggcatcctgtacggctccggccccgccaaggtggcccactccgtgaacgaggccctgctggagcaggccgccaagaccggcgagcccttcgtggagtgcaccgtggccgacgccaaggagtacatcgagacctacttcggccagttcccccagctgaagcggtggatcgacaagtgccacgaccagatcaagaaccacggcttcatctactcccacttcggccggaagcggcggctgcacaacatccactccgaggaccggggcgtgcagggcgaggagatccggtccggcttcaacgccatcatccagtccgcctcctccgactccctgctgctgggcgccgtggacgccgacaacgagatcatctccctgggcctggagcaggagatgaagatcgtgatgctggtgcacgactccgtggtggccatcgtgcgggaggacctgatcgaccagtacaacgagatcctgatccggaacatccagaaggaccggggcatctccatccccggctgccccatcggcatcgactccgactccgaggccggcggctcccgggactactcctgcggcaagatgaagaagcagcacccctccatcgcctgcatcgacgacgacgagtacacccggtacgtgaagggcgtgctgctggacgccgagttcgagtacaagaagctggccgccatggacaaggagcaccccgaccactccaagtacaaggacgacaagttcatcgccgtgtgcaaggacctggacaacgtgaagcggatcctgggcgccggcgcccccgagtccgccaccgagtccggcggcacctccaccgagtccgagggctccgccggcacctccaccgagtccgagggctccgccggctccgccggctccacctccggctccggctcctccgcctccaacttcacccagttcgtgctggtggacaacggcggcaccggcgacgtgaccgtggccccctccaacttcgccaacggcgtggccgagtggatctcctccaactcccggtcccaggcctacaaggtgacctgctccgtgcggcagtcctccgcccagaaccggaagtacaccatcaaggtggaggtgcccaaggtggccacccagaccgtgggcggcgtggagctgcccgtggccgcctggcggtcctacctgaacatggagctgaccatccccatcttcgccaccaactccgactgcgagctgatcgtgaaggccatgcagggcctgctgaaggacggcaaccccatcccctccgccatcgccgccaactccggcatctactctggcggctcaaaaagaaccgccgacggcagcgaattcgagtctcccaagaagaagaggaaagtcggctctggccctgccgctaagagagtgaagctggac

SEQ ID NO: 1172 - protein, 2480 aa, synthetic construct
  REGION 1..2480: note = Synthetic
MKRTADGSEFESPKKKRKVDKKYSIGLDIGTNSVGWAVITDEYKVPSKKFKVLGNTDRHSIKKNLIGALLFDSGETAEATRLKRTARRRYTRRKNRICYLQEIFSNEMAKVDDSFFHRLEESFLVEEDKKHERHPIFGNIVDEVAYHEKYPTIYHLRKKLVDSTDKADLRLIYLALAHMIKFRGHFLIEGDLNPDNSDVDKLFIQLVQTYNQLFEENPINASGVDAKAILSARLSKSRRLENLIAQLPGEKKNGLFGNLIALSLGLTPNFKSNFDLAEDAKLQLSKDTYDDDLDNLLAQIGDQYADLFLAAKNLSDAILLSDILRVNTEITKAPLSASMIKRYDEHHQDLTLLKALVRQQLPEKYKEIFFDQSKNGYAGYIDGGASQEEFYKFIKPILEKMDGTEELLVKLNREDLLRKQRTFDNGSIPHQIHLGELHAILRRQEDFYPFLKDNREKIEKILTFRIPYYVGPLARGNSRFAWMTRKSEETITPWNFEEVVDKGASAQSFIERMTNFDKNLPNEKVLPKHSLLYEYFTVYNELTKVKYVTEGMRKPAFLSGEQKKAIVDLLFKTNRKVTVKQLKEDYFKKIECFDSVEISGVEDRFNASLGTYHDLLKIIKDKDFLDNEENEDILEDIVLTLTLFEDREMIEERLKTYAHLFDDKVMKQLKRRRYTGWGRLSRKLINGIRDKQSGKTILDFLKSDGFANRNFMQLIHDDSLTFKEDIQKAQVSGQGDSLHEHIANLAGSPAIKKGILQTVKVVDELVKVMGRHKPENIVIEMARENQTTQKGQKNSRERMKRIEEGIKELGSQILKEHPVENTQLQNEKLYLYYLQNGRDMYVDQELDINRLSDYDVDAIVPQSFLKDDSIDNKVLTRSDKNRGKSDNVPSEEVVKKMKNYWRQLLNAKLITQRKFDNLTKAERGGLSELDKAGFIKRQLVETRQITKHVAQILDSRMNTKYDENDKLIREVKVITLKSKLVSDFRKDFQFYKVREINNYHHAHDAYLNAVVGTALIKKYPKLESEFVYGDYKVYDVRKMIAKSEQEIGKATAKYFFYSNIMNFFKTEITLANGEIRKRPLIETNGETGEIVWDKGRDFATVRKVLSMPQVNIVKKTEVQTGGFSKESILPKRNSDKLIARKKDWDPKKYGGFDSPTVAYSVLVVAKVEKGKSKKLKSVKELLGITIMERSSFEKNPIDFLEAKGYKEVKKDLIIKLPKYSLFELENGRKRMLASAGELQKGNELALPSKYVNFLYLASHYEKLKGSPEDNEQKQLFVEQHKHYLDEIIEQISEFSKRVILADANLDKVLSAYNKHRDKPIREQAENIIHLFTLTNLGAPAAFKYFDTTIDRKRYTSTKEVLDATLIHQSITGLYETRIDLSQLGGDSGGSSGGSKRTADGSEFESPKKKRKVSGGSSGGSMKIAVVDKALNNTRYDKHFQLYGEEVDVFHMCNEKLSGRLLKKHITIGTPENPFDPNDYDFVILVGAEPFLYFAGKKGIGDYTGKRVEYNGYANWIASISPAQLHFKPEMKPVFDATVENIHDIINGREKIAKAGDYRPITDPDEAEEYIKMVYNMVIGPVAFASATSALYCRDGYLLGVSISHQEYQGVYIDSDCLTEVAVYYLQKILDSENHTIVFHNLKFDMHFYKYHLGLTFDKAHKERRLHDTMLQHYVLDERRGTHGLKSLAMKYTDMGDYDFELDKFKDDYCKAHKIKKEDFTYDLIPFDIMWPYAAKDTDATIRLHNFFLPKIEKNEKLCSLYYDVLMPGCVFLQRVEDRGVPISIDRLKEAQYQLTHNLNKAREKLYTYPEVKQLEQDQNEAFNPNSVKQLRVLLFDYVGLTPTGKLTDTGADSTDAEALNELATQHPIAKTLLEIRKLTKLISTYVEKILLSIDADGCIRTGFHEHMTTSGRLSSSGKLNLQQLPRDESIIKGCVVAPPGYRVIAWDLTTAEVYYAAVLSGDRNMQQVFINMRNEPDKYPDFHSNIAHMVFKLQCEPRDVKKLFPALRQAAKAITFGILYGSGPAKVAHSVNEALLEQAAKTGEPFVECTVADAKEYIETYFGQFPQLKRWIDKCHDQIKNHGFIYSHFGRKRRLHNIHSEDRGVQGEEIRSGFNAIIQSASSDSLLLGAVDADNEIISLGLEQEMKIVMLVHDSVVAIVREDLIDQYNEILIRNIQKDRGISIPGCPIGIDSDSEAGGSRDYSCGKMKKQHPSIACIDDDEYTRYVKGVLLDAEFEYKKLAAMDKEHPDHSKYKDDKFIAVCKDLDNVKRILGAGAPESATESGGTSTESEGSAGTSTESEGSAGSAGSTSGSGSSASNFTQFVLVDNGGTGDVTVAPSNFANGVAEWISSNSRSQAYKVTCSVRQSSAQNRKYTIKVEVPKVATQTVGGVELPVAAWRSYLNMELTIPIFATNSDCELIVKAMQGLLKDGNPIPSAIAANSGIYSGGSKRTADGSEFESPKKKRKVGSGPAAKRVKLD

SEQ ID NO: 1173 - RNA, 3764 nt, synthetic construct
  misc_feature 1..3764: note = Synthetic
  source 1..3764: mol_type = other RNA
gggaagctcagaataaacgctcaactttggccggatctgccaccatggcctccaacttcacccagttcgtgctggtggacaacggcggcaccggcgacgtgaccgtggccccctccaacttcgccaacggcgtggccgagtggatctcctccaactcccggtcccaggcctacaaggtgacctgctccgtgcggcagtcctccgcccagaaccggaagtacaccatcaaggtggaggtgcccaaggtggccacccagaccgtgggcggcgtggagctgcccgtggccgcctggcggtcctacctgaacatggagctgaccatccccatcttcgccaccaactccgactgcgagctgatcgtgaaggccatgcagggcctgctgaaggacggcaaccccatcccctccgccatcgccgccaactccggcatctacggcgcccccgagtccgccaccgagtccggcggcacctccaccgagtccgagggctccgccggcacctccaccgagtccgagggctccgccggctccgccggctccacctccggctccggctcctccatgaagatcgccgtggtggacaaggccctgaacaacacccggtacgacaagcacttccagctgtacggcgaggaggtggacgtgttccacatgtgcaacgagaagctgtccggccggctgctgaagaagcacatcaccatcggcacccccgagaaccccttcgaccccaacgactacgacttcgtgatcctggtgggcgccgagcccttcctgtacttcgccggcaagaagggcatcggcgactacaccggcaagcgggtggagtacaacggctacgccaactggatcgcctccatctcccccgcccagctgcacttcaagcccgagatgaagcccgtgttcgacgccaccgtggagaacatccacgacatcatcaacggccgggagaagatcgccaaggccggcgactaccggcccatcaccgaccccgacgaggccgaggagtacatcaagatggtgtacaacatggtgatcggccccgtggccttcgcctccgccacctccgccctgtactgccgggacggctacctgctgggcgtgtccatctcccaccaggagtaccagggcgtgtacatcgactccgactgcctgaccgaggtggccgtgtactacctgcagaagatcctggactccgagaaccacaccatcgtgttccacaacctgaagttcgacatgcacttctacaagtaccacctgggcctgaccttcgacaaggcccacaaggagcggcggctgcacgacaccatgctgcagcactacgtgctggacgagcggcggggcacccacggcctgaagtccctggccatgaagtacaccgacatgggcgactacgacttcgagctggacaagttcaaggacgactactgcaaggcccacaagatcaagaaggaggacttcacctacgacctgatccccttcgacatcatgtggccctacgccgccaaggacaccgacgccaccatccggctgcacaacttcttcctgcccaagatcgagaagaacgagaagctgtgctccctgtactacgacgtgctgatgcccggctgcgtgttcctgcagcgggtggaggaccggggcgtgcccatctccatcgaccggctgaaggaggcccagtaccagctgacccacaacctgaacaaggcccgggagaagctgtacacctaccccgaggtgaagcagctggagcaggaccagaacgaggccttcaaccccaactccgtgaagcagctgcgggtgctgctgttcgactacgtgggcctgacccccaccggcaagctgaccgacaccggcgccgactccaccgacgccgaggccctgaacgagctggccacccagcaccccatcgccaagaccctgctggagatccggaagctgaccaagctgatctccacctacgtggagaagatcctgctgtccatcgacgccgacggctgcatccggaccggcttccacgagcacatgaccacctccggccggctgtcctcctccggcaagctgaacctgcagcagctgccccgggacgagtccatcatcaagggctgcgtggtggccccccccggctaccgggtgatcgcctgggacctgaccaccgccgaggtgtactacgccgccgtgctgtccggcgaccggaacatgcagcaggtgttcatcaacatgcggaacgagcccgacaagtaccccgacttccactccaacatcgcccacatggtgttcaagctgcagtgcgagccccgggacgtgaagaagctgttccccgccctgcggcaggccgccaaggccatcaccttcggcatcctgtacggctccggccccgccaaggtggcccactccgtgaacgaggccctgctggagcaggccgccaagaccggcgagcccttcgtggagtgcaccgtggccgacgccaaggagtacatcgagacctacttcggccagttcccccagctgaagcggtggatcgacaagtgccacgaccagatcaagaaccacggcttcatctactcccacttcggccggaagcggcggctgcacaacatccactccgaggaccggggcgtgcagggcgaggagatccggtccggcttcaacgccatcatccagtccgcctcctccgactccctgctgctgggcgccgtggacgccgacaacgagatcatctccctgggcctggagcaggagatgaagatcgtgatgctggtgcacgactccgtggtggccatcgtgcgggaggacctgatcgaccagtacaacgagatcctgatccggaacatccagaaggaccggggcatctccatccccggctgccccatcggcatcgactccgactccgaggccggcggctcccgggactactcctgcggcaagatgaagaagcagcacccctccatcgcctgcatcgacgacgacgagtacacccggtacgtgaagggcgtgctgctggacgccgagttcgagtacaagaagctggccgccatggacaaggagcaccccgaccactccaagtacaaggacgacaagttcatcgccgtgtgcaaggacctggacaacgtgaagcggatcctgggcgcctccggcggctccaagcggaccgccgacggctccgagttcgagcccaagaagaagcggaaggtgtccgagtccgccacccccgagtccgtgtccggctggcggctgttcaagaagatctcctagctagcaccagcctcaagaacacccgaatggagtctctaagctacataataccaacttacactttacaaaatgttgtcccccaaaatgtagccattcgtatctgctcctaataaaaagaaagtttcttcacattctctcgagaaaaaaaaaaaatggaaaaaaaaaaaacggaaaaaaaaaaaaggtaaaaaaaaaaaatataaaaaaaaaaaacataaaaaaaaaaaacgaaaaaaaaaaaacgtaaaaaaaaaaaactcaaaaaaaaaaaagataaaaaaaaaaaacctaaaaaaaaaaaatgtaaaaaaaaaaaagggaaaaaaaaaaaacgcaaaaaaaaaaaacacaaaaaaaaaaaatgcaaaaaaaaaaaatcgaaaaaaaaaaaatctaaaaaaaaaaaacgaaaaaaaaaaaacccaaaaaaaaaaaagacaaaaaaaaaaaatagaaaaaaaaaaaagttaaaaaaaaaaaactgaaaaaaaaaaaatttaaaaaaaaaaaatctag

SEQ ID NO: 1174 - RNA, 3204 nt, synthetic construct
  misc_feature 1..3204: note = Synthetic
  source 1..3204: mol_type = other RNA
atggcctccaacttcacccagttcgtgctggtggacaacggcggcaccggcgacgtgaccgtggccccctccaacttcgccaacggcgtggccgagtggatctcctccaactcccggtcccaggcctacaaggtgacctgctccgtgcggcagtcctccgcccagaaccggaagtacaccatcaaggtggaggtgcccaaggtggccacccagaccgtgggcggcgtggagctgcccgtggccgcctggcggtcctacctgaacatggagctgaccatccccatcttcgccaccaactccgactgcgagctgatcgtgaaggccatgcagggcctgctgaaggacggcaaccccatcccctccgccatcgccgccaactccggcatctacggcgcccccgagtccgccaccgagtccggcggcacctccaccgagtccgagggctccgccggcacctccaccgagtccgagggctccgccggctccgccggctccacctccggctccggctcctccatgaagatcgccgtggtggacaaggccctgaacaacacccggtacgacaagcacttccagctgtacggcgaggaggtggacgtgttccacatgtgcaacgagaagctgtccggccggctgctgaagaagcacatcaccatcggcacccccgagaaccccttcgaccccaacgactacgacttcgtgatcctggtgggcgccgagcccttcctgtacttcgccggcaagaagggcatcggcgactacaccggcaagcgggtggagtacaacggctacgccaactggatcgcctccatctcccccgcccagctgcacttcaagcccgagatgaagcccgtgttcgacgccaccgtggagaacatccacgacatcatcaacggccgggagaagatcgccaaggccggcgactaccggcccatcaccgaccccgacgaggccgaggagtacatcaagatggtgtacaacatggtgatcggccccgtggccttcgcctccgccacctccgccctgtactgccgggacggctacctgctgggcgtgtccatctcccaccaggagtaccagggcgtgtacatcgactccgactgcctgaccgaggtggccgtgtactacctgcagaagatcctggactccgagaaccacaccatcgtgttccacaacctgaagttcgacatgcacttctacaagtaccacctgggcctgaccttcgacaaggcccacaaggagcggcggctgcacgacaccatgctgcagcactacgtgctggacgagcggcggggcacccacggcctgaagtccctggccatgaagtacaccgacatgggcgactacgacttcgagctggacaagttcaaggacgactactgcaaggcccacaagatcaagaaggaggacttcacctacgacctgatccccttcgacatcatgtggccctacgccgccaaggacaccgacgccaccatccggctgcacaacttcttcctgcccaagatcgagaagaacgagaagctgtgctccctgtactacgacgtgctgatgcccggctgcgtgttcctgcagcgggtggaggaccggggcgtgcccatctccatcgaccggctgaaggaggcccagtaccagctgacccacaacctgaacaaggcccgggagaagctgtacacctaccccgaggtgaagcagctggagcaggaccagaacgaggccttcaaccccaactccgtgaagcagctgcgggtgctgctgttcgactacgtgggcctgacccccaccggcaagctgaccgacaccggcgccgactccaccgacgccgaggccctgaacgagctggccacccagcaccccatcgccaagaccctgctggagatccggaagctgaccaagctgatctccacctacgtggagaagatcctgctgtccatcgacgccgacggctgcatccggaccggcttccacgagcacatgaccacctccggccggctgtcctcctccggcaagctgaacctgcagcagctgccccgggacgagtccatcatcaagggctgcgtggtggccccccccggctaccgggtgatcgcctgggacctgaccaccgccgaggtgtactacgccgccgtgctgtccggcgaccggaacatgcagcaggtgttcatcaacatgcggaacgagcccgacaagtaccccgacttccactccaacatcgcccacatggtgttcaagctgcagtgcgagccccgggacgtgaagaagctgttccccgccctgcggcaggccgccaaggccatcaccttcggcatcctgtacggctccggccccgccaaggtggcccactccgtgaacgaggccctgctggagcaggccgccaagaccggcgagcccttcgtggagtgcaccgtggccgacgccaaggagtacatcgagacctacttcggccagttcccccagctgaagcggtggatcgacaagtgccacgaccagatcaagaaccacggcttcatctactcccacttcggccggaagcggcggctgcacaacatccactccgaggaccggggcgtgcagggcgaggagatccggtccggcttcaacgccatcatccagtccgcctcctccgactccctgctgctgggcgccgtggacgccgacaacgagatcatctccctgggcctggagcaggagatgaagatcgtgatgctggtgcacgactccgtggtggccatcgtgcgggaggacctgatcgaccagtacaacgagatcctgatccggaacatccagaaggaccggggcatctccatccccggctgccccatcggcatcgactccgactccgaggccggcggctcccgggactactcctgcggcaagatgaagaagcagcacccctccatcgcctgcatcgacgacgacgagtacacccggtacgtgaagggcgtgctgctggacgccgagttcgagtacaagaagctggccgccatggacaaggagcaccccgaccactccaagtacaaggacgacaagttcatcgccgtgtgcaaggacctggacaacgtgaagcggatcctgggcgcctccggcggctccaagcggaccgccgacggctccgagttcgagcccaagaagaagcggaaggtgtccgagtccgccacccccgagtccgtgtccggctggcggctgttcaagaagatctcctag

SEQ ID NO: 1175 - protein, 1067 aa, synthetic construct
  REGION 1..1067: note = Synthetic
MASNFTQFVLVDNGGTGDVTVAPSNFANGVAEWISSNSRSQAYKVTCSVRQSSAQNRKYTIKVEVPKVATQTVGGVELPVAAWRSYLNMELTIPIFATNSDCELIVKAMQGLLKDGNPIPSAIAANSGIYGAPESATESGGTSTESEGSAGTSTESEGSAGSAGSTSGSGSSMKIAVVDKALNNTRYDKHFQLYGEEVDVFHMCNEKLSGRLLKKHITIGTPENPFDPNDYDFVILVGAEPFLYFAGKKGIGDYTGKRVEYNGYANWIASISPAQLHFKPEMKPVFDATVENIHDIINGREKIAKAGDYRPITDPDEAEEYIKMVYNMVIGPVAFASATSALYCRDGYLLGVSISHQEYQGVYIDSDCLTEVAVYYLQKILDSENHTIVFHNLKFDMHFYKYHLGLTFDKAHKERRLHDTMLQHYVLDERRGTHGLKSLAMKYTDMGDYDFELDKFKDDYCKAHKIKKEDFTYDLIPFDIMWPYAAKDTDATIRLHNFFLPKIEKNEKLCSLYYDVLMPGCVFLQRVEDRGVPISIDRLKEAQYQLTHNLNKAREKLYTYPEVKQLEQDQNEAFNPNSVKQLRVLLFDYVGLTPTGKLTDTGADSTDAEALNELATQHPIAKTLLEIRKLTKLISTYVEKILLSIDADGCIRTGFHEHMTTSGRLSSSGKLNLQQLPRDESIIKGCVVAPPGYRVIAWDLTTAEVYYAAVLSGDRNMQQVFINMRNEPDKYPDFHSNIAHMVFKLQCEPRDVKKLFPALRQAAKAITFGILYGSGPAKVAHSVNEALLEQAAKTGEPFVECTVADAKEYIETYFGQFPQLKRWIDKCHDQIKNHGFIYSHFGRKRRLHNIHSEDRGVQGEEIRSGFNAIIQSASSDSLLLGAVDADNEIISLGLEQEMKIVMLVHDSVVAIVREDLIDQYNEILIRNIQKDRGISIPGCPIGIDSDSEAGGSRDYSCGKMKKQHPSIACIDDDEYTRYVKGVLLDAEFEYKKLAAMDKEHPDHSKYKDDKFIAVCKDLDNVKRILGASGGSKRTADGSEFEPKKKRKVSESATPESVSGWRLFKKIS

SEQ ID NO: 1176 - RNA, 3144 nt, synthetic construct
  misc_feature 1..3144: note = Synthetic
  source 1..3144: mol_type = other RNA
atggcctccaacttcacccagttcgtgctggtggacaacggcggcaccggcgacgtgaccgtggccccctccaacttcgccaacggcgtggccgagtggatctcctccaactcccggtcccaggcctacaaggtgacctgctccgtgcggcagtcctccgcccagaaccggaagtacaccatcaaggtggaggtgcccaaggtggccacccagaccgtgggcggcgtggagctgcccgtggccgcctggcggtcctacctgaacatggagctgaccatccccatcttcgccaccaactccgactgcgagctgatcgtgaaggccatgcagggcctgctgaaggacggcaaccccatcccctccgccatcgccgccaactccggcatctacggcgcccccgagtccgccaccgagtccggcggcacctccaccgagtccgagggctccgccggcacctccaccgagtccgagggctccgccggctccgccggctccacctccggctccggctcctccatgaagatcgccgtggtggacaaggccctgaacaacacccggtacgacaagcacttccagctgtacggcgaggaggtggacgtgttccacatgtgcaacgagaagctgtccggccggctgctgaagaagcacatcaccatcggcacccccgagaaccccttcgaccccaacgactacgacttcgtgatcctggtgggcgccgagcccttcctgtacttcgccggcaagaagggcatcggcgactacaccggcaagcgggtggagtacaacggctacgccaactggatcgcctccatctcccccgcccagctgcacttcaagcccgagatgaagcccgtgttcgacgccaccgtggagaacatccacgacatcatcaacggccgggagaagatcgccaaggccggcgactaccggcccatcaccgaccccgacgaggccgaggagtacatcaagatggtgtacaacatggtgatcggccccgtggccttcgcctccgccacctccgccctgtactgccgggacggctacctgctgggcgtgtccatctcccaccaggagtaccagggcgtgtacatcgactccgactgcctgaccgaggtggccgtgtactacctgcagaagatcctggactccgagaaccacaccatcgtgttccacaacctgaagttcgacatgcacttctacaagtaccacctgggcctgaccttcgacaaggcccacaaggagcggcggctgcacgacaccatgctgcagcactacgtgctggacgagcggcggggcacccacggcctgaagtccctggccatgaagtacaccgacatgggcgactacgacttcgagctggacaagttcaaggacgactactgcaaggcccacaagatcaagaaggaggacttcacctacgacctgatccccttcgacatcatgtggccctacgccgccaaggacaccgacgccaccatccggctgcacaacttcttcctgcccaagatcgagaagaacgagaagctgtgctccctgtactacgacgtgctgatgcccggctgcgtgttcctgcagcgggtggaggaccggggcgtgcccatctccatcgaccggctgaaggaggcccagtaccagctgacccacaacctgaacaaggcccgggagaagctgtacacctaccccgaggtgaagcagctggagcaggaccagaacgaggccttcaaccccaactccgtgaagcagctgcgggtgctgctgttcgactacgtgggcctgacccccaccggcaagctgaccgacaccggcgccgactccaccgacgccgaggccctgaacgagctggccacccagcaccccatcgccaagaccctgctggagatccggaagctgaccaagctgatctccacctacgtggagaagatcctgctgtccatcgacgccgacggctgcatccggaccggcttccacgagcacatgaccacctccggccggctgtcctcctccggcaagctgaacctgcagcagctgccccgggacgagtccatcatcaagggctgcgtggtggccccccccggctaccgggtgatcgcctgggacctgaccaccgccgaggtgtactacgccgccgtgctgtccggcgaccggaacatgcagcaggtgttcatcaacatgcggaacgagcccgacaagtaccccgacttccactccaacatcgcccacatggtgttcaagctgcagtgcgagccccgggacgtgaagaagctgttccccgccctgcggcaggccgccaaggccatcaccttcggcatcctgtacggctccggccccgccaaggtggcccactccgtgaacgaggccctgctggagcaggccgccaagaccggcgagcccttcgtggagtgcaccgtggccgacgccaaggagtacatcgagacctacttcggccagttcccccagctgaagcggtggatcgacaagtgccacgaccagatcaagaaccacggcttcatctactcccacttcggccggaagcggcggctgcacaacatccactccgaggaccggggcgtgcagggcgaggagatccggtccggcttcaacgccatcatccagtccgcctcctccgactccctgctgctgggcgccgtggacgccgacaacgagatcatctccctgggcctggagcaggagatgaagatcgtgatgctggtgcacgactccgtggtggccatcgtgcgggaggacctgatcgaccagtacaacgagatcctgatccggaacatccagaaggaccggggcatctccatccccggctgccccatcggcatcgactccgactccgaggccggcggctcccgggactactcctgcggcaagatgaagaagcagcacccctccatcgcctgcatcgacgacgacgagtacacccggtacgtgaagggcgtgctgctggacgccgagttcgagtacaagaagctggccgccatggacaaggagcaccccgaccactccaagtacaaggacgacaagttcatcgccgtgtgcaaggacctggacaacgtgaagcggatcctgggcgcctccggcggctccaagcggaccgccgacggctccgagttcgagcccaagaagaagcggaaggtg

SEQ ID NO: 1177 - protein, 1048 aa, synthetic construct
  REGION 1..1048: note = Synthetic
MASNFTQFVLVDNGGTGDVTVAPSNFANGVAEWISSNSRSQAYKVTCSVRQSSAQNRKYTIKVEVPKVATQTVGGVELPVAAWRSYLNMELTIPIFATNSDCELIVKAMQGLLKDGNPIPSAIAANSGIYGAPESATESGGTSTESEGSAGTSTESEGSAGSAGSTSGSGSSMKIAVVDKALNNTRYDKHFQLYGEEVDVFHMCNEKLSGRLLKKHITIGTPENPFDPNDYDFVILVGAEPFLYFAGKKGIGDYTGKRVEYNGYANWIASISPAQLHFKPEMKPVFDATVENIHDIINGREKIAKAGDYRPITDPDEAEEYIKMVYNMVIGPVAFASATSALYCRDGYLLGVSISHQEYQGVYIDSDCLTEVAVYYLQKILDSENHTIVFHNLKFDMHFYKYHLGLTFDKAHKERRLHDTMLQHYVLDERRGTHGLKSLAMKYTDMGDYDFELDKFKDDYCKAHKIKKEDFTYDLIPFDIMWPYAAKDTDATIRLHNFFLPKIEKNEKLCSLYYDVLMPGCVFLQRVEDRGVPISIDRLKEAQYQLTHNLNKAREKLYTYPEVKQLEQDQNEAFNPNSVKQLRVLLFDYVGLTPTGKLTDTGADSTDAEALNELATQHPIAKTLLEIRKLTKLISTYVEKILLSIDADGCIRTGFHEHMTTSGRLSSSGKLNLQQLPRDESIIKGCVVAPPGYRVIAWDLTTAEVYYAAVLSGDRNMQQVFINMRNEPDKYPDFHSNIAHMVFKLQCEPRDVKKLFPALRQAAKAITFGILYGSGPAKVAHSVNEALLEQAAKTGEPFVECTVADAKEYIETYFGQFPQLKRWIDKCHDQIKNHGFIYSHFGRKRRLHNIHSEDRGVQGEEIRSGFNAIIQSASSDSLLLGAVDADNEIISLGLEQEMKIVMLVHDSVVAIVREDLIDQYNEILIRNIQKDRGISIPGCPIGIDSDSEAGGSRDYSCGKMKKQHPSIACIDDDEYTRYVKGVLLDAEFEYKKLAAMDKEHPDHSKYKDDKFIAVCKDLDNVKRILGASGGSKRTADGSEFEPKKKRKV

SEQ ID NO: 1178 - RNA, 3764 nt, synthetic construct
  misc_feature 1..3764: note = Synthetic
  source 1..3764: mol_type = other RNA
gggaagctcagaataaacgctcaactttggccggatctgccaccatggcctccaacttcacccagttcgtgctggtggacaacggcggcaccggcgacgtgaccgtggccccctccaacttcgccaacggcgtggccgagtggatctcctccaactcccggtcccaggcctacaaggtgacctgctccgtgcggcagtcctccgcccagaaccggaagtacaccatcaaggtggaggtgcccaaggtggccacccagaccgtgggcggcgtggagctgcccgtggccgcctggcggtcctacctgaacatggagctgaccatccccatcttcgccaccaactccgactgcgagctgatcgtgaaggccatgcagggcctgctgaaggacggcaaccccatcccctccgccatcgccgccaactccggcatctacggcgcccccgagtccgccaccgagtccggcggcacctccaccgagtccgagggctccgccggcacctccaccgagtccgagggctccgccggctccgccggctccacctccggctccggctcctccatgaagatcgccgtggtggacaaggccctgaacaacacccggtacgacaagcacttccagctgtacggcgaggaggtggacgtgttccacatgtgcaacgagaagctgtccggccggctgctgaagaagcacatcaccatcggcacccccgagaaccccttcgaccccaacgactacgacttcgtgatcctggtgggcgccgagcccttcctgtacttcgccggcaagaagggcatcggcgactacaccggcaagcgggtggagtacaacggctacgccaactggatcgcctccatctcccccgcccagctgcacttcaagcccgagatgaagcccgtgttcgacgccaccgtggagaacatccacgacatcatcaacggccgggagaagatcgccaaggccggcgactaccggcccatcaccgaccccgacgaggccgaggagtacatcaagatggtgtacaacatggtgatcggccccgtggccttcgcctccgccacctccgccctgtactgccgggacggctacctgctgggcgtgtccatctcccaccaggagtaccagggcgtgtacatcgactccgactgcctgaccgaggtggccgtgtactacctgcagaagatcctggactccgagaaccacaccatcgtgttccacaacctgaagttcgacatgcacttctacaagtaccacctgggcctgaccttcgacaaggcccacaaggagcggcggctgcacgacaccatgctgcagcactacgtgctggacgagcggcggggcacccacggcctgaagtccctggccatgaagtacaccgacatgggcgactacgacttcgagctggacaagttcaaggacgactactgcaaggcccacaagatcaagaaggaggacttcacctacgacctgatccccttcgacatcatgtggccctacgccgccaaggacaccgacgccaccatccggctgcacaacttcttcctgcccaagatcgagaagaacgagaagctgtgctccctgtactacgacgtgctgatgcccggctgcgtgttcctgcagcgggtggaggaccggggcgtgcccatctccatcgaccggctgaaggaggcccagtaccagctgacccacaacctgaacaaggcccgggagaagctgtacacctaccccgaggtgaagcagctggagcaggaccagaacgaggccttcaaccccaactccgtgaagcagctgcgggtgctgctgttcgactacgtgggcctgacccccaccggcaagctgaccgacaccggcgccgactccaccgacgccgaggccctgaacgagctggccacccagcaccccatcgccaagaccctgctggagatccggaagctgaccaagctgatctccacctacgtggagaagatcctgctgtccatcgacgccgacggctgcatccggaccggcttccacgagcacatgaccacctccggccggctgtcctcctccggcaagctgaacctgcagcagctgccccgggacgagtccatcatcaagggctgcgtggtggccccccccggctaccgggtgatcgcctgggacctgaccaccgccgaggtgtactacgccgccgtgctgtccggcgaccggaacatgcagcaggtgttcatcaacatgcggaacgagcccgacaagtaccccgacttccactccaacatcgcccacatggtgttcaagctgcagtgcgagccccgggacgtgaagaagctgttccccgccctgcggcaggccgccaagcgcatcaccttcggcatcctgtacggctccggccccgccaaggtggcccactccgtgaacgaggccctgctggagcaggccgccaagaccggcgagcccttcgtggagtgcaccgtggccgacgccaaggagtacatcgagacctacttcggccagttcccccagctgaagcggtggatcgacaagtgccacgaccagatcaagaaccacggcttcatctactcccacttcggccggaagcggcggctgcacaacatccactccgaggaccggggcgtgcagggcgaggagatccggtccggcttcaacgccatcatccagtccgcctcctccgactccctgctgctgggcgccgtggacgccgacaacgagatcatctccctgggcctggagcaggagatgaagatcgtgatgctggtgcacgactccgtggtggccatcgtgcgggaggacctgatcgaccagtacaacgagatcctgatccggaacatccagaaggaccggggcatctccatccccggctgccccatcggcatcgactccgactccgaggccggcggctcccgggactactcctgcggcaagatgaagaagcagcacccctccatcgcctgcatcgacgacgacgagtacacccggtacgtgaagggcgtgctgctggacgccgagttcgagtacaagaagctggccgccatggacaaggagcaccccgaccactccaagtacaaggacgacaagttcatcgccgtgtgcaaggacctggacaacgtgaagcggatcctgggcgcctccggcggctccaagcggaccgccgacggctccgagttcgagcccaagaagaagcggaaggtgtccgagtccgccacccccgagtccgtgtccggctggcggctgttcaagaagatctcctagctagcaccagcctcaagaacacccgaatggagtctctaagctacataataccaacttacactttacaaaatgttgtcccccaaaatgtagccattcgtatctgctcctaataaaaagaaagtttcttcacattctctcgagaaaaaaaaaaaatggaaaaaaaaaaaacggaaaaaaaaaaaaggtaaaaaaaaaaaatataaaaaaaaaaaacataaaaaaaaaaaacgaaaaaaaaaaaacgtaaaaaaaaaaaactcaaaaaaaaaaaagataaaaaaaaaaaacctaaaaaaaaaaaatgtaaaaaaaaaaaagggaaaaaaaaaaaacgcaaaaaaaaaaaacacaaaaaaaaaaaatgcaaaaaaaaaaaatcgaaaaaaaaaaaatctaaaaaaaaaaaacgaaaaaaaaaaaacccaaaaaaaaaaaagacaaaaaaaaaaaatagaaaaaaaaaaaagttaaaaaaaaaaaactgaaaaaaaaaaaatttaaaaaaaaaaaatctag

SEQ ID NO: 1179 - RNA, 3204 nt, synthetic construct
  misc_feature 1..3204: note = Synthetic
  source 1..3204: mol_type = other RNA
atggcctccaacttcacccagttcgtgctggtggacaacggcggcaccggcgacgtgaccgtggccccctccaacttcgccaacggcgtggccgagtggatctcctccaactcccggtcccaggcctacaaggtgacctgctccgtgcggcagtcctccgcccagaaccggaagtacaccatcaaggtggaggtgcccaaggtggccacccagaccgtgggcggcgtggagctgcccgtggccgcctggcggtcctacctgaacatggagctgaccatccccatcttcgccaccaactccgactgcgagctgatcgtgaaggccatgcagggcctgctgaaggacggcaaccccatcccctccgccatcgccgccaactccggcatctacggcgcccccgagtccgccaccgagtccggcggcacctccaccgagtccgagggctccgccggcacctccaccgagtccgagggctccgccggctccgccggctccacctccggctccggctcctccatgaagatcgccgtggtggacaaggccctgaacaacacccggtacgacaagcacttccagctgtacggcgaggaggtggacgtgttccacatgtgcaacgagaagctgtccggccggctgctgaagaagcacatcaccatcggcacccccgagaaccccttcgaccccaacgactacgacttcgtgatcctggtgggcgccgagcccttcctgtacttcgccggcaagaagggcatcggcgactacaccggcaagcgggtggagtacaacggctacgccaactggatcgcctccatctcccccgcccagctgcacttcaagcccgagatgaagcccgtgttcgacgccaccgtggagaacatccacgacatcatcaacggccgggagaagatcgccaaggccggcgactaccggcccatcaccgaccccgacgaggccgaggagtacatcaagatggtgtacaacatggtgatcggccccgtggccttcgcctccgccacctccgccctgtactgccgggacggctacctgctgggcgtgtccatctcccaccaggagtaccagggcgtgtacatcgactccgactgcctgaccgaggtggccgtgtactacctgcagaagatcctggactccgagaaccacaccatcgtgttccacaacctgaagttcgacatgcacttctacaagtaccacctgggcctgaccttcgacaaggcccacaaggagcggcggctgcacgacaccatgctgcagcactacgtgctggacgagcggcggggcacccacggcctgaagtccctggccatgaagtacaccgacatgggcgactacgacttcgagctggacaagttcaaggacgactactgcaaggcccacaagatcaagaaggaggacttcacctacgacctgatccccttcgacatcatgtggccctacgccgccaaggacaccgacgccaccatccggctgcacaacttcttcctgcccaagatcgagaagaacgagaagctgtgctccctgtactacgacgtgctgatgcccggctgcgtgttcctgcagcgggtggaggaccggggcgtgcccatctccatcgaccggctgaaggaggcccagtaccagctgacccacaacctgaacaaggcccgggagaagctgtacacctaccccgaggtgaagcagctggagcaggaccagaacgaggccttcaaccccaactccgtgaagcagctgcgggtgctgctgttcgactacgtgggcctgacccccaccggcaagctgaccgacaccggcgccgactccaccgacgccgaggccctgaacgagctggccacccagcaccccatcgccaagaccctgctggagatccggaagctgaccaagctgatctccacctacgtggagaagatcctgctgtccatcgacgccgacggctgcatccggaccggcttccacgagcacatgaccacctccggccggctgtcctcctccggcaagctgaacctgcagcagctgccccgggacgagtccatcatcaagggctgcgtggtggccccccccggctaccgggtgatcgcctgggacctgaccaccgccgaggtgtactacgccgccgtgctgtccggcgaccggaacatgcagcaggtgttcatcaacatgcggaacgagcccgacaagtaccccgacttccactccaacatcgcccacatggtgttcaagctgcagtgcgagccccgggacgtgaagaagctgttccccgccctgcggcaggccgccaagcgcatcaccttcggcatcctgtacggctccggccccgccaaggtggcccactccgtgaacgaggccctgctggagcaggccgccaagaccggcgagcccttcgtggagtgcaccgtggccgacgccaaggagtacatcgagacctacttcggccagttcccccagctgaagcggtggatcgacaagtgccacgaccagatcaagaaccacggcttcatctactcccacttcggccggaagcggcggctgcacaacatccactccgaggaccggggcgtgcagggcgaggagatccggtccggcttcaacgccatcatccagtccgcctcctccgactccctgctgctgggcgccgtggacgccgacaacgagatcatctccctgggcctggagcaggagatgaagatcgtgatgctggtgcacgactccgtggtggccatcgtgcgggaggacctgatcgaccagtacaacgagatcctgatccggaacatccagaaggaccggggcatctccatccccggctgccccatcggcatcgactccgactccgaggccggcggctcccgggactactcctgcggcaagatgaagaagcagcacccctccatcgcctgcatcgacgacgacgagtacacccggtacgtgaagggcgtgctgctggacgccgagttcgagtacaagaagctggccgccatggacaaggagcaccccgaccactccaagtacaaggacgacaagttcatcgccgtgtgcaaggacctggacaacgtgaagcggatcctgggcgcctccggcggctccaagcggaccgccgacggctccgagttcgagcccaagaagaagcggaaggtgtccgagtccgccacccccgagtccgtgtccggctggcggctgttcaagaagatctcctag

SEQ ID NO: 1180 - protein, 1067 aa, synthetic construct
  REGION 1..1067: note = Synthetic
MASNFTQFVLVDNGGTGDVTVAPSNFANGVAEWISSNSRSQAYKVTCSVRQSSAQNRKYTIKVEVPKVATQTVGGVELPVAAWRSYLNMELTIPIFATNSDCELIVKAMQGLLKDGNPIPSAIAANSGIYGAPESATESGGTSTESEGSAGTSTESEGSAGSAGSTSGSGSSMKIAVVDKALNNTRYDKHFQLYGEEVDVFHMCNEKLSGRLLKKHITIGTPENPFDPNDYDFVILVGAEPFLYFAGKKGIGDYTGKRVEYNGYANWIASISPAQLHFKPEMKPVFDATVENIHDIINGREKIAKAGDYRPITDPDEAEEYIKMVYNMVIGPVAFASATSALYCRDGYLLGVSISHQEYQGVYIDSDCLTEVAVYYLQKILDSENHTIVFHNLKFDMHFYKYHLGLTFDKAHKERRLHDTMLQHYVLDERRGTHGLKSLAMKYTDMGDYDFELDKFKDDYCKAHKIKKEDFTYDLIPFDIMWPYAAKDTDATIRLHNFFLPKIEKNEKLCSLYYDVLMPGCVFLQRVEDRGVPISIDRLKEAQYQLTHNLNKAREKLYTYPEVKQLEQDQNEAFNPNSVKQLRVLLFDYVGLTPTGKLTDTGADSTDAEALNELATQHPIAKTLLEIRKLTKLISTYVEKILLSIDADGCIRTGFHEHMTTSGRLSSSGKLNLQQLPRDESIIKGCVVAPPGYRVIAWDLTTAEVYYAAVLSGDRNMQQVFINMRNEPDKYPDFHSNIAHMVFKLQCEPRDVKKLFPALRQAAKRITFGILYGSGPAKVAHSVNEALLEQAAKTGEPFVECTVADAKEYIETYFGQFPQLKRWIDKCHDQIKNHGFIYSHFGRKRRLHNIHSEDRGVQGEEIRSGFNAIIQSASSDSLLLGAVDADNEIISLGLEQEMKIVMLVHDSVVAIVREDLIDQYNEILIRNIQKDRGISIPGCPIGIDSDSEAGGSRDYSCGKMKKQHPSIACIDDDEYTRYVKGVLLDAEFEYKKLAAMDKEHPDHSKYKDDKFIAVCKDLDNVKRILGASGGSKRTADGSEFEPKKKRKVSESATPESVSGWRLFKKIS

SEQ ID NO: 1181 - RNA, 3144 nt, synthetic construct
  misc_feature 1..3144: note = Synthetic
  source 1..3144: mol_type = other RNA
atggcctccaacttcacccagttcgtgctggtggacaacggcggcaccggcgacgtgaccgtggccccctccaacttcgccaacggcgtggccgagtggatctcctccaactcccggtcccaggcctacaaggtgacctgctccgtgcggcagtcctccgcccagaaccggaagtacaccatcaaggtggaggtgcccaaggtggccacccagaccgtgggcggcgtggagctgcccgtggccgcctggcggtcctacctgaacatggagctgaccatccccatcttcgccaccaactccgactgcgagctgatcgtgaaggccatgcagggcctgctgaaggacggcaaccccatcccctccgccatcgccgccaactccggcatctacggcgcccccgagtccgccaccgagtccggcggcacctccaccgagtccgagggctccgccggcacctccaccgagtccgagggctccgccggctccgccggctccacctccggctccggctcctccatgaagatcgccgtggtggacaaggccctgaacaacacccggtacgacaagcacttccagctgtacggcgaggaggtggacgtgttccacatgtgcaacgagaagctgtccggccggctgctgaagaagcacatcaccatcggcacccccgagaaccccttcgaccccaacgactacgacttcgtgatcctggtgggcgccgagcccttcctgtacttcgccggcaagaagggcatcggcgactacaccggcaagcgggtggagtacaacggctacgccaactggatcgcctccatctcccccgcccagctgcacttcaagcccgagatgaagcccgtgttcgacgccaccgtggagaacatccacgacatcatcaacggccgggagaagatcgccaaggccggcgactaccggcccatcaccgaccccgacgaggccgaggagtacatcaagatggtgtacaacatggtgatcggccccgtggccttcgcctccgccacctccgccctgtactgccgggacggctacctgctgggcgtgtccatctcccaccaggagtaccagggcgtgtacatcgactccgactgcctgaccgaggtggccgtgtactacctgcagaagatcctggactccgagaaccacaccatcgtgttccacaacctgaagttcgacatgcacttctacaagtaccacctgggcctgaccttcgacaaggcccacaaggagcggcggctgcacgacaccatgctgcagcactacgtgctggacgagcggcggggcacccacggcctgaagtccctggccatgaagtacaccgacatgggcgactacgacttcgagctggacaagttcaaggacgactactgcaaggcccacaagatcaagaaggaggacttcacctacgacctgatccccttcgacatcatgtggccctacgccgccaaggacaccgacgccaccatccggctgcacaacttcttcctgcccaagatcgagaagaacgagaagctgtgctccctgtactacgacgtgctgatgcccggctgcgtgttcctgcagcgggtggaggaccggggcgtgcccatctccatcgaccggctgaaggaggcccagtaccagctgacccacaacctgaacaaggcccgggagaagctgtacacctaccccgaggtgaagcagctggagcaggaccagaacgaggccttcaaccccaactccgtgaagcagctgcgggtgctgctgttcgactacgtgggcctgacccccaccggcaagctgaccgacaccggcgccgactccaccgacgccgaggccctgaacgagctggccacccagcaccccatcgccaagaccctgctggagatccggaagctgaccaagctgatctccacctacgtggagaagatcctgctgtccatcgacgccgacggctgcatccggaccggcttccacgagcacatgaccacctccggccggctgtcctcctccggcaagctgaacctgcagcagctgccccgggacgagtccatcatcaagggctgcgtggtggccccccccggctaccgggtgatcgcctgggacctgaccaccgccgaggtgtactacgccgccgtgctgtccggcgaccggaacatgcagcaggtgttcatcaacatgcggaacgagcccgacaagtaccccgacttccactccaacatcgcccacatggtgttcaagctgcagtgcgagccccgggacgtgaagaagctgttccccgccctgcggcaggccgccaagcgcatcaccttcggcatcctgtacggctccggccccgccaaggtggcccactccgtgaacgaggccctgctggagcaggccgccaagaccggcgagcccttcgtggagtgcaccgtggccgacgccaaggagtacatcgagacctacttcggccagttcccccagctgaagcggtggatcgacaagtgccacgaccagatcaagaaccacggcttcatctactcccacttcggccggaagcggcggctgcacaacatccactccgaggaccggggcgtgcagggcgaggagatccggtccggcttcaacgccatcatccagtccgcctcctccgactccctgctgctgggcgccgtggacgccgacaacgagatcatctccctgggcctggagcaggagatgaagatcgtgatgctggtgcacgactccgtggtggccatcgtgcgggaggacctgatcgaccagtacaacgagatcctgatccggaacatccagaaggaccggggcatctccatccccggctgccccatcggcatcgactccgactccgaggccggcggctcccgggactactcctgcggcaagatgaagaagcagcacccctccatcgcctgcatcgacgacgacgagtacacccggtacgtgaagggcgtgctgctggacgccgagttcgagtacaagaagctggccgccatggacaaggagcaccccgaccactccaagtacaaggacgacaagttcatcgccgtgtgcaaggacctggacaacgtgaagcggatcctgggcgcctccggcggctccaagcggaccgccgacggctccgagttcgagcccaagaagaagcggaaggtg

SEQ ID NO: 1182 - protein, 1048 aa, synthetic construct
  REGION 1..1048: note = Synthetic
MASNFTQFVLVDNGGTGDVTVAPSNFANGVAEWISSNSRSQAYKVTCSVRQSSAQNRKYTIKVEVPKVATQTVGGVELPVAAWRSYLNMELTIPIFATNSDCELIVKAMQGLLKDGNPIPSAIAANSGIYGAPESATESGGTSTESEGSAGTSTESEGSAGSAGSTSGSGSSMKIAVVDKALNNTRYDKHFQLYGEEVDVFHMCNEKLSGRLLKKHITIGTPENPFDPNDYDFVILVGAEPFLYFAGKKGIGDYTGKRVEYNGYANWIASISPAQLHFKPEMKPVFDATVENIHDIINGREKIAKAGDYRPITDPDEAEEYIKMVYNMVIGPVAFASATSALYCRDGYLLGVSISHQEYQGVYIDSDCLTEVAVYYLQKILDSENHTIVFHNLKFDMHFYKYHLGLTFDKAHKERRLHDTMLQHYVLDERRGTHGLKSLAMKYTDMGDYDFELDKFKDDYCKAHKIKKEDFTYDLIPFDIMWPYAAKDTDATIRLHNFFLPKIEKNEKLCSLYYDVLMPGCVFLQRVEDRGVPISIDRLKEAQYQLTHNLNKAREKLYTYPEVKQLEQDQNEAFNPNSVKQLRVLLFDYVGLTPTGKLTDTGADSTDAEALNELATQHPIAKTLLEIRKLTKLISTYVEKILLSIDADGCIRTGFHEHMTTSGRLSSSGKLNLQQLPRDESIIKGCVVAPPGYRVIAWDLTTAEVYYAAVLSGDRNMQQVFINMRNEPDKYPDFHSNIAHMVFKLQCEPRDVKKLFPALRQAAKRITFGILYGSGPAKVAHSVNEALLEQAAKTGEPFVECTVADAKEYIETYFGQFPQLKRWIDKCHDQIKNHGFIYSHFGRKRRLHNIHSEDRGVQGEEIRSGFNAIIQSASSDSLLLGAVDADNEIISLGLEQEMKIVMLVHDSVVAIVREDLIDQYNEILIRNIQKDRGISIPGCPIGIDSDSEAGGSRDYSCGKMKKQHPSIACIDDDEYTRYVKGVLLDAEFEYKKLAAMDKEHPDHSKYKDDKFIAVCKDLDNVKRILGASGGSKRTADGSEFEPKKKRKV

SEQ ID NO: 1183 - DNA, 1725 bp, synthetic construct
  misc_feature 1..1725: note = Synthetic
  source 1..1725: mol_type = other DNA
atgaagcacatgccccggaagatgtactcctgcgacttcgagaccaccaccaaggtggaggactgccgggtgtgggcctacggctacatgaacatcgaggaccactccgagtacaagatcggcaactccctggacgagttcatggcctgggtgctgaaggtgcaggccgacctgtacttccacaacctgaagttcgacggcgccttcatcatcaactggctggagcggaacggcttcaagtggtccgccgacggcctgcccaacacctacaacaccatcatctcccggatgggccagtggtacatgatcgacatctgcctgggctacaagggcaagcggaagatccacaccgtgatctacgactccctgaagaagctgcccttccccgtgaagaagatcgccaaggacttcaagctgaccgtgctgaagggcgacatcgactaccacaaggagcggcccgtgggctacaagatcacccccgaggagtacgcctacatcaagaacgacatccagatcatcgccgaggccctgctgatccagttcaagcagggcctggaccggatgaccgccggctccgactccctgaagggcttcaaggacatcatcaccaccaagaagttcaagaaggtgttccccaccctgtccctgggcctggacaaggaggtgcggtacgcctaccggggcggcttcacctggctgaacgaccggttcaaggagaaggagatcggcgagggcatggtgttcgacgtgaactccctgtaccccgcccagatgtactcccggctgctgccctacggcgagcccatcgtgttcgagggcaagtacgtgtgggacgaggactaccccctgcacatccagcacatccggtgcgagttcgagctgaaggagggctacatccccaccatccagatcaagcggtcccggttctacaagggcaacgagtacctgaagtcctccggcggcgagatcgccgacctgtggctgtccaacgtggacctggagctgatgaaggagcactacgacctgtacaacgtggagtacatctccggcctgaagttcaaggccaccaccggcctgttcaaggacttcatcgacaagtggacctacatcaagaccacctccgagggcgccatcaagcagctggccaagctgatgctgaactccctgtacggcaagttcgcctccaaccccgacgtgaccggcaaggtgccctacctgaaggagaacggcgccctgggcttccggctgggcgaggaggagaccaaggaccccgtgtacacccccatgggcgtgttcatcaccgcctgggcccggtacaccaccatcaccgccgcccaggcctgctacgaccggatcatctactgcgacaccgactccatccacctgaccggcaccgagatccccgacgtgatcaaggacatcgtggaccccaagaagctgggctactgggcccacgagtccaccttcaagcgggccaagtacctgcggcagaagacctacatccaggacatctacatgaaggaggtggacggcaagctggtggagggctcccccgacgactacaccgacatcaagttctccgtgaagtgcgccggcatgaccgacaagatcaagaaggaggtgaccttcgagaacttcaaggtgggcttctcccggaagatgaagcccaagcccgtgcaggtgcccggcggcgtggtgctggtggacgacaccttcaccatcaag

SEQ ID NO: 1184 - protein, 575 aa, synthetic construct [sequence omitted]

SEQ ID NO: 1185 - RNA, 2413 nt, synthetic construct
  misc_feature 1..2413: note = Synthetic
  source 1..2413: mol_type = other RNA
gggaagctcagaataaacgctcaactttggccggatctgccaccatgaagcacatgccccggaagcggtactcctgcgccttcgccaccaccaccaaggtggaggactgccgggtgtgggcctacggctacatgaacatcgaggaccactccgagtacaagatcggcaactccctggacgagttcatggcctgggccctgaaggtgcaggccgacctgtacttccacaacctgaagttcgacggcgccttcatcatcaactggctggagcggaacggcttcaagtggtccgccgacggcctgcccaacacctacaacaccatcatctcccggaccggccagtggtacatgatcgacatctgcctgggctacaagggcaagcggaagatccacaccgtgatctacgactccctgaagaagctgcccttccccgtgaagaagatcgccaaggacttcaagctgaccgtgctgaagggcgacatcgactaccacaaggagcggcccgtgggctacaagatcacccccgaggagtacgcctacatcaagaacgacatccagatcatcgccgaggccctgctgatccagttcaagcagggcctggaccggatgaccgccggctccgactccctgaaggacttcaaggacatcatcaccaccaagaagttcaagaaggtgttccccaccctgtccctgggcctggacaagaaggtgcggtacgcctaccggggcggcttcacctggctgaacgaccggttcaaggagaaggagatcggcgagggcatggtgttcgacgtgaactccctgtaccccgcccagatgtactcccggctgctgccctacggcgagcccatcgtgttcgagggcaagtacgtgtgggacgaggactaccccctgcacatccagcacatccggtgcgagttcgagctgaaggagggctacatccccaccatccagatcaagcggtcccggttctacaagggcaacgagtacctgaagtcctccggcggcgagatcgccgacctgtggctgtccaacgtggacctggagctgatgaaggagcactacgacctgtacaacgtggagtacatctccggcctgaagttcaaggccaccaccggcctgttcaaggacttcatcgacaagtggacctacatcaagaccacctccgagggcgccatcaagcagctggccaagctgatgctgaactccctgtacggcaagttcgcctccaaccccgacgtgaccggcaaggtgccctacctgaaggagaacggcgccctgggcttccggctgggcgaggaggagaccaaggaccccgtgtacacccccatgggcgtgttcatcaccgcctgggcccggtacaccaccatcaccgccgcccaggcctgctacgaccggatcatctactgcgacaccgactccatccacctgaccggcaccgagatccccgacgtgatcaaggacatcgtggaccccaagaagctgggctactgggcccacgagtccaccttcaagcgggccaagtacctgcggcccaagacctacatccaggacatctacatgaaggaggtggacggcgagctggtggccggctcccccgacgactacaccgacatcaagctgtccgtgaagtgcgccggcatgaccgacaagatcaagaaggaggtgaccttcgagaacttcaaggtgggcttctcccggaagatgaagcccaagcccgtgcaggtgcccggcggcgtggtgctggtggacgacaccttcaccatcaagggcggcggctccggcaagcggaccgccgacggctccggcggcggctcccccaagaagaagcggaaggtgtccgagtccgccacccccgagtccgtgtccggctggcggctgttcaagaagatctcctagctagcaccagcctcaagaacacccgaatggagtctctaagctacataataccaacttacactttacaaaatgttgtcccccaaaatgtagccattcgtatctgctcctaataaaaagaaagtttcttcacattctctcgagaaaaaaaaaaaatggaaaaaaaaaaaacggaaaaaaaaaaaaggtaaaaaaaaaaaatataaaaaaaaaaaacataaaaaaaaaaaacgaaaaaaaaaaaacgtaaaaaaaaaaaactcaaaaaaaaaaaagataaaaaaaaaaaacctaaaaaaaaaaaatgtaaaaaaaaaaaagggaaaaaaaaaaaacgcaaaaaaaaaaaacacaaaaaaaaaaaatgcaaaaaaaaaaaatcgaaaaaaaaaaaatctaaaaaaaaaaaacgaaaaaaaaaaaacccaaaaaaaaaaaagacaaaaaaaaaaaatagaaaaaaaaaaagttaaaaaaaaaaaactgaaaaaaaaaaaatttaaaaaaaaaaaatctag

SEQ ID NO: 1186 - RNA, 1854 nt, synthetic construct
  misc_feature 1..1854: note = Synthetic
  source 1..1854: mol_type = other RNA
atgaagcacatgccccggaagcggtactcctgcgccttcgccaccaccaccaaggtggaggactgccgggtgtgggcctacggctacatgaacatcgaggaccactccgagtacaagatcggcaactccctggacgagttcatggcctgggccctgaaggtgcaggccgacctgtacttccacaacctgaagttcgacggcgccttcatcatcaactggctggagcggaacggcttcaagtggtccgccgacggcctgcccaacacctacaacaccatcatctcccggaccggccagtggtacatgatcgacatctgcctgggctacaagggcaagcggaagatccacaccgtgatctacgactccctgaagaagctgcccttccccgtgaagaagatcgccaaggacttcaagctgaccgtgctgaagggcgacatcgactaccacaaggagcggcccgtgggctacaagatcacccccgaggagtacgcctacatcaagaacgacatccagatcatcgccgaggccctgctgatccagttcaagcagggcctggaccggatgaccgccggctccgactccctgaaggacttcaaggacatcatcaccaccaagaagttcaagaaggtgttccccaccctgtccctgggcctggacaagaaggtgcggtacgcctaccggggcggcttcacctggctgaacgaccggttcaaggagaaggagatcggcgagggcatggtgttcgacgtgaactccctgtaccccgcccagatgtactcccggctgctgccctacggcgagcccatcgtgttcgagggcaagtacgtgtgggacgaggactaccccctgcacatccagcacatccggtgcgagttcgagctgaaggagggctacatccccaccatccagatcaagcggtcccggttctacaagggcaacgagtacctgaagtcctccggcggcgagatcgccgacctgtggctgtccaacgtggacctggagctgatgaaggagcactacgacctgtacaacgtggagtacatctccggcctgaagttcaaggccaccaccggcctgttcaaggacttcatcgacaagtggacctacatcaagaccacctccgagggcgccatcaagcagctggccaagctgatgctgaactccctgtacggcaagttcgcctccaaccccgacgtgaccggcaaggtgccctacctgaaggagaacggcgccctgggcttccggctgggcgaggaggagaccaaggaccccgtgtacacccccatgggcgtgttcatcaccgcctgggcccggtacaccaccatcaccgccgcccaggcctgctacgaccggatcatctactgcgacaccgactccatccacctgaccggcaccgagatccccgacgtgatcaaggacatcgtggaccccaagaagctgggctactgggcccacgagtccaccttcaagcgggccaagtacctgcggcccaagacctacatccaggacatctacatgaaggaggtggacggcgagctggtggccggctcccccgacgactacaccgacatcaagctgtccgtgaagtgcgccggcatgaccgacaagatcaagaaggaggtgaccttcgagaacttcaaggtgggcttctcccggaagatgaagcccaagcccgtgcaggtgcccggcggcgtggtgctggtggacgacaccttcaccatcaagggcggcggctccggcaagcggaccgccgacggctccggcggcggctcccccaagaagaagcggaaggtgtccgagtccgccacccccgagtccgtgtccggctggcggctgttcaagaagatctcctag

SEQ ID NO: 1187 - protein, 617 aa, synthetic construct
  REGION 1..617: note = Synthetic
MKHMPRKRYSCAFATTTKVEDCRVWAYGYMNIEDHSEYKIGNSLDEFMAWALKVQADLYFHNLKFDGAFIINWLERNGFKWSADGLPNTYNTIISRTGQWYMIDICLGYKGKRKIHTVIYDSLKKLPFPVKKIAKDFKLTVLKGDIDYHKERPVGYKITPEEYAYIKNDIQIIAEALLIQFKQGLDRMTAGSDSLKDFKDIITTKKFKKVFPTLSLGLDKKVRYAYRGGFTWLNDRFKEKEIGEGMVFDVNSLYPAQMYSRLLPYGEPIVFEGKYVWDEDYPLHIQHIRCEFELKEGYIPTIQIKRSRFYKGNEYLKSSGGEIADLWLSNVDLELMKEHYDLYNVEYISGLKFKATTGLFKDFIDKWTYIKTTSEGAIKQLAKLMLNSLYGKFASNPDVTGKVPYLKENGALGFRLGEEETKDPVYTPMGVFITAWARYTTITAAQACYDRIIYCDTDSIHLTGTEIPDVIKDIVDPKKLGYWAHESTFKRAKYLRPKTYIQDIYMKEVDGELVAGSPDDYTDIKLSVKCAGMTDKIKKEVTFENFKVGFSRKMKPKPVQVPGGVVLVDDTFTIKGGGSGKRTADGSGGGSPKKKRKVSESATPESVSGWRLFKKIS

SEQ ID NO: 1188 - RNA, 1794 nt, synthetic construct
  misc_feature 1..1794: note = Synthetic
  source 1..1794: mol_type = other RNA
atgaagcacatgccccggaagcggtactcctgcgccttcgccaccaccaccaaggtggaggactgccgggtgtgggcctacggctacatgaacatcgaggaccactccgagtacaagatcggcaactccctggacgagttcatggcctgggccctgaaggtgcaggccgacctgtacttccacaacctgaagttcgacggcgccttcatcatcaactggctggagcggaacggcttcaagtggtccgccgacggcctgcccaacacctacaacaccatcatctcccggaccggccagtggtacatgatcgacatctgcctgggctacaagggcaagcggaagatccacaccgtgatctacgactccctgaagaagctgcccttccccgtgaagaagatcgccaaggacttcaagctgaccgtgctgaagggcgacatcgactaccacaaggagcggcccgtgggctacaagatcacccccgaggagtacgcctacatcaagaacgacatccagatcatcgccgaggccctgctgatccagttcaagcagggcctggaccggatgaccgccggctccgactccctgaaggacttcaaggacatcatcaccaccaagaagttcaagaaggtgttccccaccctgtccctgggcctggacaagaaggtgcggtacgcctaccggggcggcttcacctggctgaacgaccggttcaaggagaaggagatcggcgagggcatggtgttcgacgtgaactccctgtaccccgcccagatgtactcccggctgctgccctacggcgagcccatcgtgttcgagggcaagtacgtgtgggacgaggactaccccctgcacatccagcacatccggtgcgagttcgagctgaaggagggctacatccccaccatccagatcaagcggtcccggttctacaagggcaacgagtacctgaagtcctccggcggcgagatcgccgacctgtggctgtccaacgtggacctggagctgatgaaggagcactacgacctgtacaacgtggagtacatctccggcctgaagttcaaggccaccaccggcctgttcaaggacttcatcgacaagtggacctacatcaagaccacctccgagggcgccatcaagcagctggccaagctgatgctgaactccctgtacggcaagttcgcctccaaccccgacgtgaccggcaaggtgccctacctgaaggagaacggcgccctgggcttccggctgggcgaggaggagaccaaggaccccgtgtacacccccatgggcgtgttcatcaccgcctgggcccggtacaccaccatcaccgccgcccaggcctgctacgaccggatcatctactgcgacaccgactccatccacctgaccggcaccgagatccccgacgtgatcaaggacatcgtggaccccaagaagctgggctactgggcccacgagtccaccttcaagcgggccaagtacctgcggcccaagacctacatccaggacatctacatgaaggaggtggacggcgagctggtggccggctcccccgacgactacaccgacatcaagctgtccgtgaagtgcgccggcatgaccgacaagatcaagaaggaggtgaccttcgagaacttcaaggtgggcttctcccggaagatgaagcccaagcccgtgcaggtgcccggcggcgtggtgctggtggacgacaccttcaccatcaagggcggcggctccggcaagcggaccgccgacggctccggcggcggctcccccaagaagaagcggaaggtg

SEQ ID NO: 1189 - protein, 598 aa, synthetic construct
  REGION 1..598: note = Synthetic
MKHMPRKRYSCAFATTTKVEDCRVWAYGYMNIEDHSEYKIGNSLDEFMAWALKVQADLYFHNLKFDGAFIINWLERNGFKWSADGLPNTYNTIISRTGQWYMIDICLGYKGKRKIHTVIYDSLKKLPFPVKKIAKDFKLTVLKGDIDYHKERPVGYKITPEEYAYIKNDIQIIAEALLIQFKQGLDRMTAGSDSLKDFKDIITTKKFKKVFPTLSLGLDKKVRYAYRGGFTWLNDRFKEKEIGEGMVFDVNSLYPAQMYSRLLPYGEPIVFEGKYVWDEDYPLHIQHIRCEFELKEGYIPTIQIKRSRFYKGNEYLKSSGGEIADLWLSNVDLELMKEHYDLYNVEYISGLKFKATTGLFKDFIDKWTYIKTTSEGAIKQLAKLMLNSLYGKFASNPDVTGKVPYLKENGALGFRLGEEETKDPVYTPMGVFITAWARYTTITAAQACYDRIIYCDTDSIHLTGTEIPDVIKDIVDPKKLGYWAHESTFKRAKYLRPKTYIQDIYMKEVDGELVAGSPDDYTDIKLSVKCAGMTDKIKKEVTFENFKVGFSRKMKPKPVQVPGGVVLVDDTFTIKGGGSGKRTADGSGGGSPKKKRKV

SEQ ID NO: 1190 - RNA, 6556 nt, synthetic construct
  misc_feature 1..6556: note = Synthetic
  source 1..6556: mol_type = other RNA
gggaagctcagaataaacgctcaactttggccggatctgccaccatgaagcacatgccccggaagatgtactcctgcgacttcgagaccaccaccaaggtggaggactgccgggtgtgggcctacggctacatgaacatcgaggaccactccgagtacaagatcggcaactccctggacgagttcatggcctgggtgctgaaggtgcaggccgacctgtacttccacaacctgaagttcgacggcgccttcatcatcaactggctggagcggaacggcttcaagtggtccgccgacggcctgcccaacacctacaacaccatcatctcccggatgggccagtggtacatgatcgacatctgcctgggctacaagggcaagcggaagatccacaccgtgatctacgactccctgaagaagctgcccttccccgtgaagaagatcgccaaggacttcaagctgaccgtgctgaagggcgacatcgactaccacaaggagcggcccgtgggctacaagatcacccccgaggagtacgcctacatcaagaacgacatccagatcatcgccgaggccctgctgatccagttcaagcagggcctggaccggatgaccgccggctccgactccctgaagggcttcaaggacatcatcaccaccaagaagttcaagaaggtgttccccaccctgtccctgggcctggacaaggaggtgcggtacgcctaccggggcggcttcacctggctgaacgaccggttcaaggagaaggagatcggcgagggcatggtgttcgacgtgaactccctgtaccccgcccagatgtactcccggctgctgccctacggcgagcccatcgtgttcgagggcaagtacgtgtgggacgaggactaccccctgcacatccagcacatccggtgcgagttcgagctgaaggagggctacatccccaccatccagatcaagcggtcccggttctacaagggcaacgagtacctgaagtcctccggcggcgagatcgccgacctgtggctgtccaacgtggacctggagctgatgaaggagcactacgacctgtacaacgtggagtacatctccggcctgaagttcaaggccaccaccggcctgttcaaggacttcatcgacaagtggacctacatcaagaccacctccgagggcgccatcaagcagctggccaagctgatgctgaactccctgtacggcaagttcgcctccaaccccgacgtgaccggcaaggtgccctacctgaaggagaacggcgccctgggcttccggctgggcgaggaggagaccaaggaccccgtgtacacccccatgggcgtgttcatcaccgcctgggcccggtacaccaccatcaccgccgcccaggcctgctacgaccggatcatctactgcgacaccgactccatccacctgaccggcaccgagatccccgacgtgatcaaggacatcgtggaccccaagaagctgggctactgggcccacgagtccaccttcaagcgggccaagtacctgcggcagaagacctacatccaggacatctacatgaaggaggtggacggcaagctggtggagggctcccccgacgactacaccgacatcaagttctccgtgaagtgcgccggcatgaccgacaagatcaagaaggaggtgaccttcgagaacttcaaggtgggcttctcccggaagatgaagcccaagcccgtgcaggtgcccggcggcgtggtgctggtggacgacaccttcaccatcaagtccggcggctcctccggcggctccaagcggaccgccgacggctccgagttcgagtcccccaagaagaagcggaaggtgtccggcggctcctccggcggctccgacaagaagtactccatcggcctggacatcggcaccaactccgtgggctgggccgtgatcaccgacgagtacaaggtgccctccaagaagttcaaggtgctgggcaacaccgaccggcactccatcaagaagaacctgatcggcgccctgctgttcgactccggcgagaccgccgaggccacccggctgaagcggaccgcccggcggcggtacacccggcggaagaaccggatctgctacctgcaggagatcttctccaacgagatggccaaggtggacgactccttcttccaccggctggaggagtccttcctggtggaggaggacaagaagcacgagcggcaccccatcttcggcaacatcgtggacgaggtggcctaccacgagaagtaccccaccatctaccacctgcggaagaagctggtggactccaccgacaaggccgacctgcggctgatctacctggccctggcccacatgatcaagttccggggccacttcctgatcgagggcgacctgaaccccgacaactccgacgtggacaagctgttcatccagctggtgcagacctacaaccagctgttcgaggagaaccccatcaacgcctccggcgtggacgccaaggccatcctgtccgcccggctgtccaagtcccggcggctggagaacctgatcgcccagctgcccggcgagaagaagaacggcctgttcggcaacctgatcgccctgtccctgggcctgacccccaacttcaagtccaacttcgacctggccgaggacgccaagctgcagctgtccaaggacacctacgacgacgacctggacaacctgctggcccagatcggcgaccagtacgccgacctgttcctggccgccaagaacctgtccgacgccatcctgctgtccgacatcctgcgggtgaacaccgagatcaccaaggcccccctgtccgcctccatgatcaagcggtacgacgagcaccaccaggacctgaccctgctgaaggccctggtgcggcagcagctgcccgagaagtacaaggagatcttcttcgaccagtccaagaacggctacgccggctacatcgacggcggcgcctcccaggaggagttctacaagttcatcaagcccatcctggagaagatggacggcaccgaggagctgctggtgaagctgaaccgggaggacctgctgcggaagcagcggaccttcgacaacggctccatcccccaccagatccacctgggcgagctgcacgccatcctgcggcggcaggaggacttctaccccttcctgaaggacaaccgggagaagatcgagaagatcctgaccttccggatcccctactacgtgggccccctggcccggggcaactcccggttcgcctggatgacccggaagtccgaggagaccatcaccccctggaacttcgaggaggtggtggacaagggcgcctccgcccagtccttcatcgagcggatgaccaacttcgacaagaacctgcccaacgagaaggtgctgcccaagcactccctgctgtacgagtacttcaccgtgtacaacgagctgaccaaggtgaagtacgtgaccgagggcatgcggaagcccgccttcctgtccggcgagcagaagaaggccatcgtggacctgctgttcaagaccaaccggaaggtgaccgtgaagcagctgaaggaggactacttcaagaagatcgagtgcttcgactccgtggagatctccggcgtggaggaccggttcaacgcctccctgggcacctaccacgacctgctgaagatcatcaaggacaaggacttcctggacaacgaggagaacgaggacatcctggaggacatcgtgctgaccctgaccctgttcgaggaccgggagatgatcgaggagcggctgaagacctacgcccacctgttcgacgacaaggtgatgaagcagctgaagcggcggcggtacaccggctggggccggctgtcccggaagctgatcaacggcatccgggacaagcagtccggcaagaccatcctggacttcctgaagtccgacggcttcgccaaccggaacttcatgcagctgatccacgacgactccctgaccttcaaggaggacatccagaaggcccaggtgtccggccagggcgactccctgcacgagcacatcgccaacctggccggctcccccgccatcaagaagggcatcctgcagaccgtgaaggtggtggacgagctggtgaaggtgatgggccggcacaagcccgagaacatcgtgatcgagatggcccgggagaaccagaccacccagaagggccagaagaactcccgggagcggatgaagcggatcgaggagggcatcaaggagctgggctcccagatcctgaaggagcaccccgtggagaacacccagctgcagaacgagaagctgtacctgtactacctgcagaacggccgggacatgtacgtggaccaggagctggacatcaaccggctgtccgactacgacgtggacgccatcgtgccccagtccttcctgaaggacgactccatcgacaacaaggtgctgacccggtccgacaagaaccggggcaagtccgacaacgtgccctccgaggaggtggtgaagaagatgaagaactactggcggcagctgctgaacgccaagctgatcacccagcggaagttcgacaacctgaccaaggccgagcggggcggcctgtccgagctggacaaggccggcttcatcaagcggcagctggtggagacccggcagatcaccaagcacgtggcccagatcctggactcccggatgaacaccaagtacgacgagaacgacaagctgatccgggaggtgaaggtgatcaccctgaagtccaagctggtgtccgacttccggaaggacttccagttctacaaggtgcgggagatcaacaactaccaccacgcccacgacgcctacctgaacgccgtggtgggcaccgccctgatcaagaagtaccccaagctggagtccgagttcgtgtacggcgactacaaggtgtacgacgtgcggaagatgatcgccaagtccgagcaggagatcggcaaggccaccgccaagtacttcttctactccaacatcatgaacttcttcaagaccgagatcaccctggccaacggcgagatccggaagcggcccctgatcgagaccaacggcgagaccggcgagatcgtgtgggacaagggccgggacttcgccaccgtgcggaaggtgctgtccatgccccaggtgaacatcgtgaagaagaccgaggtgcagaccggcggcttctccaaggagtccatcctgcccaagcggaactccgacaagctgatcgcccggaagaaggactgggaccccaagaagtacggcggcttcgactcccccaccgtggcctactccgtgctggtggtggccaaggtggagaagggcaagtccaagaagctgaagtccgtgaaggagctgctgggcatcaccatcatggagcggtcctccttcgagaagaaccccatcgacttcctggaggccaagggctacaaggaggtgaagaaggacctgatcatcaagctgcccaagtactccctgttcgagctggagaacggccggaagcggatgctggcctccgccggcgagctgcagaagggcaacgagctggccctgccctccaagtacgtgaacttcctgtacctggcctcccactacgagaagctgaagggctcccccgaggacaacgagcagaagcagctgttcgtggagcagcacaagcactacctggacgagatcatcgagcagatctccgagttctccaagcgggtgatcctggccgacgccaacctggacaaggtgctgtccgcctacaacaagcaccgggacaagcccatccgggagcaggccgagaacatcatccacctgttcaccctgaccaacctgggcgcccccgccgccttcaagtacttcgacaccaccatcgaccggaagcggtacacctccaccaaggaggtgctggacgccaccctgatccaccagtccatcaccggcctgtacgagacccggatcgacctgtcccagctgggcggcgactccggcggctccaagcggaccgccgacggctccgagttcgagtcccccaagaagaagcggaaggtgtagctagcaccagcctcaagaacacccgaatggagtctctaagctacataataccaacttacactttacaaaatgttgtcccccaaaatgtagccattcgtatctgctcctaataaaaagaaagtttcttcacattctctcgagaaaaaaaaaaaatggaaaaaaaaaaaacggaaaaaaaaaaaaggtaaaaaaaaaaaatataaaaaaaaaaaacataaaaaaaaaaaacgaaaaaaaaaaaacgtaaaaaaaaaaaactcaaaaaaaaaaaagataaaaaaaaaaaacctaaaaaaaaaaaatgtaaaaaaaaaaaagggaaaaaaaaaaaacgcaaaaaaaaaaaacacaaaaaaaaaaaatgcaaaaaaaaaaaatcgaaaaaaaaaaaatctaaaaaaaaaaaacgaaaaaaaaaaaacccaaaaaaaaaaaagacaaaaaaaaaaaatagaaaaaaaaaaagttaaaaaaaaaaaactgaaaaaaaaaaaatttaaaaaaaaaaaatctag

SEQ ID NO: 1191 - RNA, 5997 nt, synthetic construct
  misc_feature 1..5997: note = Synthetic
  source 1..5997: mol_type = other RNA
atgaagcacatgccccggaagatgtactcctgcgacttcgagaccaccaccaaggtggaggactgccgggtgtgggcctacggctacatgaacatcgaggaccactccgagtacaagatcggcaactccctggacgagttcatggcctgggtgctgaaggtgcaggccgacctgtacttccacaacctgaagttcgacggcgccttcatcatcaactggctggagcggaacggcttcaagtggtccgccgacggcctgcccaacacctacaacaccatcatctcccggatgggccagtggtacatgatcgacatctgcctgggctacaagggcaagcggaagatccacaccgtgatctacgactccctgaagaagctgcccttccccgtgaagaagatcgccaaggacttcaagctgaccgtgctgaagggcgacatcgactaccacaaggagcggcccgtgggctacaagatcacccccgaggagtacgcctacatcaagaacgacatccagatcatcgccgaggccctgctgatccagttcaagcagggcctggaccggatgaccgccggctccgactccctgaagggcttcaaggacatcatcaccaccaagaagttcaagaaggtgttccccaccctgtccctgggcctggacaaggaggtgcggtacgcctaccggggcggcttcacctggctgaacgaccggttcaaggagaaggagatcggcgagggcatggtgttcgacgtgaactccctgtaccccgcccagatgtactcccggctgctgccctacggcgagcccatcgtgttcgagggcaagtacgtgtgggacgaggactaccccctgcacatccagcacatccggtgcgagttcgagctgaaggagggctacatccccaccatccagatcaagcggtcccggttctacaagggcaacgagtacctgaagtcctccggcggcgagatcgccgacctgtggctgtccaacgtggacctggagctgatgaaggagcactacgacctgtacaacgtggagtacatctccggcctgaagttcaaggccaccaccggcctgttcaaggacttcatcgacaagtggacctacatcaagaccacctccgagggcgccatcaagcagctggccaagctgatgctgaactccctgtacggcaagttcgcctccaaccccgacgtgaccggcaaggtgccctacctgaaggagaacggcgccctgggcttccggctgggcgaggaggagaccaaggaccccgtgtacacccccatgggcgtgttcatcaccgcctgggcccggtacaccaccatcaccgccgcccaggcctgctacgaccggatcatctactgcgacaccgactccatccacctgaccggcaccgagatccccgacgtgatcaaggacatcgtggaccccaagaagctgggctactgggcccacgagtccaccttcaagcgggccaagtacctgcggcagaagacctacatccaggacatctacatgaaggaggtggacggcaagctggtggagggctcccccgacgactacaccgacatcaagttctccgtgaagtgcgccggcatgaccgacaagatcaagaaggaggtgaccttcgagaacttcaaggtgggcttctcccggaagatgaagcccaagcccgtgcaggtgcccggcggcgtggtgctggtggacgacaccttcaccatcaagtccggcggctcctccggcggctccaagcggaccgccgacggctccgagttcgagtcccccaagaagaagcggaaggtgtccggcggctcctccggcggctccgacaagaagtactccatcggcctggacatcggcaccaactccgtgggctgggccgtgatcaccgacgagtacaaggtgccctccaagaagttcaaggtgctgggcaacaccgaccggcactccatcaagaagaacctgatcggcgccctgctgttcgactccggcgagaccgccgaggccacccggctgaagcggaccgcccggcggcggtacacccggcggaagaaccggatctgctacctgcaggagatcttctccaacgagatggccaaggtggacgactccttcttccaccggctggaggagtccttcctggtggaggaggacaagaagcacgagcggcaccccatcttcggcaacatcgtggacgaggtggcctaccacgagaagtaccccaccatctaccacctgcggaagaagctggtggactccaccgacaaggccgacctgcggctgatctacctggccctggcccacatgatcaagttccggggccacttcctgatcgagggcgacctgaaccccgacaactccgacgtggacaagctgttcatccagctggtgcagacctacaaccagctgttcgaggagaaccccatcaacgcctccggcgtggacgccaaggccatcctgtccgcccggctgtccaagtcccggcggctggagaacctgatcgcccagctgcccggcgagaagaagaacggcctgttcggcaacctgatcgccctgtccctgggcctgacccccaacttcaagtccaacttcgacctggccgaggacgccaagctgcagctgtccaaggacacctacgacgacgacctggacaacctgctggcccagatcggcgaccagtacgccgacctgttcctggccgccaagaacctgtccgacgccatcctgctgtccgacatcctgcgggtgaacaccgagatcaccaaggcccccctgtccgcctccatgatcaagcggtacgacgagcaccaccaggacctgaccctgctgaaggccctggtgcggcagcagctgcccgagaagtacaaggagatcttcttcgaccagtccaagaacggctacgccggctacatcgacggcggcgcctcccaggaggagttctacaagttcatcaagcccatcctggagaagatggacggcaccgaggagctgctggtgaagctgaaccgggaggacctgctgcggaagcagcggaccttcgacaacggctccatcccccaccagatccacctgggcgagctgcacgccatcctgcggcggcaggaggacttctaccccttcctgaaggacaaccgggagaagatcgagaagatcctgaccttccggatcccctactacgtgggccccctggcccggggcaactcccggttcgcctggatgacccggaagtccgaggagaccatcaccccctggaacttcgaggaggtggtggacaagggcgcctccgcccagtccttcatcgagcggatgaccaacttcgacaagaacctgcccaacgagaaggtgctgcccaagcactccctgctgtacgagtacttcaccgtgtacaacgagctgaccaaggtgaagtacgtgaccgagggcatgcggaagcccgccttcctgtccggcgagcagaagaaggccatcgtggacctgctgttcaagaccaaccggaaggtgaccgtgaagcagctgaaggaggactacttcaagaagatcgagtgcttcgactccgtggagatctccggcgtggaggaccggttcaacgcctccctgggcacctaccacgacctgctgaagatcatcaaggacaaggacttcctggacaacgaggagaacgaggacatcctggaggacatcgtgctgaccctgaccctgttcgaggaccgggagatgatcgaggagcggctgaagacctacgcccacctgttcgacgacaaggtgatgaagcagctgaagcggcggcggtacaccggctggggccggctgtcccggaagctgatcaacggcatccgggacaagcagtccggcaagaccatcctggacttcctgaagtccgacggcttcgccaaccggaacttcatgcagctgatccacgacgactccctgaccttcaaggaggacatccagaaggcccaggtgtccggccagggcgactccctgcacgagcacatcgccaacctggccggctcccccgccatcaagaagggcatcctgcagaccgtgaaggtggtggacgagctggtgaaggtgatgggccggcacaagcccgagaacatcgtgatcgagatggcccgggagaaccagaccacccagaagggccagaagaactcccgggagcggatgaagcggatcgaggagggcatcaaggagctgggctcccagatcctgaaggagcaccccgtggagaacacccagctgcagaacgagaagctgtacctgtactacctgcagaacggccgggacatgtacgtggaccaggagctggacatcaaccggctgtccgactacgacgtggacgccatcgtgccccagtccttcctgaaggacgactccatcgacaacaaggtgctgacccggtccgacaagaaccggggcaagtccgacaacgtgccctccgaggaggtggtgaagaagatgaagaactactggcggcagctgctgaacgccaagctgatcacccagcggaagttcgacaacctgaccaaggccgagcggggcggcctgtccgagctggacaaggccggcttcatcaagcggcagctggtggagacccggcagatcaccaagcacgtggcccagatcctggactcccggatgaacaccaagtacgacgagaacgacaagctgatccgggaggtgaaggtgatcaccctgaagtccaagctggtgtccgacttccggaaggacttccagttctacaaggtgcgggagatcaacaactaccaccacgcccacgacgcctacctgaacgccgtggtgggcaccgccctgatcaagaagtaccccaagctggagtccgagttcgtgtacggcgactacaaggtgtacgacgtgcggaagatgatcgccaagtccgagcaggagatcggcaaggccaccgccaagtacttcttctactccaacatcatgaacttcttcaagaccgagatcaccctggccaacggcgagatccggaagcggcccctgatcgagaccaacggcgagaccggcgagatcgtgtgggacaagggccgggacttcgccaccgtgcggaaggtgctgtccatgccccaggtgaacatcgtgaagaagaccgaggtgcagaccggcggcttctccaaggagtccatcctgcccaagcggaactccgacaagctgatcgcccggaagaaggactgggaccccaagaagtacggcggcttcgactcccccaccgtggcctactccgtgctggtggtggccaaggtggagaagggcaagtccaagaagctgaagtccgtgaaggagctgctgggcatcaccatcatggagcggtcctccttcgagaagaaccccatcgacttcctggaggccaagggctacaaggaggtgaagaaggacctgatcatcaagctgcccaagtactccctgttcgagctggagaacggccggaagcggatgctggcctccgccggcgagctgcagaagggcaacgagctggccctgccctccaagtacgtgaacttcctgtacctggcctcccactacgagaagctgaagggctcccccgaggacaacgagcagaagcagctgttcgtggagcagcacaagcactacctggacgagatcatcgagcagatctccgagttctccaagcgggtgatcctggccgacgccaacctggacaaggtgctgtccgcctacaacaagcaccgggacaagcccatccgggagcaggccgagaacatcatccacctgttcaccctgaccaacctgggcgcccccgccgccttcaagtacttcgacaccaccatcgaccggaagcggtacacctccaccaaggaggtgctggacgccaccctgatccaccagtccatcaccggcctgtacgagacccggatcgacctgtcccagctgggcggcgactccggcggctccaagcggaccgccgacggctccgagttcgagtcccccaagaagaagcggaaggtgtag

SEQ ID NO: 1192 - protein, 1998 aa, synthetic construct
  REGION 1..1998: note = Synthetic
MKHMPRKMYSCDFETTTKVEDCRVWAYGYMNIEDHSEYKIGNSLDEFMAWVLKVQADLYFHNLKFDGAFIINWLERNGFKWSADGLPNTYNTIISRMGQWYMIDICLGYKGKRKIHTVIYDSLKKLPFPVKKIAKDFKLTVLKGDIDYHKERPVGYKITPEEYAYIKNDIQIIAEALLIQFKQGLDRMTAGSDSLKGFKDIITTKKFKKVFPTLSLGLDKEVRYAYRGGFTWLNDRFKEKEIGEGMVFDVNSLYPAQMYSRLLPYGEPIVFEGKYVWDEDYPLHIQHIRCEFELKEGYIPTIQIKRSRFYKGNEYLKSSGGEIADLWLSNVDLELMKEHYDLYNVEYISGLKFKATTGLFKDFIDKWTYIKTTSEGAIKQLAKLMLNSLYGKFASNPDVTGKVPYLKENGALGFRLGEEETKDPVYTPMGVFITAWARYTTITAAQACYDRIIYCDTDSIHLTGTEIPDVIKDIVDPKKLGYWAHESTFKRAKYLRQKTYIQDIYMKEVDGKLVEGSPDDYTDIKFSVKCAGMTDKIKKEVTFENFKVGFSRKMKPKPVQVPGGVVLVDDTFTIKSGGSSGGSKRTADGSEFESPKKKRKVSGGSSGGSDKKYSIGLDIGTNSVGWAVITDEYKVPSKKFKVLGNTDRHSIKKNLIGALLFDSGETAEATRLKRTARRRYTRRKNRICYLQEIFSNEMAKVDDSFFHRLEESFLVEEDKKHERHPIFGNIVDEVAYHEKYPTIYHLRKKLVDSTDKADLRLIYLALAHMIKFRGHFLIEGDLNPDNSDVDKLFIQLVQTYNQLFEENPINASGVDAKAILSARLSKSRRLENLIAQLPGEKKNGLFGNLIALSLGLTPNFKSNFDLAEDAKLQLSKDTYDDDLDNLLAQIGDQYADLFLAAKNLSDAILLSDILRVNTEITKAPLSASMIKRYDEHHQDLTLLKALVRQQLPEKYKEIFFDQSKNGYAGYIDGGASQEEFYKFIKPILEKMDGTEELLVKLNREDLLRKQRTFDNGSIPHQIHLGELHAILRRQEDFYPFLKDNREKIEKILTFRIPYYVGPLARGNSRFAWMTRKSEETITPWNFEEVVDKGASAQSFIERMTNFDKNLPNEKVLPKHSLLYEYFTVYNELTKVKYVTEGMRKPAFLSGEQKKAIVDLLFKTNRKVTVKQLKEDYFKKIECFDSVEISGVEDRFNASLGTYHDLLKIIKDKDFLDNEENEDILEDIVLTLTLFEDREMIEERLKTYAHLFDDKVMKQLKRRRYTGWGRLSRKLINGIRDKQSGKTILDFLKSDGFANRNFMQLIHDDSLTFKEDIQKAQVSGQGDSLHEHIANLAGSPAIKKGILQTVKVVDELVKVMGRHKPENIVIEMARENQTTQKGQKNSRERMKRIEEGIKELGSQILKEHPVENTQLQNEKLYLYYLQNGRDMYVDQELDINRLSDYDVDAIVPQSFLKDDSIDNKVLTRSDKNRGKSDNVPSEEVVKKMKNYWRQLLNAKLITQRKFDNLTKAERGGLSELDKAGFIKRQLVETRQITKHVAQILDSRMNTKYDENDKLIREVKVITLKSKLVSDFRKDFQFYKVREINNYHHAHDAYLNAVVGTALIKKYPKLESEFVYGDYKVYDVRKMIAKSEQEIGKATAKYFFYSNIMNFFKTEITLANGEIRKRPLIETNGETGEIVWDKGRDFATVRKVLSMPQVNIVKKTEVQTGGFSKESILPKRNSDKLIARKKDWDPKKYGGFDSPTVAYSVLVVAKVEKGKSKKLKSVKELLGITIMERSSFEKNPIDFLEAKGYKEVKKDLIIKLPKYSLFELENGRKRMLASAGELQKGNELALPSKYVNFLYLASHYEKLKGSPEDNEQKQLFVEQHKHYLDEIIEQISEFSKRVILADANLDKVLSAYNKHRDKPIREQAENIIHLFTLTNLGAPAAFKYFDTTIDRKRYTSTKEVLDATLIHQSITGLYETRIDLSQLGGDSGGSKRTADGSEFESPKKKRKV

SEQ ID NO: 1193 - RNA, 6547 nt, synthetic construct
  misc_feature 1..6547: note = Synthetic
  source 1..6547: mol_type = other RNA
gggaagctcagaataaacgctcaactttggccggatctgccaccatgaagcggaccgccgacggctccgagttcgagtcccccaagaagaagcggaaggtggacaagaagtactccatcggcctggacatcggcaccaactccgtgggctgggccgtgatcaccgacgagtacaaggtgccctccaagaagttcaaggtgctgggcaacaccgaccggcactccatcaagaagaacctgatcggcgccctgctgttcgactccggcgagaccgccgaggccacccggctgaagcggaccgcccggcggcggtacacccggcggaagaaccggatctgctacctgcaggagatcttctccaacgagatggccaaggtggacgactccttcttccaccggctggaggagtccttcctggtggaggaggacaagaagcacgagcggcaccccatcttcggcaacatcgtggacgaggtggcctaccacgagaagtaccccaccatctaccacctgcggaagaagctggtggactccaccgacaaggccgacctgcggctgatctacctggccctggcccacatgatcaagttccggggccacttcctgatcgagggcgacctgaaccccgacaactccgacgtggacaagctgttcatccagctggtgcagacctacaaccagctgttcgaggagaaccccatcaacgcctccggcgtggacgccaaggccatcctgtccgcccggctgtccaagtcccggcggctggagaacctgatcgcccagctgcccggcgagaagaagaacggcctgttcggcaacctgatcgccctgtccctgggcctgacccccaacttcaagtccaacttcgacctggccgaggacgccaagctgcagctgtccaaggacacctacgacgacgacctggacaacctgctggcccagatcggcgaccagtacgccgacctgttcctggccgccaagaacctgtccgacgccatcctgctgtccgacatcctgcgggtgaacaccgagatcaccaaggcccccctgtccgcctccatgatcaagcggtacgacgagcaccaccaggacctgaccctgctgaaggccctggtgcggcagcagctgcccgagaagtacaaggagatcttcttcgaccagtccaagaacggctacgccggctacatcgacggcggcgcctcccaggaggagttctacaagttcatcaagcccatcctggagaagatggacggcaccgaggagctgctggtgaagctgaaccgggaggacctgctgcggaagcagcggaccttcgacaacggctccatcccccaccagatccacctgggcgagctgcacgccatcctgcggcggcaggaggacttctaccccttcctgaaggacaaccgggagaagatcgagaagatcctgaccttccggatcccctactacgtgggccccctggcccggggcaactcccggttcgcctggatgacccggaagtccgaggagaccatcaccccctggaacttcgaggaggtggtggacaagggcgcctccgcccagtccttcatcgagcggatgaccaacttcgacaagaacctgcccaacgagaaggtgctgcccaagcactccctgctgtacgagtacttcaccgtgtacaacgagctgaccaaggtgaagtacgtgaccgagggcatgcggaagcccgccttcctgtccggcgagcagaagaaggccatcgtggacctgctgttcaagaccaaccggaaggtgaccgtgaagcagctgaaggaggactacttcaagaagatcgagtgcttcgactccgtggagatctccggcgtggaggaccggttcaacgcctccctgggcacctaccacgacctgctgaagatcatcaaggacaaggacttcctggacaacgaggagaacgaggacatcctggaggacatcgtgctgaccctgaccctgttcgaggaccgggagatgatcgaggagcggctgaagacctacgcccacctgttcgacgacaaggtgatgaagcagctgaagcggcggcggtacaccggctggggccggctgtcccggaagctgatcaacggcatccgggacaagcagtccggcaagaccatcctggacttcctgaagtccgacggcttcgccaaccggaacttcatgcagctgatccacgacgactccctgaccttcaaggaggacatccagaaggcccaggtgtccggccagggcgactccctgcacgagcacatcgccaacctggccggctcccccgccatcaagaagggcatcctgcagaccgtgaaggtggtggacgagctggtgaaggtgatgggccggcacaagcccgagaacatcgtgatcgagatggcccgggagaaccagaccacccagaagggccagaagaactcccgggagcggatgaagcggatcgaggagggcatcaaggagctgggctcccagatcctgaaggagcaccccgtggagaacacccagctgcagaacgagaagctgtacctgtactacctgcagaacggccgggacatgtacgtggaccaggagctggacatcaaccggctgtccgactacgacgtggacgccatcgtgccccagtccttcctgaaggacgactccatcgacaacaaggtgctgacccggtccgacaagaaccggggcaagtccgacaacgtgccctccgaggaggtggtgaagaagatgaagaactactggcggcagctgctgaacgccaagctgatcacccagcggaagttcgacaacctgaccaaggccgagcggggcggcctgtccgagctggacaaggccggcttcatcaagcggcagctggtggagacccggcagatcaccaagcacgtggcccagatcctggactcccggatgaacaccaagtacgacgagaacgacaagctgatccgggaggtgaaggtgatcaccctgaagtccaagctggtgtccgacttccggaaggacttccagttctacaaggtgcgggagatcaacaactaccaccacgcccacgacgcctacctgaacgccgtggtgggcaccgccctgatcaagaagtaccccaagctggagtccgagttcgtgtacggcgactacaaggtgtacgacgtgcggaagatgatcgccaagtccgagcaggagatcggcaaggccaccgccaagtacttcttctactccaacatcatgaacttcttcaagaccgagatcaccctggccaacggcgagatccggaagcggcccctgatcgagaccaacggcgagaccggcgagatcgtgtgggacaagggccgggacttcgccaccgtgcggaaggtgctgtccatgccccaggtgaacatcgtgaagaagaccgaggtgcagaccggcggcttctccaaggagtccatcctgcccaagcggaactccgacaagctgatcgcccggaagaaggactgggaccccaagaagtacggcggcttcgactcccccaccgtggcctactccgtgctggtggtggccaaggtggagaagggcaagtccaagaagctgaagtccgtgaaggagctgctgggcatcaccatcatggagcggtcctccttcgagaagaaccccatcgacttcctggaggccaagggctacaaggaggtgaagaaggacctgatcatcaagctgcccaagtactccctgttcgagctggagaacggccggaagcggatgctggcctccgccggcgagctgcagaagggcaacgagctggccctgccctccaagtacgtgaacttcctgtacctggcctcccactacgagaagctgaagggctcccccgaggacaacgagcagaagcagctgttcgtggagcagcacaagcactacctggacgagatcatcgagcagatctccgagttctccaagcgggtgatcctggccgacgccaacctggacaaggtgctgtccgcctacaacaagcaccgggacaagcccatccgggagcaggccgagaacatcatccacctgttcaccctgaccaacctgggcgcccccgccgccttcaagtacttcgacaccaccatcgaccggaagcggtacacctccaccaaggaggtgctggacgccaccctgatccaccagtccatcaccggcctgtacgagacccggatcgacctgtcccagctgggcggcgactccggcggctcctccggcggctccaagcggaccgccgacggctccgagttcgagtcccccaagaagaagcggaaggtgtccggcggctcctccggcggctccatgaagcacatgccccggaagatgtactcctgcgacttcgagaccaccaccaaggtggaggactgccgggtgtgggcctacggctacatgaacatcgaggaccactccgagtacaagatcggcaactccctggacgagttcatggcctgggtgctgaaggtgcaggccgacctgtacttccacaacctgaagttcgacggcgccttcatcatcaactggctggagcggaacggcttcaagtggtccgccgacggcctgcccaacacctacaacaccatcatctcccggatgggccagtggtacatgatcgacatctgcctgggctacaagggcaagcggaagatccacaccgtgatctacgactccctgaagaagctgcccttccccgtgaagaagatcgccaaggacttcaagctgaccgtgctgaagggcgacatcgactaccacaaggagcggcccgtgggctacaagatcacccccgaggagtacgcctacatcaagaacgacatccagatcatcgccgaggccctgctgatccagttcaagcagggcctggaccggatgaccgccggctccgactccctgaagggcttcaaggacatcatcaccaccaagaagttcaagaaggtgttccccaccctgtccctgggcctggacaaggaggtgcggtacgcctaccggggcggcttcacctggctgaacgaccggttcaaggagaaggagatcggcgagggcatggtgttcgacgtgaactccctgtaccccgcccagatgtactcccggctgctgccctacggcgagcccatcgtgttcgagggcaagtacgtgtgggacgaggactaccccctgcacatccagcacatccggtgcgagttcgagctgaaggagggctacatccccaccatccagatcaagcggtcccggttctacaagggcaacgagtacctgaagtcctccggcggcgagatcgccgacctgtggctgtccaacgtggacctggagctgatgaaggagcactacgacctgtacaacgtggagtacatctccggcctgaagttcaaggccaccaccggcctgttcaaggacttcatcgacaagtggacctacatcaagaccacctccgagggcgccatcaagcagctggccaagctgatgctgaactccctgtacggcaagttcgcctccaaccccgacgtgaccggcaaggtgccctacctgaaggagaacggcgccctgggcttccggctgggcgaggaggagaccaaggaccccgtgtacacccccatgggcgtgttcatcaccgcctgggcccggtacaccaccatcaccgccgcccaggcctgctacgaccggatcatctactgcgacaccgactccatccacctgaccggcaccgagatccccgacgtgatcaaggacatcgtggaccccaagaagctgggctactgggcccacgagtccaccttcaagcgggccaagtacctgcggcagaagacctacatccaggacatctacatgaaggaggtggacggcaagctggtggagggctcccccgacgactacaccgacatcaagttctccgtgaagtgcgccggcatgaccgacaagatcaagaaggaggtgaccttcgagaacttcaaggtgggcttctcccggaagatgaagcccaagcccgtgcaggtgcccggcggcgtggtgctggtggacgacaccttcaccatcaagtagctagcaccagcctcaagaacacccgaatggagtctctaagctacataataccaacttacactttacaaaatgttgtcccccaaaatgtagccattcgtatctgctcctaataaaaagaaagtttcttcacattctctcgagaaaaaaaaaaaatggaaaaaaaaaaaacggaaaaaaaaaaaaggtaaaaaaaaaaaatataaaaaaaaaaaacataaaaaaaaaaaacgaaaaaaaaaaaacgtaaaaaaaaaaaactcaaaaaaaaaaaagataaaaaaaaaaaacctaaaaaaaaaaaatgtaaaaaaaaaaaagggaaaaaaaaaaaacgcaaaaaaaaaaaacacaaaaaaaaaaaatgcaaaaaaaaaaaatcgaaaaaaaaaaaatctaaaaaaaaaaaacgaaaaaaaaaaaacccaaaaaaaaaaaagacaaaaaaaaaaaatagaaaaaaaaaaagttaaaaaaaaaaaactgaaaaaaaaaaaatttaaaaaaaaaaaatctag

SEQ ID NO: 1194 - RNA, 5988 nt, synthetic construct
  misc_feature 1..5988: note = Synthetic
  source 1..5988: mol_type = other RNA
atgaagcggaccgccgacggctccgagttcgagtcccccaagaagaagcggaaggtggacaagaagtactccatcggcctggacatcggcaccaactccgtgggctgggccgtgatcaccgacgagtacaaggtgccctccaagaagttcaaggtgctgggcaacaccgaccggcactccatcaagaagaacctgatcggcgccctgctgttcgactccggcgagaccgccgaggccacccggctgaagcggaccgcccggcggcggtacacccggcggaagaaccggatctgctacctgcaggagatcttctccaacgagatggccaaggtggacgactccttcttccaccggctggaggagtccttcctggtggaggaggacaagaagcacgagcggcaccccatcttcggcaacatcgtggacgaggtggcctaccacgagaagtaccccaccatctaccacctgcggaagaagctggtggactccaccgacaaggccgacctgcggctgatctacctggccctggcccacatgatcaagttccggggccacttcctgatcgagggcgacctgaaccccgacaactccgacgtggacaagctgttcatccagctggtgcagacctacaaccagctgttcgaggagaaccccatcaacgcctccggcgtggacgccaaggccatcctgtccgcccggctgtccaagtcccggcggctggagaacctgatcgcccagctgcccggcgagaagaagaacggcctgttcggcaacctgatcgccctgtccctgggcctgacccccaacttcaagtccaacttcgacctggccgaggacgccaagctgcagctgtccaaggacacctacgacgacgacctggacaacctgctggcccagatcggcgaccagtacgccgacctgttcctggccgccaagaacctgtccgacgccatcctgctgtccgacatcctgcgggtgaacaccgagatcaccaaggcccccctgtccgcctccatgatcaagcggtacgacgagcaccaccaggacctgaccctgctgaaggccctggtgcggcagcagctgcccgagaagtacaaggagatcttcttcgaccagtccaagaacggctacgccggctacatcgacggcggcgcctcccaggaggagttctacaagttcatcaagcccatcctggagaagatggacggcaccgaggagctgctggtgaagctgaaccgggaggacctgctgcggaagcagcggaccttcgacaacggctccatcccccaccagatccacctgggcgagctgcacgccatcctgcggcggcaggaggacttctaccccttcctgaaggacaaccgggagaagatcgagaagatcctgaccttccggatcccctactacgtgggccccctggcccggggcaactcccggttcgcctggatgacccggaagtccgaggagaccatcaccccctggaacttcgaggaggtggtggacaagggcgcctccgcccagtccttcatcgagcggatgaccaacttcgacaagaacctgcccaacgagaaggtgctgcccaagcactccctgctgtacgagtacttcaccgtgtacaacgagctgaccaaggtgaagtacgtgaccgagggcatgcggaagcccgccttcctgtccggcgagcagaagaaggccatcgtggacctgctgttcaagaccaaccggaaggtgaccgtgaagcagctgaaggaggactacttcaagaagatcgagtgcttcgactccgtggagatctccggcgtggaggaccggttcaacgcctccctgggcacctaccacgacctgctgaagatcatcaaggacaaggacttcctggacaacgaggagaacgaggacatcctggaggacatcgtgctgaccctgaccctgttcgaggaccgggagatgatcgaggagcggctgaagacctacgcccacctgttcgacgacaaggtgatgaagcagctgaagcggcggcggtacaccggctggggccggctgtcccggaagctgatcaacggcatccgggacaagcagtccggcaagaccatcctggacttcctgaagtccgacggcttcgccaaccggaacttcatgcagctgatccacgacgactccctgaccttcaaggaggacatccagaaggcccaggtgtccggccagggcgactccctgcacgagcacatcgccaacctggccggctcccccgccatcaagaagggcatcctgcagaccgtgaaggtggtggacgagctggtgaaggtgatgggccggcacaagcccgagaacatcgtgatcgagatggcccgggagaaccagaccacccagaagggccagaagaactcccgggagcggatgaagcggatcgaggagggcatcaaggagctgggctcccagatcctgaaggagcaccccgtggagaacacccagctgcagaacgagaagctgtacctgtactacctgcagaacggccgggacatgtacgtggaccaggagctggacatcaaccggctgtccgactacgacgtggacgccatcgtgccccagtccttcctgaaggacgactccatcgacaacaaggtgctgacccggtccgacaagaaccggggcaagtccgacaacgtgccctccgaggaggtggtgaagaagatgaagaactactggcggcagctgctgaacgccaagctgatcacccagcggaagttcgacaacctgaccaaggccgagcggggcggcctgtccgagctggacaaggccggcttcatcaagcggcagctggtggagacccggcagatcaccaagcacgtggcccagatcctggactcccggatgaacaccaagtacgacgagaacgacaagctgatccgggaggtgaaggtgatcaccctgaagtccaagctggtgtccgacttccggaaggacttccagttctacaaggtgcgggagatcaacaactaccaccacgcccacgacgcctacctgaacgccgtggtgggcaccgccctgatcaagaagtaccccaagctggagtccgagttcgtgtacggcgactacaaggtgtacgacgtgcggaagatgatcgccaagtccgagcaggagatcggcaaggccaccgccaagtacttcttctactccaacatcatgaacttcttcaagaccgagatcaccctggccaacggcgagatccggaagcggcccctgatcgagaccaacggcgagaccggcgagatcgtgtgggacaagggccgggacttcgccaccgtgcggaaggtgctgtccatgccccaggtgaacatcgtgaagaagaccgaggtgcagaccggcggcttctccaaggagtccatcctgcccaagcggaactccgacaagctgatcgcccggaagaaggactgggaccccaagaagtacggcggcttcgactcccccaccgtggcctactccgtgctggtggtggccaaggtggagaagggcaagtccaagaagctgaagtccgtgaaggagctgctgggcatcaccatcatggagcggtcctccttcgagaagaaccccatcgacttcctggaggccaagggctacaaggaggtgaagaaggacctgatcatcaagctgcccaagtactccctgttcgagctggagaacggccggaagcggatgctggcctccgccggcgagctgcagaagggcaacgagctggccctgccctccaagtacgtgaacttcctgtacctggcctcccactacgagaagctgaagggctcccccgaggacaacgagcagaagcagctgttcgtggagcagcacaagcactacctggacgagatcatcgagcagatctccgagttctccaagcgggtgatcctggccgacgccaacctggacaaggtgctgtccgcctacaacaagcaccgggacaagcccatccgggagcaggccgagaacatcatccacctgttcaccctgaccaacctgggcgcccccgccgccttcaagtacttcgacaccaccatcgaccggaagcggtacacctccaccaaggaggtgctggacgccaccctgatccaccagtccatcaccggcctgtacgagacccggatcgacctgtcccagctgggcggcgactccggcggctcctccggcggctccaagcggaccgccgacggctccgagttcgagtcccccaagaagaagcggaaggtgtccggcggctcctccggcggctccatgaagcacatgccccggaagatgtactcctgcgacttcgagaccaccaccaaggtggaggactgccgggtgtgggcctacggctacatgaacatcgaggaccactccgagtacaagatcggcaactccctggacgagttcatggcctgggtgctgaaggtgcaggccgacctgtacttccacaacctgaagttcgacggcgccttcatcatcaactggctggagcggaacggcttcaagtggtccgccgacggcctgcccaacacctacaacaccatcatctcccggatgggccagtggtacatgatcgacatctgcctgggctacaagggcaagcggaagatccacaccgtgatctacgactccctgaagaagctgcccttccccgtgaagaagatcgccaaggacttcaagctgaccgtgctgaagggcgacatcgactaccacaaggagcggcccgtgggctacaagatcacccccgaggagtacgcctacatcaagaacgacatccagatcatcgccgaggccctgctgatccagttcaagcagggcctggaccggatgaccgccggctccgactccctgaagggcttcaaggacatcatcaccaccaagaagttcaagaaggtgttccccaccctgtccctgggcctggacaaggaggtgcggtacgcctaccggggcggcttcacctggctgaacgaccggttcaaggagaaggagatcggcgagggcatggtgttcgacgtgaactccctgtaccccgcccagatgtactcccggctgctgccctacggcgagcccatcgtgttcgagggcaagtacgtgtgggacgaggactaccccctgcacatccagcacatccggtgcgagttcgagctgaaggagggctacatccccaccatccagatcaagcggtcccggttctacaagggcaacgagtacctgaagtcctccggcggcgagatcgccgacctgtggctgtccaacgtggacctggagctgatgaaggagcactacgacctgtacaacgtggagtacatctccggcctgaagttcaaggccaccaccggcctgttcaaggacttcatcgacaagtggacctacatcaagaccacctccgagggcgccatcaagcagctggccaagctgatgctgaactccctgtacggcaagttcgcctccaaccccgacgtgaccggcaaggtgccctacctgaaggagaacggcgccctgggcttccggctgggcgaggaggagaccaaggaccccgtgtacacccccatgggcgtgttcatcaccgcctgggcccggtacaccaccatcaccgccgcccaggcctgctacgaccggatcatctactgcgacaccgactccatccacctgaccggcaccgagatccccgacgtgatcaaggacatcgtggaccccaagaagctgggctactgggcccacgagtccaccttcaagcgggccaagtacctgcggcagaagacctacatccaggacatctacatgaaggaggtggacggcaagctggtggagggctcccccgacgactacaccgacatcaagttctccgtgaagtgcgccggcatgaccgacaagatcaagaaggaggtgaccttcgagaacttcaaggtgggcttctcccggaagatgaagcccaagcccgtgcaggtgcccggcggcgtggtgctggtggacgacaccttcaccatcaagtag

SEQ ID NO: 1195 - protein, 1995 aa, synthetic construct
  REGION 1..1995: note = Synthetic
MKRTADGSEFESPKKKRKVDKKYSIGLDIGTNSVGWAVITDEYKVPSKKFKVLGNTDRHSIKKNLIGALLFDSGETAEATRLKRTARRRYTRRKNRICYLQEIFSNEMAKVDDSFFHRLEESFLVEEDKKHERHPIFGNIVDEVAYHEKYPTIYHLRKKLVDSTDKADLRLIYLALAHMIKFRGHFLIEGDLNPDNSDVDKLFIQLVQTYNQLFEENPINASGVDAKAILSARLSKSRRLENLIAQLPGEKKNGLFGNLIALSLGLTPNFKSNFDLAEDAKLQLSKDTYDDDLDNLLAQIGDQYADLFLAAKNLSDAILLSDILRVNTEITKAPLSASMIKRYDEHHQDLTLLKALVRQQLPEKYKEIFFDQSKNGYAGYIDGGASQEEFYKFIKPILEKMDGTEELLVKLNREDLLRKQRTFDNGSIPHQIHLGELHAILRRQEDFYPFLKDNREKIEKILTFRIPYYVGPLARGNSRFAWMTRKSEETITPWNFEEVVDKGASAQSFIERMTNFDKNLPNEKVLPKHSLLYEYFTVYNELTKVKYVTEGMRKPAFLSGEQKKAIVDLLFKTNRKVTVKQLKEDYFKKIECFDSVEISGVEDRFNASLGTYHDLLKIIKDKDFLDNEENEDILEDIVLTLTLFEDREMIEERLKTYAHLFDDKVMKQLKRRRYTGWGRLSRKLINGIRDKQSGKTILDFLKSDGFANRNFMQLIHDDSLTFKEDIQKAQVSGQGDSLHEHIANLAGSPAIKKGILQTVKVVDELVKVMGRHKPENIVIEMARENQTTQKGQKNSRERMKRIEEGIKELGSQILKEHPVENTQLQNEKLYLYYLQNGRDMYVDQELDINRLSDYDVDAIVPQSFLKDDSIDNKVLTRSDKNRGKSDNVPSEEVVKKMKNYWRQLLNAKLITQRKFDNLTKAERGGLSELDKAGFIKRQLVETRQITKHVAQILDSRMNTKYDENDKLIREVKVITLKSKLVSDFRKDFQFYKVREINNYHHAHDAYLNAVVGTALIKKYPKLESEFVYGDYKVYDVRKMIAKSEQEIGKATAKYFFYSNIMNFFKTEITLANGEIRKRPLIETNGETGEIVWDKGRDFATVRKVLSMPQVNIVKKTEVQTGGFSKESILPKRNSDKLIARKKDWDPKKYGGFDSPTVAYSVLVVAKVEKGKSKKLKSVKELLGITIMERSSFEKNPIDFLEAKGYKEVKKDLIIKLPKYSLFELENGRKRMLASAGELQKGNELALPSKYVNFLYLASHYEKLKGSPEDNEQKQLFVEQHKHYLDEIIEQISEFSKRVILADANLDKVLSAYNKHRDKPIREQAENIIHLFTLTNLGAPAAFKYFDTTIDRKRYTSTKEVLDATLIHQSITGLYETRIDLSQLGGDSGGSSGGSKRTADGSEFESPKKKRKVSGGSSGGSMKHMPRKMYSCDFETTTKVEDCRVWAYGYMNIEDHSEYKIGNSLDEFMAWVLKVQADLYFHNLKFDGAFIINWLERNGFKWSADGLPNTYNTIISRMGQWYMIDICLGYKGKRKIHTVIYDSLKKLPFPVKKIAKDFKLTVLKGDIDYHKERPVGYKITPEEYAYIKNDIQIIAEALLIQFKQGLDRMTAGSDSLKGFKDIITTKKFKKVFPTLSLGLDKEVRYAYRGGFTWLNDRFKEKEIGEGMVFDVNSLYPAQMYSRLLPYGEPIVFEGKYVWDEDYPLHIQHIRCEFELKEGYIPTIQIKRSRFYKGNEYLKSSGGEIADLWLSNVDLELMKEHYDLYNVEYISGLKFKATTGLFKDFIDKWTYIKTTSEGAIKQLAKLMLNSLYGKFASNPDVTGKVPYLKENGALGFRLGEEETKDPVYTPMGVFITAWARYTTITAAQACYDRIIYCDTDSIHLTGTEIPDVIKDIVDPKKLGYWAHESTFKRAKYLRQKTYIQDIYMKEVDGKLVEGSPDDYTDIKFSVKCAGMTDKIKKEVTFENFKVGFSRKMKPKPVQVPGGVVLVDDTFTIK

SEQ ID NO: 1196 - RNA, 6547 nt, synthetic construct
  misc_feature 1..6547: note = Synthetic
  source 1..6547: mol_type = other RNA
gggaagctcagaataaacgctcaactttggccggatctgccaccatgaagcggaccgccgacggctccgagttcgagtcccccaagaagaagcggaaggtggacaagaagtactccatcggcctggacatcggcaccaactccgtgggctgggccgtgatcaccgacgagtacaaggtgccctccaagaagttcaaggtgctgggcaacaccgaccggcactccatcaagaagaacctgatcggcgccctgctgttcgactccggcgagaccgccgaggccacccggctgaagcggaccgcccggcggcggtacacccggcggaagaaccggatctgctacctgcaggagatcttctccaacgagatggccaaggtggacgactccttcttccaccggctggaggagtccttcctggtggaggaggacaagaagcacgagcggcaccccatcttcggcaacatcgtggacgaggtggcctaccacgagaagtaccccaccatctaccacctgcggaagaagctggtggactccaccgacaaggccgacctgcggctgatctacctggccctggcccacatgatcaagttccggggccacttcctgatcgagggcgacctgaaccccgacaactccgacgtggacaagctgttcatccagctggtgcagacctacaaccagctgttcgaggagaaccccatcaacgcctccggcgtggacgccaaggccatcctgtccgcccggctgtccaagtcccggcggctggagaacctgatcgcccagctgcccggcgagaagaagaacggcctgttcggcaacctgatcgccctgtccctgggcctgacccccaacttcaagtccaacttcgacctggccgaggacgccaagctgcagctgtccaaggacacctacgacgacgacctggacaacctgctggcccagatcggcgaccagtacgccgacctgttcctggccgccaagaacctgtccgacgccatcctgctgtccgacatcctgcgggtgaacaccgagatcaccaaggcccccctgtccgcctccatgatcaagcggtacgacgagcaccaccaggacctgaccctgctgaaggccctggtgcggcagcagctgcccgagaagtacaaggagatcttcttcgaccagtccaagaacggctacgccggctacatcgacggcggcgcctcccaggaggagttctacaagttcatcaagcccatcctggagaagatggacggcaccgaggagctgctggtgaagctgaaccgggaggacctgctgcggaagcagcggaccttcgacaacggctccatcccccaccagatccacctgggcgagctgcacgccatcctgcggcggcaggaggacttctaccccttcctgaaggacaaccgggagaagatcgagaagatcctgaccttccggatcccctactacgtgggccccctggcccggggcaactcccggttcgcctggatgacccggaagtccgaggagaccatcaccccctggaacttcgaggaggtggtggacaagggcgcctccgcccagtccttcatcgagcggatgaccaacttcgacaagaacctgcccaacgagaaggtgctgcccaagcactccctgctgtacgagtacttcaccgtgtacaacgagctgaccaaggtgaagtacgtgaccgagggcatgcggaagcccgccttcctgtccggcgagcagaagaaggccatcgtggacctgctgttcaagaccaaccggaaggtgaccgtgaagcagctgaaggaggactacttcaagaagatcgagtgcttcgactccgtggagatctccggcgtggaggaccggttcaacgcctccctgggcacctaccacgacctgctgaagatcatcaaggacaaggacttcctggacaacgaggagaacgaggacatcctggaggacatcgtgctgaccctgaccctgttcgaggaccgggagatgatcgaggagcggctgaagacctacgcccacctgttcgacgacaaggtgatgaagcagctgaagcggcggcggtacaccggctggggccggctgtcccggaagctgatcaacggcatccgggacaagcagtccggcaagaccatcctggacttcctgaagtccgacggcttcgccaaccggaacttcatgcagctgatccacgacgactccctgaccttcaaggaggacatccagaaggcccaggtgtccggccagggcgactccctgcacgagcacatcgccaacctggccggctcccccgccatcaagaagggcatcctgcagaccgtgaaggtggtggacgagctggtgaaggtgatgggccggcacaagcccgagaacatcgtgatcgagatggcccgggagaaccagaccacccagaagggccagaagaactcccgggagcggatgaagcggatcgaggagggcatcaaggagctgggctcccagatcctgaaggagcaccccgtggagaacacccagctgcagaacgagaagctgtacctgtactacctgcagaacggccgggacatgtacgtggaccaggagctggacatcaaccggctgtccgactacgacgtggacgccatcgtgccccagtccttcctgaaggacgactccatcgacaacaaggtgctgacccggtccgacaagaaccggggcaagtccgacaacgtgccctccgaggaggtggtgaagaagatgaagaactactggcggcagctgctgaacgccaagctgatcacccagcggaagttcgacaacctgaccaaggccgagcggggcggcctgtccgagctggacaaggccggcttcatcaagcggcagctggtggagacccggcagatcaccaagcacgtggcccagatcctggactcccggatgaacaccaagtacgacgagaacgacaagctgatccgggaggtgaaggtgatcaccctgaagtccaagctggtgtccgacttccggaaggacttccagttctacaaggtgcgggagatcaacaactaccaccacgcccacgacgcctacctgaacgccgtggtgggcaccgccctgatcaagaagtaccccaagctggagtccgagttcgtgtacggcgactacaaggtgtacgacgtgcggaagatgatcgccaagtccgagcaggagatcggcaaggccaccgccaagtacttcttctactccaacatcatgaacttcttcaagaccgagatcaccctggccaacggcgagatccggaagcggcccctgatcgagaccaacggcgagaccggcgagatcgtgtgggacaagggccgggacttcgccaccgtgcggaaggtgctgtccatgccccaggtgaacatcgtgaagaagaccgaggtgcagaccggcggcttctccaaggagtccatcctgcccaagcggaactccgacaagctgatcgcccggaagaaggactgggaccccaagaagtacggcggcttcgactcccccaccgtggcctactccgtgctggtggtggccaaggtggagaagggcaagtccaagaagctgaagtccgtgaaggagctgctgggcatcaccatcatggagcggtcctccttcgagaagaaccccatcgacttcctggaggccaagggctacaaggaggtgaagaaggacctgatcatcaagctgcccaagtactccctgttcgagctggagaacggccggaagcggatgctggcctccgccggcgagctgcagaagggcaacgagctggccctgccctccaagtacgtgaacttcctgtacctggcctcccactacgagaagctgaagggctcccccgaggacaacgagcagaagcagctgttcgtggagcagcacaagcactacctggacgagatcatcgagcagatctccgagttctccaagcgggtgatcctggccgacgccaacctggacaaggtgctgtccgcctacaacaagcaccgggacaagcccatccgggagcaggccgagaacatcatccacctgttcaccctgaccaacctgggcgcccccgccgccttcaagtacttcgacaccaccatcgaccggaagcggtacacctccaccaaggaggtgctggacgccaccctgatccaccagtccatcaccggcctgtacgagacccggatcgacctgtcccagctgggcggcgactccggcggctcctccggcggctccaagcggaccgccgacggctccgagttcgagtcccccaagaagaagcggaaggtgtccggcggctcctccggcggctccatgaagcacatgccccggaagcggtactcctgcgacttcgagaccaccaccaaggtggaggactgccgggtgtgggcctacggctacatgaacatcgaggaccactccgagtacaagatcggcaactccctggacgagttcatggcctgggccctgaaggtgcaggccgacctgtacttccacaacctgaagttcgacggcgccttcatcatcaactggctggagcggaacggcttcaagtggtccgccgacggcctgcccaacacctacaacaccatcatctcccggaccggccagtggtacatgatcgacatctgcctgggctacaagggcaagcggaagatccacaccgtgatctacgactccctgaagaagctgcccttccccgtgaagaagatcgccaaggacttcaagctgaccgtgctgaagggcgacatcgactaccacaaggagcggcccgtgggctacaagatcacccccgaggagtacgcctacatcaagaacgacatccagatcatcgccgaggccctgctgatccagttcaagcagggcctggaccggatgaccgccggctccgactccctgaaggacttcaaggacatcatcaccaccaagaagttcaagaaggtgttccccaccctgtccctgggcctggacaagaaggtgcggtacgcctaccggggcggcttcacctggctgaacgaccggttcaaggagaaggagatcggcgagggcatggtgttcgacgtgaactccctgtaccccgcccagatgtactcccggctgctgccctacggcgagcccatcgtgttcgagggcaagtacgtgtgggacgaggactaccccctgcacatccagcacatccggtgcgagttcgagctgaaggagggctacatccccaccatccagatcaagcggtcccggttctacaagggcaacgagtacctgaagtcctccggcggcgagatcgccgacctgtggctgtccaacgtggacctggagctgatgaaggagcactacgacctgtacaacgtggagtacatctccggcctgaagttcaaggccaccaccggcctgttcaaggacttcatcgacaagtggacctacatcaagaccacctccgagggcgccatcaagcagctggccaagctgatgctgaactccctgtacggcaagttcgcctccaaccccgacgtgaccggcaaggtgccctacctgaaggagaacggcgccctgggcttccggctgggcgaggaggagaccaaggaccccgtgtacacccccatgggcgtgttcatcaccgcctgggcccggtacaccaccatcaccgccgcccaggcctgctacgaccggatcatctactgcgacaccgactccatccacctgaccggcaccgagatccccgacgtgatcaaggacatcgtggaccccaagaagctgggctactgggcccacgagtccaccttcaagcgggccaagtacctgcggcccaagacctacatccaggacatctacatgaaggaggtggacggcgagctggtggagggctcccccgacgactacaccgacatcaagctgtccgtgaagtgcgccggcatgaccgacaagatcaagaaggaggtgaccttcgagaacttcaaggtgggcttctcccggaagatgaagcccaagcccgtgcaggtgcccggcggcgtggtgctggtggacgacaccttcaccatcaagtagctagcaccagcctcaagaacacccgaatggagtctctaagctacataataccaacttacactttacaaaatgttgtcccccaaaatgtagccattcgtatctgctcctaataaaaagaaagtttcttcacattctctcgagaaaaaaaaaaaatggaaaaaaaaaaaacggaaaaaaaaaaaaggtaaaaaaaaaaaatataaaaaaaaaaaacataaaaaaaaaaaacgaaaaaaaaaaaacgtaaaaaaaaaaaactcaaaaaaaaaaaagataaaaaaaaaaaacctaaaaaaaaaaaatgtaaaaaaaaaaaagggaaaaaaaaaaaacgcaaaaaaaaaaaacacaaaaaaaaaaaatgcaaaaaaaaaaaatcgaaaaaaaaaaaatctaaaaaaaaaaaacgaaaaaaaaaaaacccaaaaaaaaaaaagacaaaaaaaaaaaatagaaaaaaaaaaagttaaaaaaaaaaaactgaaaaaaaaaaaatttaaaaaaaaaaaatctag

SEQ ID NO: 1197 - RNA, 5988 nt, synthetic construct
  misc_feature 1..5988: note = Synthetic
  source 1..5988: mol_type = other RNA
atgaagcggaccgccgacggctccgagttcgagtcccccaagaagaagcggaaggtggacaagaagtactccatcggcctggacatcggcaccaactccgtgggctgggccgtgatcaccgacgagtacaaggtgccctccaagaagttcaaggtgctgggcaacaccgaccggcactccatcaagaagaacctgatcggcgccctgctgttcgactccggcgagaccgccgaggccacccggctgaagcggaccgcccggcggcggtacacccggcggaagaaccggatctgctacctgcaggagatcttctccaacgagatggccaaggtggacgactccttcttccaccggctggaggagtccttcctggtggaggaggacaagaagcacgagcggcaccccatcttcggcaacatcgtggacgaggtggcctaccacgagaagtaccccaccatctaccacctgcggaagaagctggtggactccaccgacaaggccgacctgcggctgatctacctggccctggcccacatgatcaagttccggggccacttcctgatcgagggcgacctgaaccccgacaactccgacgtggacaagctgttcatccagctggtgcagacctacaaccagctgttcgaggagaaccccatcaacgcctccggcgtggacgccaaggccatcctgtccgcccggctgtccaagtcccggcggctggagaacctgatcgcccagctgcccggcgagaagaagaacggcctgttcggcaacctgatcgccctgtccctgggcctgacccccaacttcaagtccaacttcgacctggccgaggacgccaagctgcagctgtccaaggacacctacgacgacgacctggacaacctgctggcccagatcggcgaccagtacgccgacctgttcctggccgccaagaacctgtccgacgccatcctgctgtccgacatcctgcgggtgaacaccgagatcaccaaggcccccctgtccgcctccatgatcaagcggtacgacgagcaccaccaggacctgaccctgctgaaggccctggtgcggcagcagctgcccgagaagtacaaggagatcttcttcgaccagtccaagaacggctacgccggctacatcgacggcggcgcctcccaggaggagttctacaagttcatcaagcccatcctggagaagatggacggcaccgaggagctgctggtgaagctgaaccgggaggacctgctgcggaagcagcggaccttcgacaacggctccatcccccaccagatccacctgggcgagctgcacgccatcctgcggcggcaggaggacttctaccccttcctgaaggacaaccgggagaagatcgagaagatcctgaccttccggatcccctactacgtgggccccctggcccggggcaactcccggttcgcctggatgacccggaagtccgaggagaccatcaccccctggaacttcgaggaggtggtggacaagggcgcctccgcccagtccttcatcgagcggatgaccaacttcgacaagaacctgcccaacgagaaggtgctgcccaagcactccctgctgtacgagtacttcaccgtgtacaacgagctgaccaaggtgaagtacgtgaccgagggcatgcggaagcccgccttcctgtccggcgagcagaagaaggccatcgtggacctgctgttcaagaccaaccggaaggtgaccgtgaagcagctgaaggaggactacttcaagaagatcgagtgcttcgactccgtggagatctccggcgtggaggaccggttcaacgcctccctgggcacctaccacgacctgctgaagatcatcaaggacaaggacttcctggacaacgaggagaacgaggacatcctggaggacatcgtgctgaccctgaccctgttcgaggaccgggagatgatcgaggagcggctgaagacctacgcccacctgttcgacgacaaggtgatgaagcagctgaagcggcggcggtacaccggctggggccggctgtcccggaagctgatcaacggcatccgggacaagcagtccggcaagaccatcctggacttcctgaagtccgacggcttcgccaaccggaacttcatgcagctgatccacgacgactccctgaccttcaaggaggacatccagaaggcccaggtgtccggccagggcgactccctgcacgagcacatcgccaacctggccggctcccccgccatcaagaagggcatcctgcagaccgtgaaggtggtggacgagctggtgaaggtgatgggccggcacaagcccgagaacatcgtgatcgagatggcccgggagaaccagaccacccagaagggccagaagaactcccgggagcggatgaagcggatcgaggagggcatcaaggagctgggctcccagatcctgaaggagcaccccgtggagaacacccagctgcagaacgagaagctgtacctgtactacctgcagaacggccgggacatgtacgtggaccaggagctggacatcaaccggctgtccgactacgacgtggacgccatcgtgccccagtccttcctgaaggacgactccatcgacaacaaggtgctgacccggtccgacaagaaccggggcaagtccgacaacgtgccctccgaggaggtggtgaagaagatgaagaactactggcggcagctgctgaacgccaagctgatcacccagcggaagttcgacaacctgaccaaggccgagcggggcggcctgtccgagctggacaaggccggcttcatcaagcggcagctggtggagacccggcagatcaccaagcacgtggcccagatcctggactcccggatgaacaccaagtacgacgagaacgacaagctgatccgggaggtgaaggtgatcaccctgaagtccaagctggtgtccgacttccggaaggacttccagttctacaaggtgcgggagatcaacaactaccaccacgcccacgacgcctacctgaacgccgtggtgggcaccgccctgatcaagaagtaccccaagctggagtccgagttcgtgtacggcgactacaaggtgtacgacgtgcggaagatgatcgccaagtccgagcaggagatcggcaaggccaccgccaagtacttcttctactccaacatcatgaacttcttcaagaccgagatcaccctggccaacggcgagatccggaagcggcccctgatcgagaccaacggcgagaccggcgagatcgtgtgggacaagggccgggacttcgccaccgtgcggaaggtgctgtccatgccccaggtgaacatcgtgaagaagaccgaggtgcagaccggcggcttctccaaggagtccatcctgcccaagcggaactccgacaagctgatcgcccggaagaaggactgggaccccaagaagtacggcggcttcgactcccccaccgtggcctactccgtgctggtggtggccaaggtggagaagggcaagtccaagaagctgaagtccgtgaaggagctgctgggcatcaccatcatggagcggtcctccttcgagaagaaccccatcgacttcctggaggccaagggctacaaggaggtgaagaaggacctgatcatcaagctgcccaagtactccctgttcgagctggagaacggccggaagcggatgctggcctccgccggcgagctgcagaagggcaacgagctggccctgccctccaagtacgtgaacttcctgtacctggcctcccactacgagaagctgaagggctcccccgaggacaacgagcagaagcagctgttcgtggagcagcacaagcactacctggacgagatcatcgagcagatctccgagttctccaagcgggtgatcctggccgacgccaacctggacaaggtgctgtccgcctacaacaagcaccgggacaagcccatccgggagcaggccgagaacatcatccacctgttcaccctgaccaacctgggcgcccccgccgccttcaagtacttcgacaccaccatcgaccggaagcggtacacctccaccaaggaggtgctggacgccaccctgatccaccagtccatcaccggcctgtacgagacccggatcgacctgtcccagctgggcggcgactccggcggctcctccggcggctccaagcggaccgccgacggctccgagttcgagtcccccaagaagaagcggaaggtgtccggcggctcctccggcggctccatgaagcacatgccccggaagcggtactcctgcgacttcgagaccaccaccaaggtggaggactgccgggtgtgggcctacggctacatgaacatcgaggaccactccgagtacaagatcggcaactccctggacgagttcatggcctgggccctgaaggtgcaggccgacctgtacttccacaacctgaagttcgacggcgccttcatcatcaactggctggagcggaacggcttcaagtggtccgccgacggcctgcccaacacctacaacaccatcatctcccggaccggccagtggtacatgatcgacatctgcctgggctacaagggcaagcggaagatccacaccgtgatctacgactccctgaagaagctgcccttccccgtgaagaagatcgccaaggacttcaagctgaccgtgctgaagggcgacatcgactaccacaaggagcggcccgtgggctacaagatcacccccgaggagtacgcctacatcaagaacgacatccagatcatcgccgaggccctgctgatccagttcaagcagggcctggaccggatgaccgccggctccgactccctgaaggacttcaaggacatcatcaccaccaagaagttcaagaaggtgttccccaccctgtccctgggcctggacaagaaggtgcggtacgcctaccggggcggcttcacctggctgaacgaccggttcaaggagaaggagatcggcgagggcatggtgttcgacgtgaactccctgtaccccgcccagatgtactcccggctgctgccctacggcgagcccatcgtgttcgagggcaagtacgtgtgggacgaggactaccccctgcacatccagcacatccggtgcgagttcgagctgaaggagggctacatccccaccatccagatcaagcggtcccggttctacaagggcaacgagtacctgaagtcctccggcggcgagatcgccgacctgtggctgtccaacgtggacctggagctgatgaaggagcactacgacctgtacaacgtggagtacatctccggcctgaagttcaaggccaccaccggcctgttcaaggacttcatcgacaagtggacctacatcaagaccacctccgagggcgccatcaagcagctggccaagctgatgctgaactccctgtacggcaagttcgcctccaaccccgacgtgaccggcaaggtgccctacctgaaggagaacggcgccctgggcttccggctgggcgaggaggagaccaaggaccccgtgtacacccccatgggcgtgttcatcaccgcctgggcccggtacaccaccatcaccgccgcccaggcctgctacgaccggatcatctactgcgacaccgactccatccacctgaccggcaccgagatccccgacgtgatcaaggacatcgtggaccccaagaagctgggctactgggcccacgagtccaccttcaagcgggccaagtacctgcggcccaagacctacatccaggacatctacatgaaggaggtggacggcgagctggtggagggctcccccgacgactacaccgacatcaagctgtccgtgaagtgcgccggcatgaccgacaagatcaagaaggaggtgaccttcgagaacttcaaggtgggcttctcccggaagatgaagcccaagcccgtgcaggtgcccggcggcgtggtgctggtggacgacaccttcaccatcaagtag

SEQ ID NO: 1198 - protein, 1995 aa, synthetic construct
  REGION 1..1995: note = Synthetic
MKRTADGSEFESPKKKRKVDKKYSIGLDIGTNSVGWAVITDEYKVPSKKFKVLGNTDRHSIKKNLIGALLFDSGETAEATRLKRTARRRYTRRKNRICYLQEIFSNEMAKVDDSFFHRLEESFLVEEDKKHERHPIFGNIVDEVAYHEKYPTIYHLRKKLVDSTDKADLRLIYLALAHMIKFRGHFLIEGDLNPDNSDVDKLFIQLVQTYNQLFEENPINASGVDAKAILSARLSKSRRLENLIAQLPGEKKNGLFGNLIALSLGLTPNFKSNFDLAEDAKLQLSKDTYDDDLDNLLAQIGDQYADLFLAAKNLSDAILLSDILRVNTEITKAPLSASMIKRYDEHHQDLTLLKALVRQQLPEKYKEIFFDQSKNGYAGYIDGGASQEEFYKFIKPILEKMDGTEELLVKLNREDLLRKQRTFDNGSIPHQIHLGELHAILRRQEDFYPFLKDNREKIEKILTFRIPYYVGPLARGNSRFAWMTRKSEETITPWNFEEVVDKGASAQSFIERMTNFDKNLPNEKVLPKHSLLYEYFTVYNELTKVKYVTEGMRKPAFLSGEQKKAIVDLLFKTNRKVTVKQLKEDYFKKIECFDSVEISGVEDRFNASLGTYHDLLKIIKDKDFLDNEENEDILEDIVLTLTLFEDREMIEERLKTYAHLFDDKVMKQLKRRRYTGWGRLSRKLINGIRDKQSGKTILDFLKSDGFANRNFMQLIHDDSLTFKEDIQKAQVSGQGDSLHEHIANLAGSPAIKKGILQTVKVVDELVKVMGRHKPENIVIEMARENQTTQKGQKNSRERMKRIEEGIKELGSQILKEHPVENTQLQNEKLYLYYLQNGRDMYVDQELDINRLSDYDVDAIVPQSFLKDDSIDNKVLTRSDKNRGKSDNVPSEEVVKKMKNYWRQLLNAKLITQRKFDNLTKAERGGLSELDKAGFIKRQLVETRQITKHVAQILDSRMNTKYDENDKLIREVKVITLKSKLVSDFRKDFQFYKVREINNYHHAHDAYLNAVVGTALIKKYPKLESEFVYGDYKVYDVRKMIAKSEQEIGKATAKYFFYSNIMNFFKTEITLANGEIRKRPLIETNGETGEIVWDKGRDFATVRKVLSMPQVNIVKKTEVQTGGFSKESILPKRNSDKLIARKKDWDPKKYGGFDSPTVAYSVLVVAKVEKGKSKKLKSVKELLGITIMERSSFEKNPIDFLEAKGYKEVKKDLIIKLPKYSLFELENGRKRMLASAGELQKGNELALPSKYVNFLYLASHYEKLKGSPEDNEQKQLFVEQHKHYLDEIIEQISEFSKRVILADANLDKVLSAYNKHRDKPIREQAENIIHLFTLTNLGAPAAFKYFDTTIDRKRYTSTKEVLDATLIHQSITGLYETRIDLSQLGGDSGGSSGGSKRTADGSEFESPKKKRKVSGGSSGGSMKHMPRKRYSCDFETTTKVEDCRVWAYGYMNIEDHSEYKIGNSLDEFMAWALKVQADLYFHNLKFDGAFIINWLERNGFKWSADGLPNTYNTIISRTGQWYMIDICLGYKGKRKIHTVIYDSLKKLPFPVKKIAKDFKLTVLKGDIDYHKERPVGYKITPEEYAYIKNDIQIIAEALLIQFKQGLDRMTAGSDSLKDFKDIITTKKFKKVFPTLSLGLDKKVRYAYRGGFTWLNDRFKEKEIGEGMVFDVNSLYPAQMYSRLLPYGEPIVFEGKYVWDEDYPLHIQHIRCEFELKEGYIPTIQIKRSRFYKGNEYLKSSGGEIADLWLSNVDLELMKEHYDLYNVEYISGLKFKATTGLFKDFIDKWTYIKTTSEGAIKQLAKLMLNSLYGKFASNPDVTGKVPYLKENGALGFRLGEEETKDPVYTPMGVFITAWARYTTITAAQACYDRIIYCDTDSIHLTGTEIPDVIKDIVDPKKLGYWAHESTFKRAKYLRPKTYIQDIYMKEVDGELVEGSPDDYTDIKLSVKCAGMTDKIKKEVTFENFKVGFSRKMKPKPVQVPGGVVLVDDTFTIK

SEQ ID NO: 1199 - RNA, 5967 nt, synthetic construct
  misc_feature 1..5967: note = Synthetic
  source 1..5967: mol_type = other RNA
atgaagcggaccgccgacggctccgagttcgagtcccccaagaagaagcggaaggtggacaagaagtactccatcggcctggacatcggcaccaactccgtgggctgggccgtgatcaccgacgagtacaaggtgccctccaagaagttcaaggtgctgggcaacaccgaccggcactccatcaagaagaacctgatcggcgccctgctgttcgactccggcgagaccgccgaggccacccggctgaagcggaccgcccggcggcggtacacccggcggaagaaccggatctgctacctgcaggagatcttctccaacgagatggccaaggtggacgactccttcttccaccggctggaggagtccttcctggtggaggaggacaagaagcacgagcggcaccccatcttcggcaacatcgtggacgaggtggcctaccacgagaagtaccccaccatctaccacctgcggaagaagctggtggactccaccgacaaggccgacctgcggctgatctacctggccctggcccacatgatcaagttccggggccacttcctgatcgagggcgacctgaaccccgacaactccgacgtggacaagctgttcatccagctggtgcagacctacaaccagctgttcgaggagaaccccatcaacgcctccggcgtggacgccaaggccatcctgtccgcccggctgtccaagtcccggcggctggagaacctgatcgcccagctgcccggcgagaagaagaacggcctgttcggcaacctgatcgccctgtccctgggcctgacccccaacttcaagtccaacttcgacctggccgaggacgccaagctgcagctgtccaaggacacctacgacgacgacctggacaacctgctggcccagatcggcgaccagtacgccgacctgttcctggccgccaagaacctgtccgacgccatcctgctgtccgacatcctgcgggtgaacaccgagatcaccaaggcccccctgtccgcctccatgatcaagcggtacgacgagcaccaccaggacctgaccctgctgaaggccctggtgcggcagcagctgcccgagaagtacaaggagatcttcttcgaccagtccaagaacggctacgccggctacatcgacggcggcgcctcccaggaggagttctacaagttcatcaagcccatcctggagaagatggacggcaccgaggagctgctggtgaagctgaaccgggaggacctgctgcggaagcagcggaccttcgacaacggctccatcccccaccagatccacctgggcgagctgcacgccatcctgcggcggcaggaggacttctaccccttcctgaaggacaaccgggagaagatcgagaagatcctgaccttccggatcccctactacgtgggccccctggcccggggcaactcccggttcgcctggatgacccggaagtccgaggagaccatcaccccctggaacttcgaggaggtggtggacaagggcgcctccgcccagtccttcatcgagcggatgaccaacttcgacaagaacctgcccaacgagaaggtgctgcccaagcactccctgctgtacgagtacttcaccgtgtacaacgagctgaccaaggtgaagtacgtgaccgagggcatgcggaagcccgccttcctgtccggcgagcagaagaaggccatcgtggacctgctgttcaagaccaaccggaaggtgaccgtgaagcagctgaaggaggactacttcaagaagatcgagtgcttcgactccgtggagatctccggcgtggaggaccggttcaacgcctccctgggcacctaccacgacctgctgaagatcatcaaggacaaggacttcctggacaacgaggagaacgaggacatcctggaggacatcgtgctgaccctgaccctgttcgaggaccgggagatgatcgaggagcggctgaagacctacgcccacctgttcgacgacaaggtgatgaagcagctgaagcggcggcggtacaccggctggggccggctgtcccggaagctgatcaacggcatccgggacaagcagtccggcaagaccatcctggacttcctgaagtccgacggcttcgccaaccggaacttcatgcagctgatccacgacgactccctgaccttcaaggaggacatccagaaggcccaggtgtccggccagggcgactccctgcacgagcacatcgccaacctggccggctcccccgccatcaagaagggcatcctgcagaccgtgaaggtggtggacgagctggtgaaggtgatgggccggcacaagcccgagaacatcgtgatcgagatggcccgggagaaccagaccacccagaagggccagaagaactcccgggagcggatgaagcggatcgaggagggcatcaaggagctgggctcccagatcctgaaggagcaccccgtggagaacacccagctgcagaacgagaagctgtacctgtactacctgcagaacggccgggacatgtacgtggaccaggagctggacatcaaccggctgtccgactacgacgtggacgccatcgtgccccagtccttcctgaaggacgactccatcgacaacaaggtgctgacccggtccgacaagaaccggggcaagtccgacaacgtgccctccgaggaggtggtgaagaagatgaagaactactggcggcagctgctgaacgccaagctgatcacccagcggaagttcgacaacctgaccaaggccgagcggggcggcctgtccgagctggacaaggccggcttcatcaagcggcagctggtggagacccggcagatcaccaagcacgtggcccagatcctggactcccggatgaacaccaagtacgacgagaacgacaagctgatccgggaggtgaaggtgatcaccctgaagtccaagctggtgtccgacttccggaaggacttccagttctacaaggtgcgggagatcaacaactaccaccacgcccacgacgcctacctgaacgccgtggtgggcaccgccctgatcaagaagtaccccaagctggagtccgagttcgtgtacggcgactacaaggtgtacgacgtgcggaagatgatcgccaagtccgagcaggagatcggcaaggccaccgccaagtacttcttctactccaacatcatgaacttcttcaagaccgagatcaccctggccaacggcgagatccggaagcggcccctgatcgagaccaacggcgagaccggcgagatcgtgtgggacaagggccgggacttcgccaccgtgcggaaggtgctgtccatgccccaggtgaacatcgtgaagaagaccgaggtgcagaccggcggcttctccaaggagtccatcctgcccaagcggaactccgacaagctgatcgcccggaagaaggactgggaccccaagaagtacggcggcttcgactcccccaccgtggcctactccgtgctggtggtggccaaggtggagaagggcaagtccaagaagctgaagtccgtgaaggagctgctgggcatcaccatcatggagcggtcctccttcgagaagaaccccatcgacttcctggaggccaagggctacaaggaggtgaagaaggacctgatcatcaagctgcccaagtactccctgttcgagctggagaacggccggaagcggatgctggcctccgccggcgagctgcagaagggcaacgagctggccctgccctccaagtacgtgaacttcctgtacctggcctcccactacgagaagctgaagggctcccccgaggacaacgagcagaagcagctgttcgtggagcagcacaagcactacctggacgagatcatcgagcagatctccgagttctccaagcgggtgatcctggccgacgccaacctggacaaggtgctgtccgcctacaacaagcaccgggacaagcccatccgggagcaggccgagaacatcatccacctgttcaccctgaccaacctgggcgcccccgccgccttcaagtacttcgacaccaccatcgaccggaagcggtacacctccaccaaggaggtgctggacgccaccctgatccaccagtccatcaccggcctgtacgagacccggatcgacctgtcccagctgggcggcgactccggcggctcctccggcggctccaagcggaccgccgacggctccgagttcgagtcccccaagaagaagcggaaggtgtccggcggctcctccggcggctccatggactccaccaaggagaagtgcgactcctacaaggacgacctgctgctgcggatgggcctgaacgacaacaaggccggcatggagggcctggacaaggagaagatcaacaagatcatcatggaggccaccaagggctcccggttctacggcaacgagctgaagaaggagaagcaggtgaaccagcggatcgagaacatgatgcagcagaaggcccagatcacctcccagcagctgcggaaggcccagctgcaggtggaccggttcgccatggagctggagcagtcccggaacctgtccaacaccatcgtgcacatcgacatggacgccttctacgccgccgtggagatgcgggacaaccccgagctgaaggacaagcccatcgccgtgggctccatgtccatgctgtccacctccaactaccacgcccggcggttcggcgtgcgggccgccatgcccggcttcatcgccaagcggctgtgcccccagctgatcatcgtgccccccaacttcgacaagtaccgggccgtgtccaaggaggtgaaggagatcctggccgactacgaccccaacttcatggccatgtccctggacgaggcctacctgaacatcaccaagcacctggaggagcggcagaactggcccgaggacaagcggcggtacttcatcaagatgggctcctccgtggagaacgacaaccccggcaaggaggtgaacaagctgtccgagcacgagcggtccatctcccccctgctgttcgaggagtccccctccgacgtgcagccccccggcgaccccttccaggtgaacttcgaggagcagaacaacccccagatcctgcagaactccgtggtgttcggcacctccgcccaggaggtggtgaaggagatccggttccggatcgagcagaagaccaccctgaccgcctccgccggcatcgcccccaacaccatgctggccaaggtgtgctccgacaagaacaagcccaacggccagtaccagatcctgcccaaccggcaggccgtgatggacttcatcaaggacctgcccatccggaaggtgtccggcatcggcaaggtgaccgagaagatgctgaaggccctgggcatcatcacctgcaccgagctgtaccagcagcgggccctgctgtccctgctgttctccgagacctcctggcactacttcctgcacatctccctgggcctgggctccacccacctgacccgggacggcgagcggaagtccatgtccgtggagcggaccttctccgagatcaacaaggccgaggagcagtactccctgtgccaggagctgtgctccgagctggcccaggacctgcagaaggagcggctgaagggccggaccgtgaccatcaagctgaagaacgtgaacttcgaggtgaagacccgggcctccaccgtgtcctccgtggtgtccaccgccgaggagatcttcgccatcgccaaggagctgctgaagaccgagatcgacgccgacttcccccaccccctgcggctgcggctgatgggcgtgcggatctcctccttccccaacgaggaggaccggaagcaccagcagggcggcggctccggcaagcggaccgccgacggctccggcggcggctcccccaagaagaagcggaaggtgtccgagtccgccacccccgagtccgtgtccggctggcggctgttcaagaagatctcctag

SEQ ID NO: 1200 - protein, 1988 aa, synthetic construct
  REGION 1..1988: note = Synthetic
MKRTADGSEFESPKKKRKVDKKYSIGLDIGTNSVGWAVITDEYKVPSKKFKVLGNTDRHSIKKNLIGALLFDSGETAEATRLKRTARRRYTRRKNRICYLQEIFSNEMAKVDDSFFHRLEESFLVEEDKKHERHPIFGNIVDEVAYHEKYPTIYHLRKKLVDSTDKADLRLIYLALAHMIKFRGHFLIEGDLNPDNSDVDKLFIQLVQTYNQLFEENPINASGVDAKAILSARLSKSRRLENLIAQLPGEKKNGLFGNLIALSLGLTPNFKSNFDLAEDAKLQLSKDTYDDDLDNLLAQIGDQYADLFLAAKNLSDAILLSDILRVNTEITKAPLSASMIKRYDEHHQDLTLLKALVRQQLPEKYKEIFFDQSKNGYAGYIDGGASQEEFYKFIKPILEKMDGTEELLVKLNREDLLRKQRTFDNGSIPHQIHLGELHAILRRQEDFYPFLKDNREKIEKILTFRIPYYVGPLARGNSRFAWMTRKSEETITPWNFEEVVDKGASAQSFIERMTNFDKNLPNEKVLPKHSLLYEYFTVYNELTKVKYVTEGMRKPAFLSGEQKKAIVDLLFKTNRKVTVKQLKEDYFKKIECFDSVEISGVEDRFNASLGTYHDLLKIIKDKDFLDNEENEDILEDIVLTLTLFEDREMIEERLKTYAHLFDDKVMKQLKRRRYTGWGRLSRKLINGIRDKQSGKTILDFLKSDGFANRNFMQLIHDDSLTFKEDIQKAQVSGQGDSLHEHIANLAGSPAIKKGILQTVKVVDELVKVMGRHKPENIVIEMARENQTTQKGQKNSRERMKRIEEGIKELGSQILKEHPVENTQLQNEKLYLYYLQNGRDMYVDQELDINRLSDYDVDAIVPQSFLKDDSIDNKVLTRSDKNRGKSDNVPSEEVVKKMKNYWRQLLNAKLITQRKFDNLTKAERGGLSELDKAGFIKRQLVETRQITKHVAQILDSRMNTKYDENDKLIREVKVITLKSKLVSDFRKDFQFYKVREINNYHHAHDAYLNAVVGTALIKKYPKLESEFVYGDYKVYDVRKMIAKSEQEIGKATAKYFFYSNIMNFFKTEITLANGEIRKRPLIETNGETGEIVWDKGRDFATVRKVLSMPQVNIVKKTEVQTGGFSKESILPKRNSDKLIARKKDWDPKKYGGFDSPTVAYSVLVVAKVEKGKSKKLKSVKELLGITIMERSSFEKNPIDFLEAKGYKEVKKDLIIKLPKYSLFELENGRKRMLASAGELQKGNELALPSKYVNFLYLASHYEKLKGSPEDNEQKQLFVEQHKHYLDEIIEQISEFSKRVILADANLDKVLSAYNKHRDKPIREQAENIIHLFTLTNLGAPAAFKYFDTTIDRKRYTSTKEVLDATLIHQSITGLYETRIDLSQLGGDSGGSSGGSKRTADGSEFESPKKKRKVSGGSSGGSMDSTKEKCDSYKDDLLLRMGLNDNKAGMEGLDKEKINKIIMEATKGSRFYGNELKKEKQVNQRIENMMQQKAQITSQQLRKAQLQVDRFAMELEQSRNLSNTIVHIDMDAFYAAVEMRDNPELKDKPIAVGSMSMLSTSNYHARRFGVRAAMPGFIAKRLCPQLIIVPPNFDKYRAVSKEVKEILADYDPNFMAMSLDEAYLNITKHLEERQNWPEDKRRYFIKMGSSVENDNPGKEVNKLSEHERSISPLLFEESPSDVQPPGDPFQVNFEEQNNPQILQNSVVFGTSAQEVVKEIRFRIEQKTTLTASAGIAPNTMLAKVCSDKNKPNGQYQILPNRQAVMDFIKDLPIRKVSGIGKVTEKMLKALGIITCTELYQQRALLSLLFSETSWHYFLHISLGLGSTHLTRDGERKSMSVERTFSEINKAEEQYSLCQELCSELAQDLQKERLKGRTVTIKLKNVNFEVKTRASTVSSVVSTAEEIFAIAKELLKTEIDADFPHPLRLRLMGVRISSFPNEEDRKHQQGGGSGKRTADGSGGGSPKKKRKVSESATPESVSGWRLFKKIS

SEQ ID NO: 1201 - RNA, 5967 nt, synthetic construct
  misc_feature 1..5967: note = Synthetic
  source 1..5967: mol_type = other RNA
atgaagcggaccgccgacggctccgagttcgagtcccccaagaagaagcggaaggtggacaagaagtactccatcggcctggacatcggcaccaactccgtgggctgggccgtgatcaccgacgagtacaaggtgccctccaagaagttcaaggtgctgggcaacaccgaccggcactccatcaagaagaacctgatcggcgccctgctgttcgactccggcgagaccgccgaggccacccggctgaagcggaccgcccggcggcggtacacccggcggaagaaccggatctgctacctgcaggagatcttctccaacgagatggccaaggtggacgactccttcttccaccggctggaggagtccttcctggtggaggaggacaagaagcacgagcggcaccccatcttcggcaacatcgtggacgaggtggcctaccacgagaagtaccccaccatctaccacctgcggaagaagctggtggactccaccgacaaggccgacctgcggctgatctacctggccctggcccacatgatcaagttccggggccacttcctgatcgagggcgacctgaaccccgacaactccgacgtggacaagctgttcatccagctggtgcagacctacaaccagctgttcgaggagaaccccatcaacgcctccggcgtggacgccaaggccatcctgtccgcccggctgtccaagtcccggcggctggagaacctgatcgcccagctgcccggcgagaagaagaacggcctgttcggcaacctgatcgccctgtccctgggcctgacccccaacttcaagtccaacttcgacctggccgaggacgccaagctgcagctgtccaaggacacctacgacgacgacctggacaacctgctggcccagatcggcgaccagtacgccgacctgttcctggccgccaagaacctgtccgacgccatcctgctgtccgacatcctgcgggtgaacaccgagatcaccaaggcccccctgtccgcctccatgatcaagcggtacgacgagcaccaccaggacctgaccctgctgaaggccctggtgcggcagcagctgcccgagaagtacaaggagatcttcttcgaccagtccaagaacggctacgccggctacatcgacggcggcgcctcccaggaggagttctacaagttcatcaagcccatcctggagaagatggacggcaccgaggagctgctggtgaagctgaaccgggaggacctgctgcggaagcagcggaccttcgacaacggctccatcccccaccagatccacctgggcgagctgcacgccatcctgcggcggcaggaggacttctaccccttcctgaaggacaaccgggagaagatcgagaagatcctgaccttccggatcccctactacgtgggccccctggcccggggcaactcccggttcgcctggatgacccggaagtccgaggagaccatcaccccctggaacttcgaggaggtggtggacaagggcgcctccgcccagtccttcatcgagcggatgaccaacttcgacaagaacctgcccaacgagaaggtgctgcccaagcactccctgctgtacgagtacttcaccgtgtacaacgagctgaccaaggtgaagtacgtgaccgagggcatgcggaagcccgccttcctgtccggcgagcagaagaaggccatcgtggacctgctgttcaagaccaaccggaaggtgaccgtgaagcagctgaaggaggactacttcaagaagatcgagtgcttcgactccgtggagatctccggcgtggaggaccggttcaacgcctccctgggcacctaccacgacctgctgaagatcatcaaggacaaggacttcctggacaacgaggagaacgaggacatcctggaggacatcgtgctgaccctgaccctgttcgaggaccgggagatgatcgaggagcggctgaagacctacgcccacctgttcgacgacaaggtgatgaagcagctgaagcggcggcggtacaccggctggggccggctgtcccggaagctgatcaacggcatccgggacaagcagtccggcaagaccatcctggacttcctgaagtccgacggcttcgccaaccggaacttcatgcagctgatccacgacgactccctgaccttcaaggaggacatccagaaggcccaggtgtccggccagggcgactccctgcacgagcacatcgccaacctggccggctcccccgccatcaagaagggcatcctgcagaccgtgaaggtggtggacgagctggtgaaggtgatgggccggcacaagcccgagaacatcgtgatcgagatggcccgggagaaccagaccacccagaagggccagaagaactcccgggagcggatgaagcggatcgaggagggcatcaaggagctgggctcccagatcctgaaggagcaccccgtggagaacacccagctgcagaacgagaagctgtacctgtactacctgcagaacggccgggacatgtacgtggaccaggagctggacatcaaccggctgtccgactacgacgtggacgccatcgtgccccagtccttcctgaaggacgactccatcgacaacaaggtgctgacccggtccgacaagaaccggggcaagtccgacaacgtgccctccgaggaggtggtgaagaagatgaagaactactggcggcagctgctgaacgccaagctgatcacccagcggaagttcgacaacctgaccaaggccgagcggggcggcctgtccgagctggacaaggccggcttcatcaagcggcagctggtggagacccggcagatcaccaagcacgtggcccagatcctggactcccggatgaacaccaagtacgacgagaacgacaagctgatccgggaggtgaaggtgatcaccctgaagtccaagctggtgtccgacttccggaaggacttccagttctacaaggtgcgggagatcaacaactaccaccacgcccacgacgcctacctgaacgccgtggtgggcaccgccctgatcaagaagtaccccaagctggagtccgagttcgtgtacggcgactacaaggtgtacgacgtgcggaagatgatcgccaagtccgagcaggagatcggcaaggccaccgccaagtacttcttctactccaacatcatgaacttcttcaagaccgagatcaccctggccaacggcgagatccggaagcggcccctgatcgagaccaacggcgagaccggcgagatcgtgtgggacaagggccgggacttcgccaccgtgcggaaggtgctgtccatgccccaggtgaacatcgtgaagaagaccgaggtgcagaccggcggcttctccaaggagtccatcctgcccaagcggaactccgacaagctgatcgcccggaagaaggactgggaccccaagaagtacggcggcttcgactcccccaccgtggcctactccgtgctggtggtggccaaggtggagaagggcaagtccaagaagctgaagtccgtgaaggagctgctgggcatcaccatcatggagcggtcctccttcgagaagaaccccatcgacttcctggaggccaagggctacaaggaggtgaagaaggacctgatcatcaagctgcccaagtactccctgttcgagctggagaacggccggaagcggatgctggcctccgccggcgagctgcagaagggcaacgagctggccctgccctccaagtacgtgaacttcctgtacctggcctcccactacgagaagctgaagggctcccccgaggacaacgagcagaagcagctgttcgtggagcagcacaagcactacctggacgagatcatcgagcagatctccgagttctccaagcgggtgatcctggccgacgccaacctggacaaggtgctgtccgcctacaacaagcaccgggacaagcccatccgggagcaggccgagaacatcatccacctgttcaccctgaccaacctgggcgcccccgccgccttcaagtacttcgacaccaccatcgaccggaagcggtacacctccaccaaggaggtgctggacgccaccctgatccaccagtccatcaccggcctgtacgagacccggatcgacctgtcccagctgggcggcgactccggcggctcctccggcggctccaagcggaccgccgacggctccgagttcgagtcccccaagaagaagcggaaggtgtccggcggctcctccggcggctccatggactccaccaaggagaagtgcgactcctacaaggacgacctgctgctgcggatgggcctgaacgacaacaaggccggcatggagggcctggacaaggagaagatcaacaagatcatcatggaggccaccaagggctcccggttctacggcaacgagctgaagaaggagaagcaggtgaaccagcggatcgagaacatgatgcagcagaaggcccagatcacctcccagcagctgcggaaggcccagctgcaggtggaccggttcgccatggagctggagcagtcccggaacctgtccaacaccatcgtgcacatcgacatggacgccttctacgccgccgtggagatgcgggacaaccccgagctgaaggacaagcccatcgccgtgggctccatgtccatgctgtccacctccaactaccacgcccggcggttcggcgtgcgggccgccatgcccggcttcatcgccaagcggctgtgcccccagctgatcatcgtgccccccaacttcgacaagtaccgggccgtgtccaaggaggtgaaggagatcctggccgactacgaccccaacttcatggccatgtccctggacgaggcctacctgaacatcaccaagcacctggaggagcggcagaactggcccgaggacaagcggcggtacttcatcaagatgggctcctccgtggagaacgacaaccccggcaaggaggtgaacaagctgtccgagcacgagcggtccatctcccccctgctgttcgaggagtccccctccgacgtgcagccccccggcgaccccttccaggtgaacttcgaggagcagaacaacccccagatcctgcagaactccgtggtgttcggcacctccgcccaggaggtggtgaaggagatccggttccggatcgagcagaagaccaccctgaccgcctccgccggcatcgcccccaacaccatgctggccaaggtgtgctccgacaagaacaagcccaacggccagtaccagatcctgcccaaccggcaggccgtgatggacttcatcaaggacctgcccatccggaaggtgtccggcatcggcaaggtgaccgagaagatgctgaaggccctgggcatcatcacctgcaccgagctgtaccagcagcgggccctgctgtccctgctgttctccgagacctcctggcactacttcctgcacatctccctgggcctgggctccacccacctgacccgggaccgggtgcggaagtccatgtccgtggagcggaccttctccgagatcaacaaggccgaggagcagtactccctgtgccaggagctgtgctccgagctggcccaggacctgcagaaggagcggctgaagggccggaccgtgaccatcaagctgaagaacgtgaacttcgaggtgaagacccgggcctccaccgtgtcctccgtggtgtccaccgccgaggagatcttcgccatcgccaaggagctgctgaagaccgagatcgacgccgacttcccccaccccctgcggctgcggctgatgggcgtgcggatctcctccttccccaacgaggaggaccggaagcaccagcagggcggcggctccggcaagcggaccgccgacggctccggcggcggctcccccaagaagaagcggaaggtgtccgagtccgccacccccgagtccgtgtccggctggcggctgttcaagaagatctcctag

SEQ ID NO: 1202 - protein, 1988 aa, synthetic construct
  REGION 1..1988: note = Synthetic
MKRTADGSEFESPKKKRKVDKKYSIGLDIGTNSVGWAVITDEYKVPSKKFKVLGNTDRHSIKKNLIGALLFDSGETAEATRLKRTARRRYTRRKNRICYLQEIFSNEMAKVDDSFFHRLEESFLVEEDKKHERHPIFGNIVDEVAYHEKYPTIYHLRKKLVDSTDKADLRLIYLALAHMIKFRGHFLIEGDLNPDNSDVDKLFIQLVQTYNQLFEENPINASGVDAKAILSARLSKSRRLENLIAQLPGEKKNGLFGNLIALSLGLTPNFKSNFDLAEDAKLQLSKDTYDDDLDNLLAQIGDQYADLFLAAKNLSDAILLSDILRVNTEITKAPLSASMIKRYDEHHQDLTLLKALVRQQLPEKYKEIFFDQSKNGYAGYIDGGASQEEFYKFIKPILEKMDGTEELLVKLNREDLLRKQRTFDNGSIPHQIHLGELHAILRRQEDFYPFLKDNREKIEKILTFRIPYYVGPLARGNSRFAWMTRKSEETITPWNFEEVVDKGASAQSFIERMTNFDKNLPNEKVLPKHSLLYEYFTVYNELTKVKYVTEGMRKPAFLSGEQKKAIVDLLFKTNRKVTVKQLKEDYFKKIECFDSVEISGVEDRFNASLGTYHDLLKIIKDKDFLDNEENEDILEDIVLTLTLFEDREMIEERLKTYAHLFDDKVMKQLKRRRYTGWGRLSRKLINGIRDKQSGKTILDFLKSDGFANRNFMQLIHDDSLTFKEDIQKAQVSGQGDSLHEHIANLAGSPAIKKGILQTVKVVDELVKVMGRHKPENIVIEMARENQTTQKGQKNSRERMKRIEEGIKELGSQILKEHPVENTQLQNEKLYLYYLQNGRDMYVDQELDINRLSDYDVDAIVPQSFLKDDSIDNKVLTRSDKNRGKSDNVPSEEVVKKMKNYWRQLLNAKLITQRKFDNLTKAERGGLSELDKAGFIKRQLVETRQITKHVAQILDSRMNTKYDENDKLIREVKVITLKSKLVSDFRKDFQFYKVREINNYHHAHDAYLNAVVGTALIKKYPKLESEFVYGDYKVYDVRKMIAKSEQEIGKATAKYFFYSNIMNFFKTEITLANGEIRKRPLIETNGETGEIVWDKGRDFATVRKVLSMPQVNIVKKTEVQTGGFSKESILPKRNSDKLIARKKDWDPKKYGGFDSPTVAYSVLVVAKVEKGKSKKLKSVKELLGITIMERSSFEKNPIDFLEAKGYKEVKKDLIIKLPKYSLFELENGRKRMLASAGELQKGNELALPSKYVNFLYLASHYEKLKGSPEDNEQKQLFVEQHKHYLDEIIEQISEFSKRVILADANLDKVLSAYNKHRDKPIREQAENIIHLFTLTNLGAPAAFKYFDTTIDRKRYTSTKEVLDATLIHQSITGLYETRIDLSQLGGDSGGSSGGSKRTADGSEFESPKKKRKVSGGSSGGSMDSTKEKCDSYKDDLLLRMGLNDNKAGMEGLDKEKINKIIMEATKGSRFYGNELKKEKQVNQRIENMMQQKAQITSQQLRKAQLQVDRFAMELEQSRNLSNTIVHIDMDAFYAAVEMRDNPELKDKPIAVGSMSMLSTSNYHARRFGVRAAMPGFIAKRLCPQLIIVPPNFDKYRAVSKEVKEILADYDPNFMAMSLDEAYLNITKHLEERQNWPEDKRRYFIKMGSSVENDNPGKEVNKLSEHERSISPLLFEESPSDVQPPGDPFQVNFEEQNNPQILQNSVVFGTSAQEVVKEIRFRIEQKTTLTASAGIAPNTMLAKVCSDKNKPNGQYQILPNRQAVMDFIKDLPIRKVSGIGKVTEKMLKALGIITCTELYQQRALLSLLFSETSWHYFLHISLGLGSTHLTRDRVRKSMSVERTFSEINKAEEQYSLCQELCSELAQDLQKERLKGRTVTIKLKNVNFEVKTRASTVSSVVSTAEEIFAIAKELLKTEIDADFPHPLRLRLMGVRISSFPNEEDRKHQQGGGSGKRTADGSGGGSPKKKRKVSESATPESVSGWRLFKKIS

SEQ ID NO: 1203 - RNA, 1578 nt, synthetic construct
  misc_feature 1..1578: note = Synthetic
  source 1..1578: mol_type = other RNA
atggactccaccaaggagaagtgcgactcctacaaggacgacctgctgctgcggatgggcctgaacgacaacaaggccggcatggagggcctggacaaggagaagatcaacaagatcatcatggaggccaccaagggctcccggttctacggcaacgagctgaagaaggagaagcaggtgaaccagcggatcgagaacatgatgcagcagaaggcccagatcacctcccagcagctgcggaaggcccagctgcaggtggaccggttcgccatggagctggagcagtcccggaacctgtccaacaccatcgtgcacatcgacatggacgccttctacgccgccgtggagatgcgggacaaccccgagctgaaggacaagcccatcgccgtgggctccatgtccatgctgtccacctccaactaccacgcccggcggttcggcgtgcgggccgccatgcccggcttcatcgccaagcggctgtgcccccagctgatcatcgtgccccccaacttcgacaagtaccgggccgtgtccaaggaggtgaaggagatcctggccgactacgaccccaacttcatggccatgtccctggacgaggcctacctgaacatcaccaagcacctggaggagcggcagaactggcccgaggacaagcggcggtacttcatcaagatgggctcctccgtggagaacgacaaccccggcaaggaggtgaacaagctgtccgagcacgagcggtccatctcccccctgctgttcgaggagtccccctccgacgtgcagccccccggcgaccccttccaggtgaacttcgaggagcagaacaacccccagatcctgcagaactccgtggtgttcggcacctccgcccaggaggtggtgaaggagatccggttccggatcgagcagaagaccaccctgaccgcctccgccggcatcgcccccaacaccatgctggccaaggtgtgctccgacaagaacaagcccaacggccagtaccagatcctgcccaaccggcaggccgtgatggacttcatcaaggacctgcccatccggaaggtgtccggcatcggcaaggtgaccgagaagatgctgaaggccctgggcatcatcacctgcaccgagctgtaccagcagcgggccctgctgtccctgctgttctccgagacctcctggcactacttcctgcacatctccctgggcctgggctccacccacctgacccgggacggcgagcggaagtccatgtccgtggagcggaccttctccgagatcaacaaggccgaggagcagtactccctgtgccaggagctgtgctccgagctggcccaggacctgcagaaggagcggctgaagggccggaccgtgaccatcaagctgaagaacgtgaacttcgaggtgaagacccgggcctccaccgtgtcctccgtggtgtccaccgccgaggagatcttcgccatcgccaaggagctgctgaagaccgagatcgacgccgacttcccccaccccctgcggctgcggctgatgggcgtgcggatctcctccttccccaacgaggaggaccggaagcaccagcag

SEQ ID NO: 1204 - protein, 526 aa, synthetic construct
  REGION 1..526: note = Synthetic
MDSTKEKCDSYKDDLLLRMGLNDNKAGMEGLDKEKINKIIMEATKGSRFYGNELKKEKQVNQRIENMMQQKAQITSQQLRKAQLQVDRFAMELEQSRNLSNTIVHIDMDAFYAAVEMRDNPELKDKPIAVGSMSMLSTSNYHARRFGVRAAMPGFIAKRLCPQLIIVPPNFDKYRAVSKEVKEILADYDPNFMAMSLDEAYLNITKHLEERQNWPEDKRRYFIKMGSSVENDNPGKEVNKLSEHERSISPLLFEESPSDVQPPGDPFQVNFEEQNNPQILQNSVVFGTSAQEVVKEIRFRIEQKTTLTASAGIAPNTMLAKVCSDKNKPNGQYQILPNRQAVMDFIKDLPIRKVSGIGKVTEKMLKALGIITCTELYQQRALLSLLFSETSWHYFLHISLGLGSTHLTRDGERKSMSVERTFSEINKAEEQYSLCQELCSELAQDLQKERLKGRTVTIKLKNVNFEVKTRASTVSSVVSTAEEIFAIAKELLKTEIDADFPHPLRLRLMGVRISSFPNEEDRKHQQ

SEQ ID NO: 1205 - RNA, 1524 nt, synthetic construct
  misc_feature 1..1524: note = Synthetic
  source 1..1524: mol_type = other RNA
atgggcctgaacgacaacaaggccggcatggagggcctggacaaggagaagatcaacaagatcatcatggaggccaccaagggctcccggttctacggcaacgagctgaagaaggagaagcaggtgaaccagcggatcgagaacatgatgcagcagaaggcccagatcacctcccagcagctgcggaaggcccagctgcaggtggaccggttcgccatggagctggagcagtcccggaacctgtccaacaccatcgtgcacatcgacatggacgccttctacgccgccgtggagatgcgggacaaccccgagctgaaggacaagcccatcgccgtgggctccatgtccatgctgtccacctccaactaccacgcccggcggttcggcgtgcgggccgccatgcccggcttcatcgccaagcggctgtgcccccagctgatcatcgtgccccccaacttcgacaagtaccgggccgtgtccaaggaggtgaaggagatcctggccgactacgaccccaacttcatggccatgtccctggacgaggcctacctgaacatcaccaagcacctggaggagcggcagaactggcccgaggacaagcggcggtacttcatcaagatgggctcctccgtggagaacgacaaccccggcaaggaggtgaacaagctgtccgagcacgagcggtccatctcccccctgctgttcgaggagtccccctccgacgtgcagccccccggcgaccccttccaggtgaacttcgaggagcagaacaacccccagatcctgcagaactccgtggtgttcggcacctccgcccaggaggtggtgaaggagatccggttccggatcgagcagaagaccaccctgaccgcctccgccggcatcgcccccaacaccatgctggccaaggtgtgctccgacaagaacaagcccaacggccagtaccagatcctgcccaaccggcaggccgtgatggacttcatcaaggacctgcccatccggaaggtgtccggcatcggcaaggtgaccgagaagatgctgaaggccctgggcatcatcacctgcaccgagctgtaccagcagcgggccctgctgtccctgctgttctccgagacctcctggcactacttcctgcacatctccctgggcctgggctccacccacctgacccgggacggcgagcggaagtccatgtccgtggagcggaccttctccgagatcaacaaggccgaggagcagtactccctgtgccaggagctgtgctccgagctggcccaggacctgcagaaggagcggctgaagggccggaccgtgaccatcaagctgaagaacgtgaacttcgaggtgaagacccgggcctccaccgtgtcctccgtggtgtccaccgccgaggagatcttcgccatcgccaaggagctgctgaagaccgagatcgacgccgacttcccccaccccctgcggctgcggctgatgggcgtgcggatctcctccttccccaacgaggaggaccggaagcaccagcag

SEQ ID NO: 1206 - protein, 508 aa, synthetic construct
  REGION 1..508: note = Synthetic
MGLNDNKAGMEGLDKEKINKIIMEATKGSRFYGNELKKEKQVNQRIENMMQQKAQITSQQLRKAQLQVDRFAMELEQSRNLSNTIVHIDMDAFYAAVEMRDNPELKDKPIAVGSMSMLSTSNYHARRFGVRAAMPGFIAKRLCPQLIIVPPNFDKYRAVSKEVKEILADYDPNFMAMSLDEAYLNITKHLEERQNWPEDKRRYFIKMGSSVENDNPGKEVNKLSEHERSISPLLFEESPSDVQPPGDPFQVNFEEQNNPQILQNSVVFGTSAQEVVKEIRFRIEQKTTLTASAGIAPNTMLAKVCSDKNKPNGQYQILPNRQAVMDFIKDLPIRKVSGIGKVTEKMLKALGIITCTELYQQRALLSLLFSETSWHYFLHISLGLGSTHLTRDGERKSMSVERTFSEINKAEEQYSLCQELCSELAQDLQKERLKGRTVTIKLKNVNFEVKTRASTVSSVVSTAEEIFAIAKELLKTEIDADFPHPLRLRLMGVRISSFPNEEDRKHQQ

SEQ ID NO: 1207 - RNA, 2475 nt, synthetic construct
  misc_feature 1..2475: note = Synthetic
  source 1..2475: mol_type = other RNA
atgtgcaacgagaagctgtccggccggctgctgaagaagcacatcaccatcggcacccccgagaaccccttcgaccccaacgactacgacttcgtgatcctggtgggcgccgagcccttcctgtacttcgccggcaagaagggcatcggcgactacaccggcaagcgggtggagtacaacggctacgccaactggatcgcctccatctcccccgcccagctgcacttcaagcccgagatgaagcccgtgttcgacgccaccgtggagaacatccacgacatcatcaacggccgggagaagatcgccaaggccggcgactaccggcccatcaccgaccccgacgaggccgaggagtacatcaagatggtgtacaacatggtgatcggccccgtggccttcgcctccgccacctccgccctgtactgccgggacggctacctgctgggcgtgtccatctcccaccaggagtaccagggcgtgtacatcgactccgactgcctgaccgaggtggccgtgtactacctgcagaagatcctggactccgagaaccacaccatcgtgttccacaacctgaagttcgacatgcacttctacaagtaccacctgggcctgaccttcgacaaggcccacaaggagcggcggctgcacgacaccatgctgcagcactacgtgctggacgagcggcggggcacccacggcctgaagtccctggccatgaagtacaccgacatgggcgactacgacttcgagctggacaagttcaaggacgactactgcaaggcccacaagatcaagaaggaggacttcacctacgacctgatccccttcgacatcatgtggccctacgccgccaaggacaccgacgccaccatccggctgcacaacttcttcctgcccaagatcgagaagaacgagaagctgtgctccctgtactacgacgtgctgatgcccggctgcgtgttcctgcagcgggtggaggaccggggcgtgcccatctccatcgaccggctgaaggaggcccagtaccagctgacccacaacctgaacaaggcccgggagaagctgtacacctaccccgaggtgaagcagctggagcaggaccagaacgaggccttcaaccccaactccgtgaagcagctgcgggtgctgctgttcgactacgtgggcctgacccccaccggcaagctgaccgacaccggcgccgactccaccgacgccgaggccctgaacgagctggccacccagcaccccatcgccaagaccctgctggagatccggaagctgaccaagctgatctccacctacgtggagaagatcctgctgtccatcgacgccgacggctgcatccggaccggcttccacgagcacatgaccacctccggccggctgtcctcctccggcaagctgaacctgcagcagctgccccgggacgagtccatcatcaagggctgcgtggtggccccccccggctaccgggtgatcgcctgggacctgaccaccgccgaggtgtactacgccgccgtgctgtccggcgaccggaacatgcagcaggtgttcatcaacatgcggaacgagcccgacaagtaccccgacttccactccaacatcgcccacatggtgttcaagctgcagtgcgagccccgggacgtgaagaagctgttccccgccctgcggcaggccgccaaggccatcaccttcggcatcctgtacggctccggccccgccaaggtggcccactccgtgaacgaggccctgctggagcaggccgccaagaccggcgagcccttcgtggagtgcaccgtggccgacgccaaggagtacatcgagacctacttcggccagttcccccagctgaagcggtggatcgacaagtgccacgaccagatcaagaaccacggcttcatctactcccacttcggccggaagcggcggctgcacaacatccactccgaggaccggggcgtgcagggcgaggagatccggtccggcttcaacgccatcatccagtccgcctcctccgactccctgctgctgggcgccgtggacgccgacaacgagatcatctccctgggcctggagcaggagatgaagatcgtgatgctggtgcacgactccgtggtggccatcgtgcgggaggacctgatcgaccagtacaacgagatcctgatccggaacatccagaaggaccggggcatctccatccccggctgccccatcggcatcgactccgactccgaggccggcggctcccgggactactcctgcggcaagatgaagaagcagcacccctccatcgcctgcatcgacgacgacgagtacacccggtacgtgaagggcgtgctgctggacgccgagttcgagtacaagaagctggccgccatggacaaggagcaccccgaccactccaagtacaaggacgacaagttcatcgccgtgtgcaaggacctggacaacgtgaagcggatcctgggcgcc

SEQ ID NO: 1208 - protein, 825 aa, synthetic construct
  REGION 1..825: note = Synthetic
MCNEKLSGRLLKKHITIGTPENPFDPNDYDFVILVGAEPFLYFAGKKGIGDYTGKRVEYNGYANWIASISPAQLHFKPEMKPVFDATVENIHDIINGREKIAKAGDYRPITDPDEAEEYIKMVYNMVIGPVAFASATSALYCRDGYLLGVSISHQEYQGVYIDSDCLTEVAVYYLQKILDSENHTIVFHNLKFDMHFYKYHLGLTFDKAHKERRLHDTMLQHYVLDERRGTHGLKSLAMKYTDMGDYDFELDKFKDDYCKAHKIKKEDFTYDLIPFDIMWPYAAKDTDATIRLHNFFLPKIEKNEKLCSLYYDVLMPGCVFLQRVEDRGVPISIDRLKEAQYQLTHNLNKAREKLYTYPEVKQLEQDQNEAFNPNSVKQLRVLLFDYVGLTPTGKLTDTGADSTDAEALNELATQHPIAKTLLEIRKLTKLISTYVEKILLSIDADGCIRTGFHEHMTTSGRLSSSGKLNLQQLPRDESIIKGCVVAPPGYRVIAWDLTTAEVYYAAVLSGDRNMQQVFINMRNEPDKYPDFHSNIAHMVFKLQCEPRDVKKLFPALRQAAKAITFGILYGSGPAKVAHSVNEALLEQAAKTGEPFVECTVADAKEYIETYFGQFPQLKRWIDKCHDQIKNHGFIYSHFGRKRRLHNIHSEDRGVQGEEIRSGFNAIIQSASSDSLLLGAVDADNEIISLGLEQEMKIVMLVHDSVVAIVREDLIDQYNEILIRNIQKDRGISIPGCPIGIDSDSEAGGSRDYSCGKMKKQHPSIACIDDDEYTRYVKGVLLDAEFEYKKLAAMDKEHPDHSKYKDDKFIAVCKDLDNVKRILGA

SEQ ID NO: 1209 - RNA, 2493 nt, synthetic construct
  misc_feature 1..2493: note = Synthetic
  source 1..2493: mol_type = other RNA
atgaagatcgccgtggtggacaaggccctgaacaacacccggtacgacaagcacttccagctgtacggcgaggaggtggacgtgttccacatgtgcaacgagaagctgtccggccggctgctgaagaagcacatcaccatcggcacccccgagaaccccttcgaccccaacgactacgacttcgtgatcctggtgggcgccgagcccttcctgtacttcgccggcaagaagggcatcggcgactacaccggcaagcgggtggagtacaacggctacgccaactggatcgcctccatctcccccgcccagctgcacttcaagcccgagatgaagcccgtgttcgacgccaccgtggagaacatccacgacatcatcaacggccgggagaagatcgccaaggccggcgactaccggcccatcaccgaccccgacgaggccgaggagtacatcaagatggtgtacaacatggtgatcggccccgtggccttcgcctccgccacctccgccctgtactgccgggacggctacctgctgggcgtgtccatctcccaccaggagtaccagggcgtgtacatcgactccgactgcctgaccgaggtggccgtgtactacctgcagaagatcctggactccgagaaccacaccatcgtgttccacaacctgaagttcgacatgcacttctacaagtaccacctgggcctgaccttcgacaaggcccacaaggagcggcggctgcacgacaccatgctgcagcactacgtgctggacgagcggcggggcacccacggcctgaagtccctggccatgaagtacaccgacatgggcgactacgacttcgagctggacaagttcaaggacgactactgcaaggcccacaagatcaagaaggaggacttcacctacgacctgatccccttcgacatcatgtggccctacgccgccaaggacaccgacgccaccatccggctgcacaacttcttcctgcccaagatcgagaagaacgagaagctgtgctccctgtactacgacgtgctgatgcccggctgcgtgttcctgcagcgggtggaggaccggggcgtgcccatctccatcgaccggctgaaggaggcccagtaccagctgacccacaacctgaacaaggcccgggagaagctgtacacctaccccgaggtgaagcagctggagcaggaccagaacgaggccttcaaccccaactccgtgaagcagctgcgggtgctgctgttcgactacgtgggcctgacccccaccggcaagctgaccgacaccggcgccgactccaccgacgccgaggccctgaacgagctggccacccagcaccccatcgccaagaccctgctggagatccggaagctgaccaagctgatctccacctacgtggagaagatcctgctgtccatcgacgccgacggctgcatccggaccggcttccacgagcacatgaccacctccggccggctgtcctcctccggcaagctgaacctgcagcagctgccccgggacgagtccatcatcaagggctgcgtggtggccccccccggctaccgggtgatcgcctgggacctgaccaccgccgaggtgtactacgccgccgtgctgtccggcgaccggaacatgcagcaggtgttcatcaacatgcggaacgagcccgacaagtaccccgacttccactccaacatcgcccacatggtgttcaagctgcagtgcgagccccgggacgtgaagaagctgttccccgccctgcggcaggccgccaaggccatcaccttcggcatcctgtacggctccggccccgccaaggtggcccactccgtgaacgaggccctgctggagcaggccgccaagaccggcgagcccttcgtggagtgcaccgtggccgacgccaaggagtacatcgagacctacttcggccagttcccccagctgaagcggtggatcgacaagtgccacgaccagatcaagaaccacggcttcatctactcccacttcggccggaagcggcggctgcacaacatccactccgaggaccggggcgtgcagggcgaggagatccggtccggcttcaacgccatcatccagtccgcctcctccgactccctgctgctgggcgccgtggacgccgacaacgagatcatctccctgggcctggagcaggagatgaagatcgtgatgctggtgcacgactccgtggtggccatcgtgcgggaggacctgatcgaccagtacaacgagatcctgatccggaacatccagaaggaccggggcatctccatccccggctgccccatcggcatcgactccgactccgaggccggcggctcccgggactactcctgcggcaagatgaagaagcagcacccctccatcgcctgcatcgacgacgacgagtacacccggtacgtgaagggcgtgctgctggacgccgagttcgagtacaagaagctggccgccatggacaaggagcaccccgaccac

SEQ ID NO: 1210 - protein, 831 aa, synthetic construct
  REGION 1..831: note = Synthetic
MKIAVVDKALNNTRYDKHFQLYGEEVDVFHMCNEKLSGRLLKKHITIGTPENPFDPNDYDFVILVGAEPFLYFAGKKGIGDYTGKRVEYNGYANWIASISPAQLHFKPEMKPVFDATVENIHDIINGREKIAKAGDYRPITDPDEAEEYIKMVYNMVIGPVAFASATSALYCRDGYLLGVSISHQEYQGVYIDSDCLTEVAVYYLQKILDSENHTIVFHNLKFDMHFYKYHLGLTFDKAHKERRLHDTMLQHYVLDERRGTHGLKSLAMKYTDMGDYDFELDKFKDDYCKAHKIKKEDFTYDLIPFDIMWPYAAKDTDATIRLHNFFLPKIEKNEKLCSLYYDVLMPGCVFLQRVEDRGVPISIDRLKEAQYQLTHNLNKAREKLYTYPEVKQLEQDQNEAFNPNSVKQLRVLLFDYVGLTPTGKLTDTGADSTDAEALNELATQHPIAKTLLEIRKLTKLISTYVEKILLSIDADGCIRTGFHEHMTTSGRLSSSGKLNLQQLPRDESIIKGCVVAPPGYRVIAWDLTTAEVYYAAVLSGDRNMQQVFINMRNEPDKYPDFHSNIAHMVFKLQCEPRDVKKLFPALRQAAKAITFGILYGSGPAKVAHSVNEALLEQAAKTGEPFVECTVADAKEYIETYFGQFPQLKRWIDKCHDQIKNHGFIYSHFGRKRRLHNIHSEDRGVQGEEIRSGFNAIIQSASSDSLLLGAVDADNEIISLGLEQEMKIVMLVHDSVVAIVREDLIDQYNEILIRNIQKDRGISIPGCPIGIDSDSEAGGSRDYSCGKMKKQHPSIACIDDDEYTRYVKGVLLDAEFEYKKLAAMDKEHPDH

SEQ ID NO: 1211 - RNA, 2376 nt, synthetic construct
  misc_feature 1..2376: note = Synthetic
  source 1..2376: mol_type = other RNA
atgaagatcgccgtggtggacaaggccctgaacaacacccggtacgacaagcacttccagctgtacggcgaggaggtggacgtgttccacatgtgcaacgagaagctgtccggccggctgctgaagaagcacatcaccatcggcacccccgagaaccccttcgaccccaacgactacgacttcgtgatcctggtgggcgccgagcccttcctgtacttcgccggcaagaagggcatcggcgactacaccggcaagcgggtggagtacaacggctacgccaactggatcgcctccatctcccccgcccagctgcacttcaagcccgagatgaagcccgtgttcgacgccaccgtggagaacatccacgacatcatcaacggccgggagaagatcgccaaggccggcgactaccggcccatcaccgaccccgacgaggccgaggagtacatcaagatggtgtacaacatggtgatcggccccgtggccttcgcctccgccacctccgccctgtactgccgggacggctacctgctgggcgtgtccatctcccaccaggagtaccagggcgtgtacatcgactccgactgcctgaccgaggtggccgtgtactacctgcagaagatcctggactccgagaaccacaccatcgtgttccacaacctgaagttcgacatgcacttctacaagtaccacctgggcctgaccttcgacaaggcccacaaggagcggcggctgcacgacaccatgctgcagcactacgtgctggacgagcggcggggcacccacggcctgaagtccctggccatgaagtacaccgacatgggcgactacgacttcgagctggacaagttcaaggacgactactgcaaggcccacaagatcaagaaggaggacttcacctacgacctgatccccttcgacatcatgtggccctacgccgccaaggacaccgacgccaccatccggctgcacaacttcttcctgcccaagatcgagaagaacgagaagctgtgctccctgtactacgacgtgctgatgcccggctgcgtgttcctgcagcgggtggaggaccggggcgtgcccatctccatcgaccggctgaaggaggcccagtaccagctgacccacaacctgaacaaggcccgggagaagctgtacacctaccccgaggtgaagcagctggagcaggaccagaacgaggccttcaaccccaactccgtgaagcagctgcgggtgctgctgttcgactacgtgggcctgacccccaccggcaagctgaccgacaccggcgccgactccaccgacgccgaggccctgaacgagctggccacccagcaccccatcgccaagaccctgctggagatccggaagctgaccaagctgatctccacctacgtggagaagatcctgctgtccatcgacgccgacggctgcatccggaccggcttccacgagcacatgaccacctccggccggctgtcctcctccggcaagctgaacctgcagcagctgccccgggacgagtccatcatcaagggctgcgtggtggccccccccggctaccgggtgatcgcctgggacctgaccaccgccgaggtgtactacgccgccgtgctgtccggcgaccggaacatgcagcaggtgttcatcaacatgcggaacgagcccgacaagtaccccgacttccactccaacatcgcccacatggtgttcaagctgcagtgcgagccccgggacgtgaagaagctgttccccgccctgcggcaggccgccaaggccatcaccttcggcatcctgtacggctccggccccgccaaggtggcccactccgtgaacgaggccctgctggagcaggccgccaagaccggcgagcccttcgtggagtgcaccgtggccgacgccaaggagtacatcgagacctacttcggccagttcccccagctgaagcggtggatcgacaagtgccacgaccagatcaagaaccacggcttcatctactcccacttcggccggaagcggcggctgcacaacatccactccgaggaccggggcgtgcagggcgaggagatccggtccggcttcaacgccatcatccagtccgcctcctccgactccctgctgctgggcgccgtggacgccgacaacgagatcatctccctgggcctggagcaggagatgaagatcgtgatgctggtgcacgactccgtggtggccatcgtgcgggaggacctgatcgaccagtacaacgagatcctgatccggaacatccagaaggaccggggcatctccatccccggctgccccatcggcatcgactccgactccgaggccggcggctcccgggactactcctgcggcaagatgaagaagcagcac

SEQ ID NO: 1212 - protein, 792 aa, synthetic construct
  REGION 1..792: note = Synthetic
MKIAVVDKALNNTRYDKHFQLYGEEVDVFHMCNEKLSGRLLKKHITIGTPENPFDPNDYDFVILVGAEPFLYFAGKKGIGDYTGKRVEYNGYANWIASISPAQLHFKPEMKPVFDATVENIHDIINGREKIAKAGDYRPITDPDEAEEYIKMVYNMVIGPVAFASATSALYCRDGYLLGVSISHQEYQGVYIDSDCLTEVAVYYLQKILDSENHTIVFHNLKFDMHFYKYHLGLTFDKAHKERRLHDTMLQHYVLDERRGTHGLKSLAMKYTDMGDYDFELDKFKDDYCKAHKIKKEDFTYDLIPFDIMWPYAAKDTDATIRLHNFFLPKIEKNEKLCSLYYDVLMPGCVFLQRVEDRGVPISIDRLKEAQYQLTHNLNKAREKLYTYPEVKQLEQDQNEAFNPNSVKQLRVLLFDYVGLTPTGKLTDTGADSTDAEALNELATQHPIAKTLLEIRKLTKLISTYVEKILLSIDADGCIRTGFHEHMTTSGRLSSSGKLNLQQLPRDESIIKGCVVAPPGYRVIAWDLTTAEVYYAAVLSGDRNMQQVFINMRNEPDKYPDFHSNIAHMVFKLQCEPRDVKKLFPALRQAAKAITFGILYGSGPAKVAHSVNEALLEQAAKTGEPFVECTVADAKEYIETYFGQFPQLKRWIDKCHDQIKNHGFIYSHFGRKRRLHNIHSEDRGVQGEEIRSGFNAIIQSASSDSLLLGAVDADNEIISLGLEQEMKIVMLVHDSVVAIVREDLIDQYNEILIRNIQKDRGISIPGCPIGIDSDSEAGGSRDYSCGKMKKQH

SEQ ID NO: 1213 - DNA, 2286 bp, synthetic construct
  misc_feature 1..2286: note = Synthetic
  source 1..2286: mol_type = other DNA
atgtgcaacgagaagctgtccggccggctgctgaagaagcacatcaccatcggcacccccgagaaccccttcgaccccaacgactacgacttcgtgatcctggtgggcgccgagcccttcctgtacttcgccggcaagaagggcatcggcgactacaccggcaagcgggtggagtacaacggctacgccaactggatcgcctccatctcccccgcccagctgcacttcaagcccgagatgaagcccgtgttcgacgccaccgtggagaacatccacgacatcatcaacggccgggagaagatcgccaaggccggcgactaccggcccatcaccgaccccgacgaggccgaggagtacatcaagatggtgtacaacatggtgatcggccccgtggccttcgcctccgccacctccgccctgtactgccgggacggctacctgctgggcgtgtccatctcccaccaggagtaccagggcgtgtacatcgactccgactgcctgaccgaggtggccgtgtactacctgcagaagatcctggactccgagaaccacaccatcgtgttccacaacctgaagttcgacatgcacttctacaagtaccacctgggcctgaccttcgacaaggcccacaaggagcggcggctgcacgacaccatgctgcagcactacgtgctggacgagcggcggggcacccacggcctgaagtccctggccatgaagtacaccgacatgggcgactacgacttcgagctggacaagttcaaggacgactactgcaaggcccacaagatcaagaaggaggacttcacctacgacctgatccccttcgacatcatgtggccctacgccgccaaggacaccgacgccaccatccggctgcacaacttcttcctgcccaagatcgagaagaacgagaagctgtgctccctgtactacgacgtgctgatgcccggctgcgtgttcctgcagcgggtggaggaccggggcgtgcccatctccatcgaccggctgaaggaggcccagtaccagctgacccacaacctgaacaaggcccgggagaagctgtacacctaccccgaggtgaagcagctggagcaggaccagaacgaggccttcaaccccaactccgtgaagcagctgcgggtgctgctgttcgactacgtgggcctgacccccaccggcaagctgaccgacaccggcgccgactccaccgacgccgaggccctgaacgagctggccacccagcaccccatcgccaagaccctgctggagatccggaagctgaccaagctgatctccacctacgtggagaagatcctgctgtccatcgacgccgacggctgcatccggaccggcttccacgagcacatgaccacctccggccggctgtcctcctccggcaagctgaacctgcagcagctgccccgggacgagtccatcatcaagggctgcgtggtggccccccccggctaccgggtgatcgcctgggacctgaccaccgccgaggtgtactacgccgccgtgctgtccggcgaccggaacatgcagcaggtgttcatcaacatgcggaacgagcccgacaagtaccccgacttccactccaacatcgcccacatggtgttcaagctgcagtgcgagccccgggacgtgaagaagctgttccccgccctgcggcaggccgccaaggccatcaccttcggcatcctgtacggctccggccccgccaaggtggcccactccgtgaacgaggccctgctggagcaggccgccaagaccggcgagcccttcgtggagtgcaccgtggccgacgccaaggagtacatcgagacctacttcggccagttcccccagctgaagcggtggatcgacaagtgccacgaccagatcaagaaccacggcttcatctactcccacttcggccggaagcggcggctgcacaacatccactccgaggaccggggcgtgcagggcgaggagatccggtccggcttcaacgccatcatccagtccgcctcctccgactccctgctgctgggcgccgtggacgccgacaacgagatcatctccctgggcctggagcaggagatgaagatcgtgatgctggtgcacgactccgtggtggccatcgtgcgggaggacctgatcgaccagtacaacgagatcctgatccggaacatccagaaggaccggggcatctccatccccggctgccccatcggcatcgactccgactccgaggccggcggctcccgggactactcctgcggcaagatgaagaagcagcac

SEQ ID NO: 1214 - protein, 762 aa, synthetic construct
  REGION 1..762: note = Synthetic
MCNEKLSGRLLKKHITIGTPENPFDPNDYDFVILVGAEPFLYFAGKKGIGDYTGKRVEYNGYANWIASISPAQLHFKPEMKPVFDATVENIHDIINGREKIAKAGDYRPITDPDEAEEYIKMVYNMVIGPVAFASATSALYCRDGYLLGVSISHQEYQGVYIDSDCLTEVAVYYLQKILDSENHTIVFHNLKFDMHFYKYHLGLTFDKAHKERRLHDTMLQHYVLDERRGTHGLKSLAMKYTDMGDYDFELDKFKDDYCKAHKIKKEDFTYDLIPFDIMWPYAAKDTDATIRLHNFFLPKIEKNEKLCSLYYDVLMPGCVFLQRVEDRGVPISIDRLKEAQYQLTHNLNKAREKLYTYPEVKQLEQDQNEAFNPNSVKQLRVLLFDYVGLTPTGKLTDTGADSTDAEALNELATQHPIAKTLLEIRKLTKLISTYVEKILLSIDADGCIRTGFHEHMTTSGRLSSSGKLNLQQLPRDESIIKGCVVAPPGYRVIAWDLTTAEVYYAAVLSGDRNMQQVFINMRNEPDKYPDFHSNIAHMVFKLQCEPRDVKKLFPALRQAAKAITFGILYGSGPAKVAHSVNEALLEQAAKTGEPFVECTVADAKEYIETYFGQFPQLKRWIDKCHDQIKNHGFIYSHFGRKRRLHNIHSEDRGVQGEEIRSGFNAIIQSASSDSLLLGAVDADNEIISLGLEQEMKIVMLVHDSVVAIVREDLIDQYNEILIRNIQKDRGISIPGCPIGIDSDSEAGGSRDYSCGKMKKQH

SEQ ID NO: 1215 - RNA, 7020 nt, synthetic construct
  misc_feature 1..7020: note = Synthetic
  source 1..7020: mol_type = other RNA
atgaagcggcccgccgccaccaagaaggccggccaggccaagaagaagaaggacaagaagtactccatcggcctggacatcggcaccaactccgtgggctgggccgtgatcaccgacgagtacaaggtgccctccaagaagttcaaggtgctgggcaacaccgaccggcactccatcaagaagaacctgatcggcgccctgctgttcgactccggcgagaccgccgaggccacccggctgaagcggaccgcccggcggcggtacacccggcggaagaaccggatctgctacctgcaggagatcttctccaacgagatggccaaggtggacgactccttcttccaccggctggaggagtccttcctggtggaggaggacaagaagcacgagcggcaccccatcttcggcaacatcgtggacgaggtggcctaccacgagaagtaccccaccatctaccacctgcggaagaagctggtggactccaccgacaaggccgacctgcggctgatctacctggccctggcccacatgatcaagttccggggccacttcctgatcgagggcgacctgaaccccgacaactccgacgtggacaagctgttcatccagctggtgcagacctacaaccagctgttcgaggagaaccccatcaacgcctccggcgtggacgccaaggccatcctgtccgcccggctgtccaagtcccggcggctggagaacctgatcgcccagctgcccggcgagaagaagaacggcctgttcggcaacctgatcgccctgtccctgggcctgacccccaacttcaagtccaacttcgacctggccgaggacgccaagctgcagctgtccaaggacacctacgacgacgacctggacaacctgctggcccagatcggcgaccagtacgccgacctgttcctggccgccaagaacctgtccgacgccatcctgctgtccgacatcctgcgggtgaacaccgagatcaccaaggcccccctgtccgcctccatgatcaagcggtacgacgagcaccaccaggacctgaccctgctgaaggccctggtgcggcagcagctgcccgagaagtacaaggagatcttcttcgaccagtccaagaacggctacgccggctacatcgacggcggcgcctcccaggaggagttctacaagttcatcaagcccatcctggagaagatggacggcaccgaggagctgctggtgaagctgaaccgggaggacctgctgcggaagcagcggaccttcgacaacggctccatcccccaccagatccacctgggcgagctgcacgccatcctgcggcggcaggaggacttctaccccttcctgaaggacaaccgggagaagatcgagaagatcctgaccttccggatcccctactacgtgggccccctggcccggggcaactcccggttcgcctggatgacccggaagtccgaggagaccatcaccccctggaacttcgaggaggtggtggacaagggcgcctccgcccagtccttcatcgagcggatgaccaacttcgacaagaacctgcccaacgagaaggtgctgcccaagcactccctgctgtacgagtacttcaccgtgtacaacgagctgaccaaggtgaagtacgtgaccgagggcatgcggaagcccgccttcctgtccggcgagcagaagaaggccatcgtggacctgctgttcaagaccaaccggaaggtgaccgtgaagcagctgaaggaggactacttcaagaagatcgagtgcttcgactccgtggagatctccggcgtggaggaccggttcaacgcctccctgggcacctaccacgacctgctgaagatcatcaaggacaaggacttcctggacaacgaggagaacgaggacatcctggaggacatcgtgctgaccctgaccctgttcgaggaccgggagatgatcgaggagcggctgaagacctacgcccacctgttcgacgacaaggtgatgaagcagctgaagcggcggcggtacaccggctggggccggctgtcccggaagctgatcaacggcatccgggacaagcagtccggcaagaccatcctggacttcctgaagtccgacggcttcgccaaccggaacttcatgcagctgatccacgacgactccctgaccttcaaggaggacatccagaaggcccaggtgtccggccagggcgactccctgcacgagcacatcgccaacctggccggctcccccgccatcaagaagggcatcctgcagaccgtgaaggtggtggacgagctggtgaaggtgatgggccggcacaagcccgagaacatcgtgatcgagatggcccgggagaaccagaccacccagaagggccagaagaactcccgggagcggatgaagcggatcgaggagggcatcaaggagctgggctcccagatcctgaaggagcaccccgtggagaacacccagctgcagaacgagaagctgtacctgtactacctgcagaacggccgggacatgtacgtggaccaggagctggacatcaaccggctgtccgactacgacgtggacgccatcgtgccccagtccttcctgaaggacgactccatcgacaacaaggtgctgacccggtccgacaagaaccggggcaagtccgacaacgtgccctccgaggaggtggtgaagaagatgaagaactactggcggcagctgctgaacgccaagctgatcacccagcggaagttcgacaacctgaccaaggccgagcggggcggcctgtccgagctggacaaggccggcttcatcaagcggcagctggtggagacccggcagatcaccaagcacgtggcccagatcctggactcccggatgaacaccaagtacgacgagaacgacaagctgatccgggaggtgaaggtgatcaccctgaagtccaagctggtgtccgacttccggaaggacttccagttctacaaggtgcgggagatcaacaactaccaccacgcccacgacgcctacctgaacgccgtggtgggcaccgccctgatcaagaagtaccccaagctggagtccgagttcgtgtacggcgactacaaggtgtacgacgtgcggaagatgatcgccaagtccgagcaggagatcggcaaggccaccgccaagtacttcttctactccaacatcatgaacttcttcaagaccgagatcaccctggccaacggcgagatccggaagcggcccctgatcgagaccaacggcgagaccggcgagatcgtgtgggacaagggccgggacttcgccaccgtgcggaaggtgctgtccatgccccaggtgaacatcgtgaagaagaccgaggtgcagaccggcggcttctccaaggagtccatcctgcccaagcggaactccgacaagctgatcgcccggaagaaggactgggaccccaagaagtacggcggcttcgactcccccaccgtggcctactccgtgctggtggtggccaaggtggagaagggcaagtccaagaagctgaagtccgtgaaggagctgctgggcatcaccatcatggagcggtcctccttcgagaagaaccccatcgacttcctggaggccaagggctacaaggaggtgaagaaggacctgatcatcaagctgcccaagtactccctgttcgagctggagaacggccggaagcggatgctggcctccgccggcgagctgcagaagggcaacgagctggccctgccctccaagtacgtgaacttcctgtacctggcctcccactacgagaagctgaagggctcccccgaggacaacgagcagaagcagctgttcgtggagcagcacaagcactacctggacgagatcatcgagcagatctccgagttctccaagcgggtgatcctggccgacgccaacctggacaaggtgctgtccgcctacaacaagcaccgggacaagcccatccgggagcaggccgagaacatcatccacctgttcaccctgaccaacctgggcgcccccgccgccttcaagtacttcgacaccaccatcgaccggaagcggtacacctccaccaaggaggtgctggacgccaccctgatccaccagtccatcaccggcctgtacgagacccggatcgacctgtcccagctgggcggcgacggcgcccccgagtccgccaccgagtccggcggcacctccaccgagtccgagggctccgccggccccaagaagaagcggaaggtgacctccaccgagtccgagggctccgccggctccgccggctccacctccggctcctcctccggcatgaagatcgccgtggtggacaaggccctgaacaacacccggtacgacaagcacttccagctgtacggcgaggaggtggacgtgttccacatgtgcaacgagaagctgtccggccggctgctgaagaagcacatcaccatcggcacccccgagaaccccttcgaccccaacgactacgacttcgtgatcctggtgggcgccgagcccttcctgtacttcgccggcaagaagggcatcggcgactacaccggcaagcgggtggagtacaacggctacgccaactggatcgcctccatctcccccgcccagctgcacttcaagcccgagatgaagcccgtgttcgacgccaccgtggagaacatccacgacatcatcaacggccgggagaagatcgccaaggccggcgactaccggcccatcaccgaccccgacgaggccgaggagtacatcaagatggtgtacaacatggtgatcggccccgtggccttcgcctccgccacctccgccctgtactgccgggacggctacctgctgggcgtgtccatctcccaccaggagtaccagggcgtgtacatcgactccgactgcctgaccgaggtggccgtgtactacctgcagaagatcctggactccgagaaccacaccatcgtgttccacaacctgaagttcgacatgcacttctacaagtaccacctgggcctgaccttcgacaaggcccacaaggagcggcggctgcacgacaccatgctgcagcactacgtgctggacgagcggcggggcacccacggcctgaagtccctggccatgaagtacaccgacatgggcgactacgacttcgagctggacaagttcaaggacgactactgcaaggcccacaagatcaagaaggaggacttcacctacgacctgatccccttcgacatcatgtggccctacgccgccaaggacaccgacgccaccatccggctgcacaacttcttcctgcccaagatcgagaagaacgagaagctgtgctccctgtactacgacgtgctgatgcccggctgcgtgttcctgcagcgggtggaggaccggggcgtgcccatctccatcgaccggctgaaggaggcccagtaccagctgacccacaacctgaacaaggcccgggagaagctgtacacctaccccgaggtgaagcagctggagcaggaccagaacgaggccttcaaccccaactccgtgaagcagctgcgggtgctgctgttcgactacgtgggcctgacccccaccggcaagctgaccgacaccggcgccgactccaccgacgccgaggccctgaacgagctggccacccagcaccccatcgccaagaccctgctggagatccggaagctgaccaagctgatctccacctacgtggagaagatcctgctgtccatcgacgccgacggctgcatccggaccggcttccacgagcacatgaccacctccggccggctgtcctcctccggcaagctgaacctgcagcagctgccccgggacgagtccatcatcaagggctgcgtggtggccccccccggctaccgggtgatcgcctgggacctgaccaccgccgaggtgtactacgccgccgtgctgtccggcgaccggaacatgcagcaggtgttcatcaacatgcggaacgagcccgacaagtaccccgacttccactccaacatcgcccacatggtgttcaagctgcagtgcgagccccgggacgtgaagaagctgttccccgccctgcggcaggccgccaaggccatcaccttcggcatcctgtacggctccggccccgccaaggtggcccactccgtgaacgaggccctgctggagcaggccgccaagaccggcgagcccttcgtggagtgcaccgtggccgacgccaaggagtacatcgagacctacttcggccagttcccccagctgaagcggtggatcgacaagtgccacgaccagatcaagaaccacggcttcatctactcccacttcggccggaagcggcggctgcacaacatccactccgaggaccggggcgtgcagggcgaggagatccggtccggcttcaacgccatcatccagtccgcctcctccgactccctgctgctgggcgccgtggacgccgacaacgagatcatctccctgggcctggagcaggagatgaagatcgtgatgctggtgcacgactccgtggtggccatcgtgcgggaggacctgatcgaccagtacaacgagatcctgatccggaacatccagaaggaccggggcatctccatccccggctgccccatcggcatcgactccgactccgaggccggcggctcccgggactactcctgcggcaagatgaagaagcagcacccctccatcgcctgcatcgacgacgacgagtacacccggtacgtgaagggcgtgctgctggacgccgagttcgagtacaagaagctggccgccatggacaaggagcaccccgaccactccaagtacaaggacgacaagttcatcgccgtgtgcaaggacctggacaacgtgaagcggatcctgggcgccggcggcggctccggcaagcggaccgccgacggctccggcggcggctcccccaagaagaagcggaaggtgcctgccgctaagagagtgaagctggactccgagtccgccacccccgagtccgtgtccggctggcggctgttcaagaagatctcctag

SEQ ID NO: 1216 - protein, 2339 aa, synthetic construct
  REGION 1..2339: note = Synthetic
MKRPAATKKAGQAKKKKDKKYSIGLDIGTNSVGWAVITDEYKVPSKKFKVLGNTDRHSIKKNLIGALLFDSGETAEATRLKRTARRRYTRRKNRICYLQEIFSNEMAKVDDSFFHRLEESFLVEEDKKHERHPIFGNIVDEVAYHEKYPTIYHLRKKLVDSTDKADLRLIYLALAHMIKFRGHFLIEGDLNPDNSDVDKLFIQLVQTYNQLFEENPINASGVDAKAILSARLSKSRRLENLIAQLPGEKKNGLFGNLIALSLGLTPNFKSNFDLAEDAKLQLSKDTYDDDLDNLLAQIGDQYADLFLAAKNLSDAILLSDILRVNTEITKAPLSASMIKRYDEHHQDLTLLKALVRQQLPEKYKEIFFDQSKNGYAGYIDGGASQEEFYKFIKPILEKMDGTEELLVKLNREDLLRKQRTFDNGSIPHQIHLGELHAILRRQEDFYPFLKDNREKIEKILTFRIPYYVGPLARGNSRFAWMTRKSEETITPWNFEEVVDKGASAQSFIERMTNFDKNLPNEKVLPKHSLLYEYFTVYNELTKVKYVTEGMRKPAFLSGEQKKAIVDLLFKTNRKVTVKQLKEDYFKKIECFDSVEISGVEDRFNASLGTYHDLLKIIKDKDFLDNEENEDILEDIVLTLTLFEDREMIEERLKTYAHLFDDKVMKQLKRRRYTGWGRLSRKLINGIRDKQSGKTILDFLKSDGFANRNFMQLIHDDSLTFKEDIQKAQVSGQGDSLHEHIANLAGSPAIKKGILQTVKVVDELVKVMGRHKPENIVIEMARENQTTQKGQKNSRERMKRIEEGIKELGSQILKEHPVENTQLQNEKLYLYYLQNGRDMYVDQELDINRLSDYDVDAIVPQSFLKDDSIDNKVLTRSDKNRGKSDNVPSEEVVKKMKNYWRQLLNAKLITQRKFDNLTKAERGGLSELDKAGFIKRQLVETRQITKHVAQILDSRMNTKYDENDKLIREVKVITLKSKLVSDFRKDFQFYKVREINNYHHAHDAYLNAVVGTALIKKYPKLESEFVYGDYKVYDVRKMIAKSEQEIGKATAKYFFYSNIMNFFKTEITLANGEIRKRPLIETNGETGEIVWDKGRDFATVRKVLSMPQVNIVKKTEVQTGGFSKESILPKRNSDKLIARKKDWDPKKYGGFDSPTVAYSVLVVAKVEKGKSKKLKSVKELLGITIMERSSFEKNPIDFLEAKGYKEVKKDLIIKLPKYSLFELENGRKRMLASAGELQKGNELALPSKYVNFLYLASHYEKLKGSPEDNEQKQLFVEQHKHYLDEIIEQISEFSKRVILADANLDKVLSAYNKHRDKPIREQAENIIHLFTLTNLGAPAAFKYFDTTIDRKRYTSTKEVLDATLIHQSITGLYETRIDLSQLGGDGAPESATESGGTSTESEGSAGPKKKRKVTSTESEGSAGSAGSTSGSSSGMKIAVVDKALNNTRYDKHFQLYGEEVDVFHMCNEKLSGRLLKKHITIGTPENPFDPNDYDFVILVGAEPFLYFAGKKGIGDYTGKRVEYNGYANWIASISPAQLHFKPEMKPVFDATVENIHDIINGREKIAKAGDYRPITDPDEAEEYIKMVYNMVIGPVAFASATSALYCRDGYLLGVSISHQEYQGVYIDSDCLTEVAVYYLQKILDSENHTIVFHNLKFDMHFYKYHLGLTFDKAHKERRLHDTMLQHYVLDERRGTHGLKSLAMKYTDMGDYDFELDKFKDDYCKAHKIKKEDFTYDLIPFDIMWPYAAKDTDATIRLHNFFLPKIEKNEKLCSLYYDVLMPGCVFLQRVEDRGVPISIDRLKEAQYQLTHNLNKAREKLYTYPEVKQLEQDQNEAFNPNSVKQLRVLLFDYVGLTPTGKLTDTGADSTDAEALNELATQHPIAKTLLEIRKLTKLISTYVEKILLSIDADGCIRTGFHEHMTTSGRLSSSGKLNLQQLPRDESIIKGCVVAPPGYRVIAWDLTTAEVYYAAVLSGDRNMQQVFINMRNEPDKYPDFHSNIAHMVFKLQCEPRDVKKLFPALRQAAKAITFGILYGSGPAKVAHSVNEALLEQAAKTGEPFVECTVADAKEYIETYFGQFPQLKRWIDKCHDQIKNHGFIYSHFGRKRRLHNIHSEDRGVQGEEIRSGFNAIIQSASSDSLLLGAVDADNEIISLGLEQEMKIVMLVHDSVVAIVREDLIDQYNEILIRNIQKDRGISIPGCPIGIDSDSEAGGSRDYSCGKMKKQHPSIACIDDDEYTRYVKGVLLDAEFEYKKLAAMDKEHPDHSKYKDDKFIAVCKDLDNVKRILGAGGGSGKRTADGSGGGSPKKKRKVPAAKRVKLDSESATPESVSGWRLFKKIS

SEQ ID NO: 1217 - RNA, 7579 nt, synthetic construct
  misc_feature 1..7579: note = Synthetic
  source 1..7579: mol_type = other RNA
gggaagctcagaataaacgctcaactttggccggatctgccaccatgaagcggcccgccgccaccaagaaggccggccaggccaagaagaagaaggacaagaagtactccatcggcctggacatcggcaccaactccgtgggctgggccgtgatcaccgacgagtacaaggtgccctccaagaagttcaaggtgctgggcaacaccgaccggcactccatcaagaagaacctgatcggcgccctgctgttcgactccggcgagaccgccgaggccacccggctgaagcggaccgcccggcggcggtacacccggcggaagaaccggatctgctacctgcaggagatcttctccaacgagatggccaaggtggacgactccttcttccaccggctggaggagtccttcctggtggaggaggacaagaagcacgagcggcaccccatcttcggcaacatcgtggacgaggtggcctaccacgagaagtaccccaccatctaccacctgcggaagaagctggtggactccaccgacaaggccgacctgcggctgatctacctggccctggcccacatgatcaagttccggggccacttcctgatcgagggcgacctgaaccccgacaactccgacgtggacaagctgttcatccagctggtgcagacctacaaccagctgttcgaggagaaccccatcaacgcctccggcgtggacgccaaggccatcctgtccgcccggctgtccaagtcccggcggctggagaacctgatcgcccagctgcccggcgagaagaagaacggcctgttcggcaacctgatcgccctgtccctgggcctgacccccaacttcaagtccaacttcgacctggccgaggacgccaagctgcagctgtccaaggacacctacgacgacgacctggacaacctgctggcccagatcggcgaccagtacgccgacctgttcctggccgccaagaacctgtccgacgccatcctgctgtccgacatcctgcgggtgaacaccgagatcaccaaggcccccctgtccgcctccatgatcaagcggtacgacgagcaccaccaggacctgaccctgctgaaggccctggtgcggcagcagctgcccgagaagtacaaggagatcttcttcgaccagtccaagaacggctacgccggctacatcgacggcggcgcctcccaggaggagttctacaagttcatcaagcccatcctggagaagatggacggcaccgaggagctgctggtgaagctgaaccgggaggacctgctgcggaagcagcggaccttcgacaacggctccatcccccaccagatccacctgggcgagctgcacgccatcctgcggcggcaggaggacttctaccccttcctgaaggacaaccgggagaagatcgagaagatcctgaccttccggatcccctactacgtgggccccctggcccggggcaactcccggttcgcctggatgacccggaagtccgaggagaccatcaccccctggaacttcgaggaggtggtggacaagggcgcctccgcccagtccttcatcgagcggatgaccaacttcgacaagaacctgcccaacgagaaggtgctgcccaagcactccctgctgtacgagtacttcaccgtgtacaacgagctgaccaaggtgaagtacgtgaccgagggcatgcggaagcccgccttcctgtccggcgagcagaagaaggccatcgtggacctgctgttcaagaccaaccggaaggtgaccgtgaagcagctgaaggaggactacttcaagaagatcgagtgcttcgactccgtggagatctccggcgtggaggaccggttcaacgcctccctgggcacctaccacgacctgctgaagatcatcaaggacaaggacttcctggacaacgaggagaacgaggacatcctggaggacatcgtgctgaccctgaccctgttcgaggaccgggagatgatcgaggagcggctgaagacctacgcccacctgttcgacgacaaggtgatgaagcagctgaagcggcggcggtacaccggctggggccggctgtcccggaagctgatcaacggcatccgggacaagcagtccggcaagaccatcctggacttcctgaagtccgacggcttcgccaaccggaacttcatgcagctgatccacgacgactccctgaccttcaaggaggacatccagaaggcccaggtgtccggccagggcgactccctgcacgagcacatcgccaacctggccggctcccccgccatcaagaagggcatcctgcagaccgtgaaggtggtggacgagctggtgaaggtgatgggccggcacaagcccgagaacatcgtgatcgagatggcccgggagaaccagaccacccagaagggccagaagaactcccgggagcggatgaagcggatcgaggagggcatcaaggagctgggctcccagatcctgaaggagcaccccgtggagaacacccagctgcagaacgagaagctgtacctgtactacctgcagaacggccgggacatgtacgtggaccaggagctggacatcaaccggctgtccgactacgacgtggacgccatcgtgccccagtccttcctgaaggacgactccatcgacaacaaggtgctgacccggtccgacaagaaccggggcaagtccgacaacgtgccctccgaggaggtggtgaagaagatgaagaactactggcggcagctgctgaacgccaagctgatcacccagcggaagttcgacaacctgaccaaggccgagcggggcggcctgtccgagctggacaaggccggcttcatcaagcggcagctggtggagacccggcagatcaccaagcacgtggcccagatcctggactcccggatgaacaccaagtacgacgagaacgacaagctgatccgggaggtgaaggtgatcaccctgaagtccaagctggtgtccgacttccggaaggacttccagttctacaaggtgcgggagatcaacaactaccaccacgcccacgacgcctacctgaacgccgtggtgggcaccgccctgatcaagaagtaccccaagctggagtccgagttcgtgtacggcgactacaaggtgtacgacgtgcggaagatgatcgccaagtccgagcaggagatcggcaaggccaccgccaagtacttcttctactccaacatcatgaacttcttcaagaccgagatcaccctggccaacggcgagatccggaagcggcccctgatcgagaccaacggcgagaccggcgagatcgtgtgggacaagggccgggacttcgccaccgtgcggaaggtgctgtccatgccccaggtgaacatcgtgaagaagaccgaggtgcagaccggcggcttctccaaggagtccatcctgcccaagcggaactccgacaagctgatcgcccggaagaaggactgggaccccaagaagtacggcggcttcgactcccccaccgtggcctactccgtgctggtggtggccaaggtggagaagggcaagtccaagaagctgaagtccgtgaaggagctgctgggcatcaccatcatggagcggtcctccttcgagaagaaccccatcgacttcctggaggccaagggctacaaggaggtgaagaaggacctgatcatcaagctgcccaagtactccctgttcgagctggagaacggccggaagcggatgctggcctccgccggcgagctgcagaagggcaacgagctggccctgccctccaagtacgtgaacttcctgtacctggcctcccactacgagaagctgaagggctcccccgaggacaacgagcagaagcagctgttcgtggagcagcacaagcactacctggacgagatcatcgagcagatctccgagttctccaagcgggtgatcctggccgacgccaacctggacaaggtgctgtccgcctacaacaagcaccgggacaagcccatccgggagcaggccgagaacatcatccacctgttcaccctgaccaacctgggcgcccccgccgccttcaagtacttcgacaccaccatcgaccggaagcggtacacctccaccaaggaggtgctggacgccaccctgatccaccagtccatcaccggcctgtacgagacccggatcgacctgtcccagctgggcggcgacggcgcccccgagtccgccaccgagtccggcggcacctccaccgagtccgagggctccgccggccccaagaagaagcggaaggtgacctccaccgagtccgagggctccgccggctccgccggctccacctccggctcctcctccggcatgaagatcgccgtggtggacaaggccctgaacaacacccggtacgacaagcacttccagctgtacggcgaggaggtggacgtgttccacatgtgcaacgagaagctgtccggccggctgctgaagaagcacatcaccatcggcacccccgagaaccccttcgaccccaacgactacgacttcgtgatcctggtgggcgccgagcccttcctgtacttcgccggcaagaagggcatcggcgactacaccggcaagcgggtggagtacaacggctacgccaactggatcgcctccatctcccccgcccagctgcacttcaagcccgagatgaagcccgtgttcgacgccaccgtggagaacatccacgacatcatcaacggccgggagaagatcgccaaggccggcgactaccggcccatcaccgaccccgacgaggccgaggagtacatcaagatggtgtacaacatggtgatcggccccgtggccttcgcctccgccacctccgccctgtactgccgggacggctacctgctgggcgtgtccatctcccaccaggagtaccagggcgtgtacatcgactccgactgcctgaccgaggtggccgtgtactacctgcagaagatcctggactccgagaaccacaccatcgtgttccacaacctgaagttcgacatgcacttctacaagtaccacctgggcctgaccttcgacaaggcccacaaggagcggcggctgcacgacaccatgctgcagcactacgtgctggacgagcggcggggcacccacggcctgaagtccctggccatgaagtacaccgacatgggcgactacgacttcgagctggacaagttcaaggacgactactgcaaggcccacaagatcaagaaggaggacttcacctacgacctgatccccttcgacatcatgtggccctacgccgccaaggacaccgacgccaccatccggctgcacaacttcttcctgcccaagatcgagaagaacgagaagctgtgctccctgtactacgacgtgctgatgcccggctgcgtgttcctgcagcgggtggaggaccggggcgtgcccatctccatcgaccggctgaaggaggcccagtaccagctgacccacaacctgaacaaggcccgggagaagctgtacacctaccccgaggtgaagcagctggagcaggaccagaacgaggccttcaaccccaactccgtgaagcagctgcgggtgctgctgttcgactacgtgggcctgacccccaccggcaagctgaccgacaccggcgccgactccaccgacgccgaggccctgaacgagctggccacccagcaccccatcgccaagaccctgctggagatccggaagctgaccaagctgatctccacctacgtggagaagatcctgctgtccatcgacgccgacggctgcatccggaccggcttccacgagcacatgaccacctccggccggctgtcctcctccggcaagctgaacctgcagcagctgccccgggacgagtccatcatcaagggctgcgtggtggccccccccggctaccgggtgatcgcctgggacctgaccaccgccgaggtgtactacgccgccgtgctgtccggcgaccggaacatgcagcaggtgttcatcaacatgcggaacgagcccgacaagtaccccgacttccactccaacatcgcccacatggtgttcaagctgcagtgcgagccccgggacgtgaagaagctgttccccgccctgcggcaggccgccaaggccatcaccttcggcatcctgtacggctccggccccgccaaggtggcccactccgtgaacgaggccctgctggagcaggccgccaagaccggcgagcccttcgtggagtgcaccgtggccgacgccaaggagtacatcgagacctacttcggccagttcccccagctgaagcggtggatcgacaagtgccacgaccagatcaagaaccacggcttcatctactcccacttcggccggaagcggcggctgcacaacatccactccgaggaccggggcgtgcagggcgaggagatccggtccggcttcaacgccatcatccagtccgcctcctccgactccctgctgctgggcgccgtggacgccgacaacgagatcatctccctgggcctggagcaggagatgaagatcgtgatgctggtgcacgactccgtggtggccatcgtgcgggaggacctgatcgaccagtacaacgagatcctgatccggaacatccagaaggaccggggcatctccatccccggctgccccatcggcatcgactccgactccgaggccggcggctcccgggactactcctgcggcaagatgaagaagcagcacccctccatcgcctgcatcgacgacgacgagtacacccggtacgtgaagggcgtgctgctggacgccgagttcgagtacaagaagctggccgccatggacaaggagcaccccgaccactccaagtacaaggacgacaagttcatcgccgtgtgcaaggacctggacaacgtgaagcggatcctgggcgccggcggcggctccggcaagcggaccgccgacggctccggcggcggctcccccaagaagaagcggaaggtgcctgccgctaagagagtgaagctggactccgagtccgccacccccgagtccgtgtccggctggcggctgttcaagaagatctcctagctagcaccagcctcaagaacacccgaatggagtctctaagctacataataccaacttacactttacaaaatgttgtcccccaaaatgtagccattcgtatctgctcctaataaaaagaaagtttcttcacattctctcgagaaaaaaaaaaaatggaaaaaaaaaaaacggaaaaaaaaaaaaggtaaaaaaaaaaaatataaaaaaaaaaaacataaaaaaaaaaaacgaaaaaaaaaaaacgtaaaaaaaaaaaactcaaaaaaaaaaaagataaaaaaaaaaaacctaaaaaaaaaaaatgtaaaaaaaaaaaagggaaaaaaaaaaaacgcaaaaaaaaaaaacacaaaaaaaaaaaatgcaaaaaaaaaaaatcgaaaaaaaaaaaatctaaaaaaaaaaaacgaaaaaaaaaaaacccaaaaaaaaaaaagacaaaaaaaaaaaatagaaaaaaaaaaagttaaaaaaaaaaaactgaaaaaaaaaaaatttaaaaaaaaaaaatctag

SEQ ID NO: 1218 - RNA, 6960 nt, synthetic construct
  misc_feature 1..6960: note = Synthetic
  source 1..6960: mol_type = other RNA
atgaagcggcccgccgccaccaagaaggccggccaggccaagaagaagaaggacaagaagtactccatcggcctggacatcggcaccaactccgtgggctgggccgtgatcaccgacgagtacaaggtgccctccaagaagttcaaggtgctgggcaacaccgaccggcactccatcaagaagaacctgatcggcgccctgctgttcgactccggcgagaccgccgaggccacccggctgaagcggaccgcccggcggcggtacacccggcggaagaaccggatctgctacctgcaggagatcttctccaacgagatggccaaggtggacgactccttcttccaccggctggaggagtccttcctggtggaggaggacaagaagcacgagcggcaccccatcttcggcaacatcgtggacgaggtggcctaccacgagaagtaccccaccatctaccacctgcggaagaagctggtggactccaccgacaaggccgacctgcggctgatctacctggccctggcccacatgatcaagttccggggccacttcctgatcgagggcgacctgaaccccgacaactccgacgtggacaagctgttcatccagctggtgcagacctacaaccagctgttcgaggagaaccccatcaacgcctccggcgtggacgccaaggccatcctgtccgcccggctgtccaagtcccggcggctggagaacctgatcgcccagctgcccggcgagaagaagaacggcctgttcggcaacctgatcgccctgtccctgggcctgacccccaacttcaagtccaacttcgacctggccgaggacgccaagctgcagctgtccaaggacacctacgacgacgacctggacaacctgctggcccagatcggcgaccagtacgccgacctgttcctggccgccaagaacctgtccgacgccatcctgctgtccgacatcctgcgggtgaacaccgagatcaccaaggcccccctgtccgcctccatgatcaagcggtacgacgagcaccaccaggacctgaccctgctgaaggccctggtgcggcagcagctgcccgagaagtacaaggagatcttcttcgaccagtccaagaacggctacgccggctacatcgacggcggcgcctcccaggaggagttctacaagttcatcaagcccatcctggagaagatggacggcaccgaggagctgctggtgaagctgaaccgggaggacctgctgcggaagcagcggaccttcgacaacggctccatcccccaccagatccacctgggcgagctgcacgccatcctgcggcggcaggaggacttctaccccttcctgaaggacaaccgggagaagatcgagaagatcctgaccttccggatcccctactacgtgggccccctggcccggggcaactcccggttcgcctggatgacccggaagtccgaggagaccatcaccccctggaacttcgaggaggtggtggacaagggcgcctccgcccagtccttcatcgagcggatgaccaacttcgacaagaacctgcccaacgagaaggtgctgcccaagcactccctgctgtacgagtacttcaccgtgtacaacgagctgaccaaggtgaagtacgtgaccgagggcatgcggaagcccgccttcctgtccggcgagcagaagaaggccatcgtggacctgctgttcaagaccaaccggaaggtgaccgtgaagcagctgaaggaggactacttcaagaagatcgagtgcttcgactccgtggagatctccggcgtggaggaccggttcaacgcctccctgggcacctaccacgacctgctgaagatcatcaaggacaaggacttcctggacaacgaggagaacgaggacatcctggaggacatcgtgctgaccctgaccctgttcgaggaccgggagatgatcgaggagcggctgaagacctacgcccacctgttcgacgacaaggtgatgaagcagctgaagcggcggcggtacaccggctggggccggctgtcccggaagctgatcaacggcatccgggacaagcagtccggcaagaccatcctggacttcctgaagtccgacggcttcgccaaccggaacttcatgcagctgatccacgacgactccctgaccttcaaggaggacatccagaaggcccaggtgtccggccagggcgactccctgcacgagcacatcgccaacctggccggctcccccgccatcaagaagggcatcctgcagaccgtgaaggtggtggacgagctggtgaaggtgatgggccggcacaagcccgagaacatcgtgatcgagatggcccgggagaaccagaccacccagaagggccagaagaactcccgggagcggatgaagcggatcgaggagggcatcaaggagctgggctcccagatcctgaaggagcaccccgtggagaacacccagctgcagaacgagaagctgtacctgtactacctgcagaacggccgggacatgtacgtggaccaggagctggacatcaaccggctgtccgactacgacgtggacgccatcgtgccccagtccttcctgaaggacgactccatcgacaacaaggtgctgacccggtccgacaagaaccggggcaagtccgacaacgtgccctccgaggaggtggtgaagaagatgaagaactactggcggcagctgctgaacgccaagctgatcacccagcggaagttcgacaacctgaccaaggccgagcggggcggcctgtccgagctggacaaggccggcttcatcaagcggcagctggtggagacccggcagatcaccaagcacgtggcccagatcctggactcccggatgaacaccaagtacgacgagaacgacaagctgatccgggaggtgaaggtgatcaccctgaagtccaagctggtgtccgacttccggaaggacttccagttctacaaggtgcgggagatcaacaactaccaccacgcccacgacgcctacctgaacgccgtggtgggcaccgccctgatcaagaagtaccccaagctggagtccgagttcgtgtacggcgactacaaggtgtacgacgtgcggaagatgatcgccaagtccgagcaggagatcggcaaggccaccgccaagtacttcttctactccaacatcatgaacttcttcaagaccgagatcaccctggccaacggcgagatccggaagcggcccctgatcgagaccaacggcgagaccggcgagatcgtgtgggacaagggccgggacttcgccaccgtgcggaaggtgctgtccatgccccaggtgaacatcgtgaagaagaccgaggtgcagaccggcggcttctccaaggagtccatcctgcccaagcggaactccgacaagctgatcgcccggaagaaggactgggaccccaagaagtacggcggcttcgactcccccaccgtggcctactccgtgctggtggtggccaaggtggagaagggcaagtccaagaagctgaagtccgtgaaggagctgctgggcatcaccatcatggagcggtcctccttcgagaagaaccccatcgacttcctggaggccaagggctacaaggaggtgaagaaggacctgatcatcaagctgcccaagtactccctgttcgagctggagaacggccggaagcggatgctggcctccgccggcgagctgcagaagggcaacgagctggccctgccctccaagtacgtgaacttcctgtacctggcctcccactacgagaagctgaagggctcccccgaggacaacgagcagaagcagctgttcgtggagcagcacaagcactacctggacgagatcatcgagcagatctccgagttctccaagcgggtgatcctggccgacgccaacctggacaaggtgctgtccgcctacaacaagcaccgggacaagcccatccgggagcaggccgagaacatcatccacctgttcaccctgaccaacctgggcgcccccgccgccttcaagtacttcgacaccaccatcgaccggaagcggtacacctccaccaaggaggtgctggacgccaccctgatccaccagtccatcaccggcctgtacgagacccggatcgacctgtcccagctgggcggcgacggcgcccccgagtccgccaccgagtccggcggcacctccaccgagtccgagggctccgccggccccaagaagaagcggaaggtgacctccaccgagtccgagggctccgccggctccgccggctccacctccggctcctcctccggcatgaagatcgccgtggtggacaaggccctgaacaacacccggtacgacaagcacttccagctgtacggcgaggaggtggacgtgttccacatgtgcaacgagaagctgtccggccggctgctgaagaagcacatcaccatcggcacccccgagaaccccttcgaccccaacgactacgacttcgtgatcctggtgggcgccgagcccttcctgtacttcgccggcaagaagggcatcggcgactacaccggcaagcgggtggagtacaacggctacgccaactggatcgcctccatctcccccgcccagctgcacttcaagcccgagatgaagcccgtgttcgacgccaccgtggagaacatccacgacatcatcaacggccgggagaagatcgccaaggccggcgactaccggcccatcaccgaccccgacgaggccgaggagtacatcaagatggtgtacaacatggtgatcggccccgtggccttcgcctccgccacctccgccctgtactgccgggacggctacctgctgggcgtgtccatctcccaccaggagtaccagggcgtgtacatcgactccgactgcctgaccgaggtggccgtgtactacctgcagaagatcctggactccgagaaccacaccatcgtgttccacaacctgaagttcgacatgcacttctacaagtaccacctgggcctgaccttcgacaaggcccacaaggagcggcggctgcacgacaccatgctgcagcactacgtgctggacgagcggcggggcacccacggcctgaagtccctggccatgaagtacaccgacatgggcgactacgacttcgagctggacaagttcaaggacgactactgcaaggcccacaagatcaagaaggaggacttcacctacgacctgatccccttcgacatcatgtggccctacgccgccaaggacaccgacgccaccatccggctgcacaacttcttcctgcccaagatcgagaagaacgagaagctgtgctccctgtactacgacgtgctgatgcccggctgcgtgttcctgcagcgggtggaggaccggggcgtgcccatctccatcgaccggctgaaggaggcccagtaccagctgacccacaacctgaacaaggcccgggagaagctgtacacctaccccgaggtgaagcagctggagcaggaccagaacgaggccttcaaccccaactccgtgaagcagctgcgggtgctgctgttcgactacgtgggcctgacccccaccggcaagctgaccgacaccggcgccgactccaccgacgccgaggccctgaacgagctggccacccagcaccccatcgccaagaccctgctggagatccggaagctgaccaagctgatctccacctacgtggagaagatcctgctgtccatcgacgccgacggctgcatccggaccggcttccacgagcacatgaccacctccggccggctgtcctcctccggcaagctgaacctgcagcagctgccccgggacgagtccatcatcaagggctgcgtggtggccccccccggctaccgggtgatcgcctgggacctgaccaccgccgaggtgtactacgccgccgtgctgtccggcgaccggaacatgcagcaggtgttcatcaacatgcggaacgagcccgacaagtaccccgacttccactccaacatcgcccacatggtgttcaagctgcagtgcgagccccgggacgtgaagaagctgttccccgccctgcggcaggccgccaaggccatcaccttcggcatcctgtacggctccggccccgccaaggtggcccactccgtgaacgaggccctgctggagcaggccgccaagaccggcgagcccttcgtggagtgcaccgtggccgacgccaaggagtacatcgagacctacttcggccagttcccccagctgaagcggtggatcgacaagtgccacgaccagatcaagaaccacggcttcatctactcccacttcggccggaagcggcggctgcacaacatccactccgaggaccggggcgtgcagggcgaggagatccggtccggcttcaacgccatcatccagtccgcctcctccgactccctgctgctgggcgccgtggacgccgacaacgagatcatctccctgggcctggagcaggagatgaagatcgtgatgctggtgcacgactccgtggtggccatcgtgcgggaggacctgatcgaccagtacaacgagatcctgatccggaacatccagaaggaccggggcatctccatccccggctgccccatcggcatcgactccgactccgaggccggcggctcccgggactactcctgcggcaagatgaagaagcagcacccctccatcgcctgcatcgacgacgacgagtacacccggtacgtgaagggcgtgctgctggacgccgagttcgagtacaagaagctggccgccatggacaaggagcaccccgaccactccaagtacaaggacgacaagttcatcgccgtgtgcaaggacctggacaacgtgaagcggatcctgggcgccggcggcggctccggcaagcggaccgccgacggctccggcggcggctcccccaagaagaagcggaaggtgcctgccgctaagagagtgaagctggac

SEQ ID NO: 1219 - protein, 2320 aa, synthetic construct
  REGION 1..2320: note = Synthetic
MKRPAATKKAGQAKKKKDKKYSIGLDIGTNSVGWAVITDEYKVPSKKFKVLGNTDRHSIKKNLIGALLFDSGETAEATRLKRTARRRYTRRKNRICYLQEIFSNEMAKVDDSFFHRLEESFLVEEDKKHERHPIFGNIVDEVAYHEKYPTIYHLRKKLVDSTDKADLRLIYLALAHMIKFRGHFLIEGDLNPDNSDVDKLFIQLVQTYNQLFEENPINASGVDAKAILSARLSKSRRLENLIAQLPGEKKNGLFGNLIALSLGLTPNFKSNFDLAEDAKLQLSKDTYDDDLDNLLAQIGDQYADLFLAAKNLSDAILLSDILRVNTEITKAPLSASMIKRYDEHHQDLTLLKALVRQQLPEKYKEIFFDQSKNGYAGYIDGGASQEEFYKFIKPILEKMDGTEELLVKLNREDLLRKQRTFDNGSIPHQIHLGELHAILRRQEDFYPFLKDNREKIEKILTFRIPYYVGPLARGNSRFAWMTRKSEETITPWNFEEVVDKGASAQSFIERMTNFDKNLPNEKVLPKHSLLYEYFTVYNELTKVKYVTEGMRKPAFLSGEQKKAIVDLLFKTNRKVTVKQLKEDYFKKIECFDSVEISGVEDRFNASLGTYHDLLKIIKDKDFLDNEENEDILEDIVLTLTLFEDREMIEERLKTYAHLFDDKVMKQLKRRRYTGWGRLSRKLINGIRDKQSGKTILDFLKSDGFANRNFMQLIHDDSLTFKEDIQKAQVSGQGDSLHEHIANLAGSPAIKKGILQTVKVVDELVKVMGRHKPENIVIEMARENQTTQKGQKNSRERMKRIEEGIKELGSQILKEHPVENTQLQNEKLYLYYLQNGRDMYVDQELDINRLSDYDVDAIVPQSFLKDDSIDNKVLTRSDKNRGKSDNVPSEEVVKKMKNYWRQLLNAKLITQRKFDNLTKAERGGLSELDKAGFIKRQLVETRQITKHVAQILDSRMNTKYDENDKLIREVKVITLKSKLVSDFRKDFQFYKVREINNYHHAHDAYLNAVVGTALIKKYPKLESEFVYGDYKVYDVRKMIAKSEQEIGKATAKYFFYSNIMNFFKTEITLANGEIRKRPLIETNGETGEIVWDKGRDFATVRKVLSMPQVNIVKKTEVQTGGFSKESILPKRNSDKLIARKKDWDPKKYGGFDSPTVAYSVLVVAKVEKGKSKKLKSVKELLGITIMERSSFEKNPIDFLEAKGYKEVKKDLIIKLPKYSLFELENGRKRMLASAGELQKGNELALPSKYVNFLYLASHYEKLKGSPEDNEQKQLFVEQHKHYLDEIIEQISEFSKRVILADANLDKVLSAYNKHRDKPIREQAENIIHLFTLTNLGAPAAFKYFDTTIDRKRYTSTKEVLDATLIHQSITGLYETRIDLSQLGGDGAPESATESGGTSTESEGSAGPKKKRKVTSTESEGSAGSAGSTSGSSSGMKIAVVDKALNNTRYDKHFQLYGEEVDVFHMCNEKLSGRLLKKHITIGTPENPFDPNDYDFVILVGAEPFLYFAGKKGIGDYTGKRVEYNGYANWIASISPAQLHFKPEMKPVFDATVENIHDIINGREKIAKAGDYRPITDPDEAEEYIKMVYNMVIGPVAFASATSALYCRDGYLLGVSISHQEYQGVYIDSDCLTEVAVYYLQKILDSENHTIVFHNLKFDMHFYKYHLGLTFDKAHKERRLHDTMLQHYVLDERRGTHGLKSLAMKYTDMGDYDFELDKFKDDYCKAHKIKKEDFTYDLIPFDIMWPYAAKDTDATIRLHNFFLPKIEKNEKLCSLYYDVLMPGCVFLQRVEDRGVPISIDRLKEAQYQLTHNLNKAREKLYTYPEVKQLEQDQNEAFNPNSVKQLRVLLFDYVGLTPTGKLTDTGADSTDAEALNELATQHPIAKTLLEIRKLTKLISTYVEKILLSIDADGCIRTGFHEHMTTSGRLSSSGKLNLQQLPRDESIIKGCVVAPPGYRVIAWDLTTAEVYYAAVLSGDRNMQQVFINMRNEPDKYPDFHSNIAHMVFKLQCEPRDVKKLFPALRQAAKAITFGILYGSGPAKVAHSVNEALLEQAAKTGEPFVECTVADAKEYIETYFGQFPQLKRWIDKCHDQIKNHGFIYSHFGRKRRLHNIHSEDRGVQGEEIRSGFNAIIQSASSDSLLLGAVDADNEIISLGLEQEMKIVMLVHDSVVAIVREDLIDQYNEILIRNIQKDRGISIPGCPIGIDSDSEAGGSRDYSCGKMKKQHPSIACIDDDEYTRYVKGVLLDAEFEYKKLAAMDKEHPDHSKYKDDKFIAVCKDLDNVKRILGAGGGSGKRTADGSGGGSPKKKRKVPAAKRVKLD

SEQ ID NO: 1220 - RNA, 7020 nt, synthetic construct
  misc_feature 1..7020: note = Synthetic
  source 1..7020: mol_type = other RNA
atgcccaagaagaagcggaaggtggacaagaagtactccatcggcctggacatcggcaccaactccgtgggctgggccgtgatcaccgacgagtacaaggtgccctccaagaagttcaaggtgctgggcaacaccgaccggcactccatcaagaagaacctgatcggcgccctgctgttcgactccggcgagaccgccgaggccacccggctgaagcggaccgcccggcggcggtacacccggcggaagaaccggatctgctacctgcaggagatcttctccaacgagatggccaaggtggacgactccttcttccaccggctggaggagtccttcctggtggaggaggacaagaagcacgagcggcaccccatcttcggcaacatcgtggacgaggtggcctaccacgagaagtaccccaccatctaccacctgcggaagaagctggtggactccaccgacaaggccgacctgcggctgatctacctggccctggcccacatgatcaagttccggggccacttcctgatcgagggcgacctgaaccccgacaactccgacgtggacaagctgttcatccagctggtgcagacctacaaccagctgttcgaggagaaccccatcaacgcctccggcgtggacgccaaggccatcctgtccgcccggctgtccaagtcccggcggctggagaacctgatcgcccagctgcccggcgagaagaagaacggcctgttcggcaacctgatcgccctgtccctgggcctgacccccaacttcaagtccaacttcgacctggccgaggacgccaagctgcagctgtccaaggacacctacgacgacgacctggacaacctgctggcccagatcggcgaccagtacgccgacctgttcctggccgccaagaacctgtccgacgccatcctgctgtccgacatcctgcgggtgaacaccgagatcaccaaggcccccctgtccgcctccatgatcaagcggtacgacgagcaccaccaggacctgaccctgctgaaggccctggtgcggcagcagctgcccgagaagtacaaggagatcttcttcgaccagtccaagaacggctacgccggctacatcgacggcggcgcctcccaggaggagttctacaagttcatcaagcccatcctggagaagatggacggcaccgaggagctgctggtgaagctgaaccgggaggacctgctgcggaagcagcggaccttcgacaacggctccatcccccaccagatccacctgggcgagctgcacgccatcctgcggcggcaggaggacttctaccccttcctgaaggacaaccgggagaagatcgagaagatcctgaccttccggatcccctactacgtgggccccctggcccggggcaactcccggttcgcctggatgacccggaagtccgaggagaccatcaccccctggaacttcgaggaggtggtggacaagggcgcctccgcccagtccttcatcgagcggatgaccaacttcgacaagaacctgcccaacgagaaggtgctgcccaagcactccctgctgtacgagtacttcaccgtgtacaacgagctgaccaaggtgaagtacgtgaccgagggcatgcggaagcccgccttcctgtccggcgagcagaagaaggccatcgtggacctgctgttcaagaccaaccggaaggtgaccgtgaagcagctgaaggaggactacttcaagaagatcgagtgcttcgactccgtggagatctccggcgtggaggaccggttcaacgcctccctgggcacctaccacgacctgctgaagatcatcaaggacaaggacttcctggacaacgaggagaacgaggacatcctggaggacatcgtgctgaccctgaccctgttcgaggaccgggagatgatcgaggagcggctgaagacctacgcccacctgttcgacgacaaggtgatgaagcagctgaagcggcggcggtacaccggctggggccggctgtcccggaagctgatcaacggcatccgggacaagcagtccggcaagaccatcctggacttcctgaagtccgacggcttcgccaaccggaacttcatgcagctgatccacgacgactccctgaccttcaaggaggacatccagaaggcccaggtgtccggccagggcgactccctgcacgagcacatcgccaacctggccggctcccccgccatcaagaagggcatcctgcagaccgtgaaggtggtggacgagctggtgaaggtgatgggccggcacaagcccgagaacatcgtgatcgagatggcccgggagaaccagaccacccagaagggccagaagaactcccgggagcggatgaagcggatcgaggagggcatcaaggagctgggctcccagatcctgaaggagcaccccgtggagaacacccagctgcagaacgagaagctgtacctgtactacctgcagaacggccgggacatgtacgtggaccaggagctggacatcaaccggctgtccgactacgacgtggacgccatcgtgccccagtccttcctgaaggacgactccatcgacaacaaggtgctgacccggtccgacaagaaccggggcaagtccgacaacgtgccctccgaggaggtggtgaagaagatgaagaactactggcggcagctgctgaacgccaagctgatcacccagcggaagttcgacaacctgaccaaggccgagcggggcggcctgtccgagctggacaaggccggcttcatcaagcggcagctggtggagacccggcagatcaccaagcacgtggcccagatcctggactcccggatgaacaccaagtacgacgagaacgacaagctgatccgggaggtgaaggtgatcaccctgaagtccaagctggtgtccgacttccggaaggacttccagttctacaaggtgcgggagatcaacaactaccaccacgcccacgacgcctacctgaacgccgtggtgggcaccgccctgatcaagaagtaccccaagctggagtccgagttcgtgtacggcgactacaaggtgtacgacgtgcggaagatgatcgccaagtccgagcaggagatcggcaaggccaccgccaagtacttcttctactccaacatcatgaacttcttcaagaccgagatcaccctggccaacggcgagatccggaagcggcccctgatcgagaccaacggcgagaccggcgagatcgtgtgggacaagggccgggacttcgccaccgtgcggaaggtgctgtccatgccccaggtgaacatcgtgaagaagaccgaggtgcagaccggcggcttctccaaggagtccatcctgcccaagcggaactccgacaagctgatcgcccggaagaaggactgggaccccaagaagtacggcggcttcgactcccccaccgtggcctactccgtgctggtggtggccaaggtggagaagggcaagtccaagaagctgaagtccgtgaaggagctgctgggcatcaccatcatggagcggtcctccttcgagaagaaccccatcgacttcctggaggccaagggctacaaggaggtgaagaaggacctgatcatcaagctgcccaagtactccctgttcgagctggagaacggccggaagcggatgctggcctccgccggcgagctgcagaagggcaacgagctggccctgccctccaagtacgtgaacttcctgtacctggcctcccactacgagaagctgaagggctcccccgaggacaacgagcagaagcagctgttcgtggagcagcacaagcactacctggacgagatcatcgagcagatctccgagttctccaagcgggtgatcctggccgacgccaacctggacaaggtgctgtccgcctacaacaagcaccgggacaagcccatccgggagcaggccgagaacatcatccacctgttcaccctgaccaacctgggcgcccccgccgccttcaagtacttcgacaccaccatcgaccggaagcggtacacctccaccaaggaggtgctggacgccaccctgatccaccagtccatcaccggcctgtacgagacccggatcgacctgtcccagctgggcggcgacggcgcccccgagtccgccaccgagtccggcggcacctccaccgagtccgagggctccgccggccccaagaagaagcggaaggtgacctccaccgagtccgagggctccgccggctccgccggctccacctccggctcctcctccggcatgaagatcgccgtggtggacaaggccctgaacaacacccggtacgacaagcacttccagctgtacggcgaggaggtggacgtgttccacatgtgcaacgagaagctgtccggccggctgctgaagaagcacatcaccatcggcacccccgagaaccccttcgaccccaacgactacgacttcgtgatcctggtgggcgccgagcccttcctgtacttcgccggcaagaagggcatcggcgactacaccggcaagcgggtggagtacaacggctacgccaactggatcgcctccatctcccccgcccagctgcacttcaagcccgagatgaagcccgtgttcgacgccaccgtggagaacatccacgacatcatcaacggccgggagaagatcgccaaggccggcgactaccggcccatcaccgaccccgacgaggccgaggagtacatcaagatggtgtacaacatggtgatcggccccgtggccttcgcctccgccacctccgccctgtactgccgggacggctacctgctgggcgtgtccatctcccaccaggagtaccagggcgtgtacatcgactccgactgcctgaccgaggtggccgtgtactacctgcagaagatcctggactccgagaaccacaccatcgtgttccacaacctgaagttcgacatgcacttctacaagtaccacctgggcctgaccttcgacaaggcccacaaggagcggcggctgcacgacaccatgctgcagcactacgtgctggacgagcggcggggcacccacggcctgaagtccctggccatgaagtacaccgacatgggcgactacgacttcgagctggacaagttcaaggacgactactgcaaggcccacaagatcaagaaggaggacttcacctacgacctgatccccttcgacatcatgtggccctacgccgccaaggacaccgacgccaccatccggctgcacaacttcttcctgcccaagatcgagaagaacgagaagctgtgctccctgtactacgacgtgctgatgcccggctgcgtgttcctgcagcgggtggaggaccggggcgtgcccatctccatcgaccggctgaaggaggcccagtaccagctgacccacaacctgaacaaggcccgggagaagctgtacacctaccccgaggtgaagcagctggagcaggaccagaacgaggccttcaaccccaactccgtgaagcagctgcgggtgctgctgttcgactacgtgggcctgacccccaccggcaagctgaccgacaccggcgccgactccaccgacgccgaggccctgaacgagctggccacccagcaccccatcgccaagaccctgctggagatccggaagctgaccaagctgatctccacctacgtggagaagatcctgctgtccatcgacgccgacggctgcatccggaccggcttccacgagcacatgaccacctccggccggctgtcctcctccggcaagctgaacctgcagcagctgccccgggacgagtccatcatcaagggctgcgtggtggccccccccggctaccgggtgatcgcctgggacctgaccaccgccgaggtgtactacgccgccgtgctgtccggcgaccggaacatgcagcaggtgttcatcaacatgcggaacgagcccgacaagtaccccgacttccactccaacatcgcccacatggtgttcaagctgcagtgcgagccccgggacgtgaagaagctgttccccgccctgcggcaggccgccaaggccatcaccttcggcatcctgtacggctccggccccgccaaggtggcccactccgtgaacgaggccctgctggagcaggccgccaagaccggcgagcccttcgtggagtgcaccgtggccgacgccaaggagtacatcgagacctacttcggccagttcccccagctgaagcggtggatcgacaagtgccacgaccagatcaagaaccacggcttcatctactcccacttcggccggaagcggcggctgcacaacatccactccgaggaccggggcgtgcagggcgaggagatccggtccggcttcaacgccatcatccagtccgcctcctccgactccctgctgctgggcgccgtggacgccgacaacgagatcatctccctgggcctggagcaggagatgaagatcgtgatgctggtgcacgactccgtggtggccatcgtgcgggaggacctgatcgaccagtacaacgagatcctgatccggaacatccagaaggaccggggcatctccatccccggctgccccatcggcatcgactccgactccgaggccggcggctcccgggactactcctgcggcaagatgaagaagcagcacccctccatcgcctgcatcgacgacgacgagtacacccggtacgtgaagggcgtgctgctggacgccgagttcgagtacaagaagctggccgccatggacaaggagcaccccgaccactccaagtacaaggacgacaagttcatcgccgtgtgcaaggacctggacaacgtgaagcggatcctgggcgccggcggcggctccggcaagcggaccgccgacggctccggcggcggctccaagcggcccgccgccaccaagaaggccggccaggccaagaagaagaagcctgccgctaagagagtgaagctggactccgagtccgccacccccgagtccgtgtccggctggcggctgttcaagaagatctcctag

SEQ ID NO: 1221 - protein, 2339 aa, synthetic construct
  REGION 1..2339: note = Synthetic
MPKKKRKVDKKYSIGLDIGTNSVGWAVITDEYKVPSKKFKVLGNTDRHSIKKNLIGALLFDSGETAEATRLKRTARRRYTRRKNRICYLQEIFSNEMAKVDDSFFHRLEESFLVEEDKKHERHPIFGNIVDEVAYHEKYPTIYHLRKKLVDSTDKADLRLIYLALAHMIKFRGHFLIEGDLNPDNSDVDKLFIQLVQTYNQLFEENPINASGVDAKAILSARLSKSRRLENLIAQLPGEKKNGLFGNLIALSLGLTPNFKSNFDLAEDAKLQLSKDTYDDDLDNLLAQIGDQYADLFLAAKNLSDAILLSDILRVNTEITKAPLSASMIKRYDEHHQDLTLLKALVRQQLPEKYKEIFFDQSKNGYAGYIDGGASQEEFYKFIKPILEKMDGTEELLVKLNREDLLRKQRTFDNGSIPHQIHLGELHAILRRQEDFYPFLKDNREKIEKILTFRIPYYVGPLARGNSRFAWMTRKSEETITPWNFEEVVDKGASAQSFIERMTNFDKNLPNEKVLPKHSLLYEYFTVYNELTKVKYVTEGMRKPAFLSGEQKKAIVDLLFKTNRKVTVKQLKEDYFKKIECFDSVEISGVEDRFNASLGTYHDLLKIIKDKDFLDNEENEDILEDIVLTLTLFEDREMIEERLKTYAHLFDDKVMKQLKRRRYTGWGRLSRKLINGIRDKQSGKTILDFLKSDGFANRNFMQLIHDDSLTFKEDIQKAQVSGQGDSLHEHIANLAGSPAIKKGILQTVKVVDELVKVMGRHKPENIVIEMARENQTTQKGQKNSRERMKRIEEGIKELGSQILKEHPVENTQLQNEKLYLYYLQNGRDMYVDQELDINRLSDYDVDAIVPQSFLKDDSIDNKVLTRSDKNRGKSDNVPSEEVVKKMKNYWRQLLNAKLITQRKFDNLTKAERGGLSELDKAGFIKRQLVETRQITKHVAQILDSRMNTKYDENDKLIREVKVITLKSKLVSDFRKDFQFYKVREINNYHHAHDAYLNAVVGTALIKKYPKLESEFVYGDYKVYDVRKMIAKSEQEIGKATAKYFFYSNIMNFFKTEITLANGEIRKRPLIETNGETGEIVWDKGRDFATVRKVLSMPQVNIVKKTEVQTGGFSKESILPKRNSDKLIARKKDWDPKKYGGFDSPTVAYSVLVVAKVEKGKSKKLKSVKELLGITIMERSSFEKNPIDFLEAKGYKEVKKDLIIKLPKYSLFELENGRKRMLASAGELQKGNELALPSKYVNFLYLASHYEKLKGSPEDNEQKQLFVEQHKHYLDEIIEQISEFSKRVILADANLDKVLSAYNKHRDKPIREQAENIIHLFTLTNLGAPAAFKYFDTTIDRKRYTSTKEVLDATLIHQSITGLYETRIDLSQLGGDGAPESATESGGTSTESEGSAGPKKKRKVTSTESEGSAGSAGSTSGSSSGMKIAVVDKALNNTRYDKHFQLYGEEVDVFHMCNEKLSGRLLKKHITIGTPENPFDPNDYDFVILVGAEPFLYFAGKKGIGDYTGKRVEYNGYANWIASISPAQLHFKPEMKPVFDATVENIHDIINGREKIAKAGDYRPITDPDEAEEYIKMVYNMVIGPVAFASATSALYCRDGYLLGVSISHQEYQGVYIDSDCLTEVAVYYLQKILDSENHTIVFHNLKFDMHFYKYHLGLTFDKAHKERRLHDTMLQHYVLDERRGTHGLKSLAMKYTDMGDYDFELDKFKDDYCKAHKIKKEDFTYDLIPFDIMWPYAAKDTDATIRLHNFFLPKIEKNEKLCSLYYDVLMPGCVFLQRVEDRGVPISIDRLKEAQYQLTHNLNKAREKLYTYPEVKQLEQDQNEAFNPNSVKQLRVLLFDYVGLTPTGKLTDTGADSTDAEALNELATQHPIAKTLLEIRKLTKLISTYVEKILLSIDADGCIRTGFHEHMTTSGRLSSSGKLNLQQLPRDESIIKGCVVAPPGYRVIAWDLTTAEVYYAAVLSGDRNMQQVFINMRNEPDKYPDFHSNIAHMVFKLQCEPRDVKKLFPALRQAAKAITFGILYGSGPAKVAHSVNEALLEQAAKTGEPFVECTVADAKEYIETYFGQFPQLKRWIDKCHDQIKNHGFIYSHFGRKRRLHNIHSEDRGVQGEEIRSGFNAIIQSASSDSLLLGAVDADNEIISLGLEQEMKIVMLVHDSVVAIVREDLIDQYNEILIRNIQKDRGISIPGCPIGIDSDSEAGGSRDYSCGKMKKQHPSIACIDDDEYTRYVKGVLLDAEFEYKKLAAMDKEHPDHSKYKDDKFIAVCKDLDNVKRILGAGGGSGKRTADGSGGGSKRPAATKKAGQAKKKKPAAKRVKLDSESATPESVSGWRLFKKIS

SEQ ID NO: 1222 - RNA, 7579 nt, synthetic construct
  misc_feature 1..7579: note = Synthetic
  source 1..7579: mol_type = other RNA
gggaagctcagaataaacgctcaactttggccggatctgccaccatgcccaagaagaagcggaaggtggacaagaagtactccatcggcctggacatcggcaccaactccgtgggctgggccgtgatcaccgacgagtacaaggtgccctccaagaagttcaaggtgctgggcaacaccgaccggcactccatcaagaagaacctgatcggcgccctgctgttcgactccggcgagaccgccgaggccacccggctgaagcggaccgcccggcggcggtacacccggcggaagaaccggatctgctacctgcaggagatcttctccaacgagatggccaaggtggacgactccttcttccaccggctggaggagtccttcctggtggaggaggacaagaagcacgagcggcaccccatcttcggcaacatcgtggacgaggtggcctaccacgagaagtaccccaccatctaccacctgcggaagaagctggtggactccaccgacaaggccgacctgcggctgatctacctggccctggcccacatgatcaagttccggggccacttcctgatcgagggcgacctgaaccccgacaactccgacgtggacaagctgttcatccagctggtgcagacctacaaccagctgttcgaggagaaccccatcaacgcctccggcgtggacgccaaggccatcctgtccgcccggctgtccaagtcccggcggctggagaacctgatcgcccagctgcccggcgagaagaagaacggcctgttcggcaacctgatcgccctgtccctgggcctgacccccaacttcaagtccaacttcgacctggccgaggacgccaagctgcagctgtccaaggacacctacgacgacgacctggacaacctgctggcccagatcggcgaccagtacgccgacctgttcctggccgccaagaacctgtccgacgccatcctgctgtccgacatcctgcgggtgaacaccgagatcaccaaggcccccctgtccgcctccatgatcaagcggtacgacgagcaccaccaggacctgaccctgctgaaggccctggtgcggcagcagctgcccgagaagtacaaggagatcttcttcgaccagtccaagaacggctacgccggctacatcgacggcggcgcctcccaggaggagttctacaagttcatcaagcccatcctggagaagatggacggcaccgaggagctgctggtgaagctgaaccgggaggacctgctgcggaagcagcggaccttcgacaacggctccatcccccaccagatccacctgggcgagctgcacgccatcctgcggcggcaggaggacttctaccccttcctgaaggacaaccgggagaagatcgagaagatcctgaccttccggatcccctactacgtgggccccctggcccggggcaactcccggttcgcctggatgacccggaagtccgaggagaccatcaccccctggaacttcgaggaggtggtggacaagggcgcctccgcccagtccttcatcgagcggatgaccaacttcgacaagaacctgcccaacgagaaggtgctgcccaagcactccctgctgtacgagtacttcaccgtgtacaacgagctgaccaaggtgaagtacgtgaccgagggcatgcggaagcccgccttcctgtccggcgagcagaagaaggccatcgtggacctgctgttcaagaccaaccggaaggtgaccgtgaagcagctgaaggaggactacttcaagaagatcgagtgcttcgactccgtggagatctccggcgtggaggaccggttcaacgcctccctgggcacctaccacgacctgctgaagatcatcaaggacaaggacttcctggacaacgaggagaacgaggacatcctggaggacatcgtgctgaccctgaccctgttcgaggaccgggagatgatcgaggagcggctgaagacctacgcccacctgttcgacgacaaggtgatgaagcagctgaagcggcggcggtacaccggctggggccggctgtcccggaagctgatcaacggcatccgggacaagcagtccggcaagaccatcctggacttcctgaagtccgacggcttcgccaaccggaacttcatgcagctgatccacgacgactccctgaccttcaaggaggacatccagaaggcccaggtgtccggccagggcgactccctgcacgagcacatcgccaacctggccggctcccccgccatcaagaagggcatcctgcagaccgtgaaggtggtggacgagctggtgaaggtgatgggccggcacaagcccgagaacatcgtgatcgagatggcccgggagaaccagaccacccagaagggccagaagaactcccgggagcggatgaagcggatcgaggagggcatcaaggagctgggctcccagatcctgaaggagcaccccgtggagaacacccagctgcagaacgagaagctgtacctgtactacctgcagaacggccgggacatgtacgtggaccaggagctggacatcaaccggctgtccgactacgacgtggacgccatcgtgccccagtccttcctgaaggacgactccatcgacaacaaggtgctgacccggtccgacaagaaccggggcaagtccgacaacgtgccctccgaggaggtggtgaagaagatgaagaactactggcggcagctgctgaacgccaagctgatcacccagcggaagttcgacaacctgaccaaggccgagcggggcggcctgtccgagctggacaaggccggcttcatcaagcggcagctggtggagacccggcagatcaccaagcacgtggcccagatcctggactcccggatgaacaccaagtacgacgagaacgacaagctgatccgggaggtgaaggtgatcaccctgaagtccaagctggtgtccgacttccggaaggacttccagttctacaaggtgcgggagatcaacaactaccaccacgcccacgacgcctacctgaacgccgtggtgggcaccgccctgatcaagaagtaccccaagctggagtccgagttcgtgtacggcgactacaaggtgtacgacgtgcggaagatgatcgccaagtccgagcaggagatcggcaaggccaccgccaagtacttcttctactccaacatcatgaacttcttcaagaccgagatcaccctggccaacggcgagatccggaagcggcccctgatcgagaccaacggcgagaccggcgagatcgtgtgggacaagggccgggacttcgccaccgtgcggaaggtgctgtccatgccccaggtgaacatcgtgaagaagaccgaggtgcagaccggcggcttctccaaggagtccatcctgcccaagcggaactccgacaagctgatcgcccggaagaaggactgggaccccaagaagtacggcggcttcgactcccccaccgtggcctactccgtgctggtggtggccaaggtggagaagggcaagtccaagaagctgaagtccgtgaaggagctgctgggcatcaccatcatggagcggtcctccttcgagaagaaccccatcgacttcctggaggccaagggctacaaggaggtgaagaaggacctgatcatcaagctgcccaagtactccctgttcgagctggagaacggccggaagcggatgctggcctccgccggcgagctgcagaagggcaacgagctggccctgccctccaagtacgtgaacttcctgtacctggcctcccactacgagaagctgaagggctcccccgaggacaacgagcagaagcagctgttcgtggagcagcacaagcactacctggacgagatcatcgagcagatctccgagttctccaagcgggtgatcctggccgacgccaacctggacaaggtgctgtccgcctacaacaagcaccgggacaagcccatccgggagcaggccgagaacatcatccacctgttcaccctgaccaacctgggcgcccccgccgccttcaagtacttcgacaccaccatcgaccggaagcggtacacctccaccaaggaggtgctggacgccaccctgatccaccagtccatcaccggcctgtacgagacccggatcgacctgtcccagctgggcggcgacggcgcccccgagtccgccaccgagtccggcggcacctccaccgagtccgagggctccgccggccccaagaagaagcggaaggtgacctccaccgagtccgagggctccgccggctccgccggctccacctccggctcctcctccggcatgaagatcgccgtggtggacaaggccctgaacaacacccggtacgacaagcacttccagctgtacggcgaggaggtggacgtgttccacatgtgcaacgagaagctgtccggccggctgctgaagaagcacatcaccatcggcacccccgagaaccccttcgaccccaacgactacgacttcgtgatcctggtgggcgccgagcccttcctgtacttcgccggcaagaagggcatcggcgactacaccggcaagcgggtggagtacaacggctacgccaactggatcgcctccatctcccccgcccagctgcacttcaagcccgagatgaagcccgtgttcgacgccaccgtggagaacatccacgacatcatcaacggccgggagaagatcgccaaggccggcgactaccggcccatcaccgaccccgacgaggccgaggagtacatcaagatggtgtacaacatggtgatcggccccgtggccttcgcctccgccacctccgccctgtactgccgggacggctacctgctgggcgtgtccatctcccaccaggagtaccagggcgtgtacatcgactccgactgcctgaccgaggtggccgtgtactacctgcagaagatcctggactccgagaaccacaccatcgtgttccacaacctgaagttcgacatgcacttctacaagtaccacctgggcctgaccttcgacaaggcccacaaggagcggcggctgcacgacaccatgctgcagcactacgtgctggacgagcggcggggcacccacggcctgaagtccctggccatgaagtacaccgacatgggcgactacgacttcgagctggacaagttcaaggacgactactgcaaggcccacaagatcaagaaggaggacttcacctacgacctgatccccttcgacatcatgtggccctacgccgccaaggacaccgacgccaccatccggctgcacaacttcttcctgcccaagatcgagaagaacgagaagctgtgctccctgtactacgacgtgctgatgcccggctgcgtgttcctgcagcgggtggaggaccggggcgtgcccatctccatcgaccggctgaaggaggcccagtaccagctgacccacaacctgaacaaggcccgggagaagctgtacacctaccccgaggtgaagcagctggagcaggaccagaacgaggccttcaaccccaactccgtgaagcagctgcgggtgctgctgttcgactacgtgggcctgacccccaccggcaagctgaccgacaccggcgccgactccaccgacgccgaggccctgaacgagctggccacccagcaccccatcgccaagaccctgctggagatccggaagctgaccaagctgatctccacctacgtggagaagatcctgctgtccatcgacgccgacggctgcatccggaccggcttccacgagcacatgaccacctccggccggctgtcctcctccggcaagctgaacctgcagcagctgccccgggacgagtccatcatcaagggctgcgtggtggccccccccggctaccgggtgatcgcctgggacctgaccaccgccgaggtgtactacgccgccgtgctgtccggcgaccggaacatgcagcaggtgttcatcaacatgcggaacgagcccgacaagtaccccgacttccactccaacatcgcccacatggtgttcaagctgcagtgcgagccccgggacgtgaagaagctgttccccgccctgcggcaggccgccaaggccatcaccttcggcatcctgtacggctccggccccgccaaggtggcccactccgtgaacgaggccctgctggagcaggccgccaagaccggcgagcccttcgtggagtgcaccgtggccgacgccaaggagtacatcgagacctacttcggccagttcccccagctgaagcggtggatcgacaagtgccacgaccagatcaagaaccacggcttcatctactcccacttcggccggaagcggcggctgcacaacatccactccgaggaccggggcgtgcagggcgaggagatccggtccggcttcaacgccatcatccagtccgcctcctccgactccctgctgctgggcgccgtggacgccgacaacgagatcatctccctgggcctggagcaggagatgaagatcgtgatgctggtgcacgactccgtggtggccatcgtgcgggaggacctgatcgaccagtacaacgagatcctgatccggaacatccagaaggaccggggcatctccatccccggctgccccatcggcatcgactccgactccgaggccggcggctcccgggactactcctgcggcaagatgaagaagcagcacccctccatcgcctgcatcgacgacgacgagtacacccggtacgtgaagggcgtgctgctggacgccgagttcgagtacaagaagctggccgccatggacaaggagcaccccgaccactccaagtacaaggacgacaagttcatcgccgtgtgcaaggacctggacaacgtgaagcggatcctgggcgccggcggcggctccggcaagcggaccgccgacggctccggcggcggctccaagcggcccgccgccaccaagaaggccggccaggccaagaagaagaagcctgccgctaagagagtgaagctggactccgagtccgccacccccgagtccgtgtccggctggcggctgttcaagaagatctcctagctagcaccagcctcaagaacacccgaatggagtctctaagctacataataccaacttacactttacaaaatgttgtcccccaaaatgtagccattcgtatctgctcctaataaaaagaaagtttcttcacattctctcgagaaaaaaaaaaaatggaaaaaaaaaaaacggaaaaaaaaaaaaggtaaaaaaaaaaaatataaaaaaaaaaaacataaaaaaaaaaaacgaaaaaaaaaaaacgtaaaaaaaaaaaactcaaaaaaaaaaaagataaaaaaaaaaaacctaaaaaaaaaaaatgtaaaaaaaaaaaagggaaaaaaaaaaaacgcaaaaaaaaaaaacacaaaaaaaaaaaatgcaaaaaaaaaaaatcgaaaaaaaaaaaatctaaaaaaaaaaaacgaaaaaaaaaaaacccaaaaaaaaaaaagacaaaaaaaaaaaatagaaaaaaaaaaagttaaaaaaaaaaaactgaaaaaaaaaaaatttaaaaaaaaaaaatctag

SEQ ID NO: 1223 - RNA, 6960 nt, synthetic construct
  misc_feature 1..6960: note = Synthetic
  source 1..6960: mol_type = other RNA
atgcccaagaagaagcggaaggtggacaagaagtactccatcggcctggacatcggcaccaactccgtgggctgggccgtgatcaccgacgagtacaaggtgccctccaagaagttcaaggtgctgggcaacaccgaccggcactccatcaagaagaacctgatcggcgccctgctgttcgactccggcgagaccgccgaggccacccggctgaagcggaccgcccggcggcggtacacccggcggaagaaccggatctgctacctgcaggagatcttctccaacgagatggccaaggtggacgactccttcttccaccggctggaggagtccttcctggtggaggaggacaagaagcacgagcggcaccccatcttcggcaacatcgtggacgaggtggcctaccacgagaagtaccccaccatctaccacctgcggaagaagctggtggactccaccgacaaggccgacctgcggctgatctacctggccctggcccacatgatcaagttccggggccacttcctgatcgagggcgacctgaaccccgacaactccgacgtggacaagctgttcatccagctggtgcagacctacaaccagctgttcgaggagaaccccatcaacgcctccggcgtggacgccaaggccatcctgtccgcccggctgtccaagtcccggcggctggagaacctgatcgcccagctgcccggcgagaagaagaacggcctgttcggcaacctgatcgccctgtccctgggcctgacccccaacttcaagtccaacttcgacctggccgaggacgccaagctgcagctgtccaaggacacctacgacgacgacctggacaacctgctggcccagatcggcgaccagtacgccgacctgttcctggccgccaagaacctgtccgacgccatcctgctgtccgacatcctgcgggtgaacaccgagatcaccaaggcccccctgtccgcctccatgatcaagcggtacgacgagcaccaccaggacctgaccctgctgaaggccctggtgcggcagcagctgcccgagaagtacaaggagatcttcttcgaccagtccaagaacggctacgccggctacatcgacggcggcgcctcccaggaggagttctacaagttcatcaagcccatcctggagaagatggacggcaccgaggagctgctggtgaagctgaaccgggaggacctgctgcggaagcagcggaccttcgacaacggctccatcccccaccagatccacctgggcgagctgcacgccatcctgcggcggcaggaggacttctaccccttcctgaaggacaaccgggagaagatcgagaagatcctgaccttccggatcccctactacgtgggccccctggcccggggcaactcccggttcgcctggatgacccggaagtccgaggagaccatcaccccctggaacttcgaggaggtggtggacaagggcgcctccgcccagtccttcatcgagcggatgaccaacttcgacaagaacctgcccaacgagaaggtgctgcccaagcactccctgctgtacgagtacttcaccgtgtacaacgagctgaccaaggtgaagtacgtgaccgagggcatgcggaagcccgccttcctgtccggcgagcagaagaaggccatcgtggacctgctgttcaagaccaaccggaaggtgaccgtgaagcagctgaaggaggactacttcaagaagatcgagtgcttcgactccgtggagatctccggcgtggaggaccggttcaacgcctccctgggcacctaccacgacctgctgaagatcatcaaggacaaggacttcctggacaacgaggagaacgaggacatcctggaggacatcgtgctgaccctgaccctgttcgaggaccgggagatgatcgaggagcggctgaagacctacgcccacctgttcgacgacaaggtgatgaagcagctgaagcggcggcggtacaccggctggggccggctgtcccggaagctgatcaacggcatccgggacaagcagtccggcaagaccatcctggacttcctgaagtccgacggcttcgccaaccggaacttcatgcagctgatccacgacgactccctgaccttcaaggaggacatccagaaggcccaggtgtccggccagggcgactccctgcacgagcacatcgccaacctggccggctcccccgccatcaagaagggcatcctgcagaccgtgaaggtggtggacgagctggtgaaggtgatgggccggcacaagcccgagaacatcgtgatcgagatggcccgggagaaccagaccacccagaagggccagaagaactcccgggagcggatgaagcggatcgaggagggcatcaaggagctgggctcccagatcctgaaggagcaccccgtggagaacacccagctgcagaacgagaagctgtacctgtactacctgcagaacggccgggacatgtacgtggaccaggagctggacatcaaccggctgtccgactacgacgtggacgccatcgtgccccagtccttcctgaaggacgactccatcgacaacaaggtgctgacccggtccgacaagaaccggggcaagtccgacaacgtgccctccgaggaggtggtgaagaagatgaagaactactggcggcagctgctgaacgccaagctgatcacccagcggaagttcgacaacctgaccaaggccgagcggggcggcctgtccgagctggacaaggccggcttcatcaagcggcagctggtggagacccggcagatcaccaagcacgtggcccagatcctggactcccggatgaacaccaagtacgacgagaacgacaagctgatccgggaggtgaaggtgatcaccctgaagtccaagctggtgtccgacttccggaaggacttccagttctacaaggtgcgggagatcaacaactaccaccacgcccacgacgcctacctgaacgccgtggtgggcaccgccctgatcaagaagtaccccaagctggagtccgagttcgtgtacggcgactacaaggtgtacgacgtgcggaagatgatcgccaagtccgagcaggagatcggcaaggccaccgccaagtacttcttctactccaacatcatgaacttcttcaagaccgagatcaccctggccaacggcgagatccggaagcggcccctgatcgagaccaacggcgagaccggcgagatcgtgtgggacaagggccgggacttcgccaccgtgcggaaggtgctgtccatgccccaggtgaacatcgtgaagaagaccgaggtgcagaccggcggcttctccaaggagtccatcctgcccaagcggaactccgacaagctgatcgcccggaagaaggactgggaccccaagaagtacggcggcttcgactcccccaccgtggcctactccgtgctggtggtggccaaggtggagaagggcaagtccaagaagctgaagtccgtgaaggagctgctgggcatcaccatcatggagcggtcctccttcgagaagaaccccatcgacttcctggaggccaagggctacaaggaggtgaagaaggacctgatcatcaagctgcccaagtactccctgttcgagctggagaacggccggaagcggatgctggcctccgccggcgagctgcagaagggcaacgagctggccctgccctccaagtacgtgaacttcctgtacctggcctcccactacgagaagctgaagggctcccccgaggacaacgagcagaagcagctgttcgtggagcagcacaagcactacctggacgagatcatcgagcagatctccgagttctccaagcgggtgatcctggccgacgccaacctggacaaggtgctgtccgcctacaacaagcaccgggacaagcccatccgggagcaggccgagaacatcatccacctgttcaccctgaccaacctgggcgcccccgccgccttcaagtacttcgacaccaccatcgaccggaagcggtacacctccaccaaggaggtgctggacgccaccctgatccaccagtccatcaccggcctgtacgagacccggatcgacctgtcccagctgggcggcgacggcgcccccgagtccgccaccgagtccggcggcacctccaccgagtccgagggctccgccggccccaagaagaagcggaaggtgacctccaccgagtccgagggctccgccggctccgccggctccacctccggctcctcctccggcatgaagatcgccgtggtggacaaggccctgaacaacacccggtacgacaagcacttccagctgtacggcgaggaggtggacgtgttccacatgtgcaacgagaagctgtccggccggctgctgaagaagcacatcaccatcggcacccccgagaaccccttcgaccccaacgactacgacttcgtgatcctggtgggcgccgagcccttcctgtacttcgccggcaagaagggcatcggcgactacaccggcaagcgggtggagtacaacggctacgccaactggatcgcctccatctcccccgcccagctgcacttcaagcccgagatgaagcccgtgttcgacgccaccgtggagaacatccacgacatcatcaacggccgggagaagatcgccaaggccggcgactaccggcccatcaccgaccccgacgaggccgaggagtacatcaagatggtgtacaacatggtgatcggccccgtggccttcgcctccgccacctccgccctgtactgccgggacggctacctgctgggcgtgtccatctcccaccaggagtaccagggcgtgtacatcgactccgactgcctgaccgaggtggccgtgtactacctgcagaagatcctggactccgagaaccacaccatcgtgttccacaacctgaagttcgacatgcacttctacaagtaccacctgggcctgaccttcgacaaggcccacaaggagcggcggctgcacgacaccatgctgcagcactacgtgctggacgagcggcggggcacccacggcctgaagtccctggccatgaagtacaccgacatgggcgactacgacttcgagctggacaagttcaaggacgactactgcaaggcccacaagatcaagaaggaggacttcacctacgacctgatccccttcgacatcatgtggccctacgccgccaaggacaccgacgccaccatccggctgcacaacttcttcctgcccaagatcgagaagaacgagaagctgtgctccctgtactacgacgtgctgatgcccggctgcgtgttcctgcagcgggtggaggaccggggcgtgcccatctccatcgaccggctgaaggaggcccagtaccagctgacccacaacctgaacaaggcccgggagaagctgtacacctaccccgaggtgaagcagctggagcaggaccagaacgaggccttcaaccccaactccgtgaagcagctgcgggtgctgctgttcgactacgtgggcctgacccccaccggcaagctgaccgacaccggcgccgactccaccgacgccgaggccctgaacgagctggccacccagcaccccatcgccaagaccctgctggagatccggaagctgaccaagctgatctccacctacgtggagaagatcctgctgtccatcgacgccgacggctgcatccggaccggcttccacgagcacatgaccacctccggccggctgtcctcctccggcaagctgaacctgcagcagctgccccgggacgagtccatcatcaagggctgcgtggtggccccccccggctaccgggtgatcgcctgggacctgaccaccgccgaggtgtactacgccgccgtgctgtccggcgaccggaacatgcagcaggtgttcatcaacatgcggaacgagcccgacaagtaccccgacttccactccaacatcgcccacatggtgttcaagctgcagtgcgagccccgggacgtgaagaagctgttccccgccctgcggcaggccgccaaggccatcaccttcggcatcctgtacggctccggccccgccaaggtggcccactccgtgaacgaggccctgctggagcaggccgccaagaccggcgagcccttcgtggagtgcaccgtggccgacgccaaggagtacatcgagacctacttcggccagttcccccagctgaagcggtggatcgacaagtgccacgaccagatcaagaaccacggcttcatctactcccacttcggccggaagcggcggctgcacaacatccactccgaggaccggggcgtgcagggcgaggagatccggtccggcttcaacgccatcatccagtccgcctcctccgactccctgctgctgggcgccgtggacgccgacaacgagatcatctccctgggcctggagcaggagatgaagatcgtgatgctggtgcacgactccgtggtggccatcgtgcgggaggacctgatcgaccagtacaacgagatcctgatccggaacatccagaaggaccggggcatctccatccccggctgccccatcggcatcgactccgactccgaggccggcggctcccgggactactcctgcggcaagatgaagaagcagcacccctccatcgcctgcatcgacgacgacgagtacacccggtacgtgaagggcgtgctgctggacgccgagttcgagtacaagaagctggccgccatggacaaggagcaccccgaccactccaagtacaaggacgacaagttcatcgccgtgtgcaaggacctggacaacgtgaagcggatcctgggcgccggcggcggctccggcaagcggaccgccgacggctccggcggcggctccaagcggcccgccgccaccaagaaggccggccaggccaagaagaagaagcctgccgctaagagagtgaagctggac

SEQ ID NO: 1224 - protein, 2320 aa, synthetic construct
  REGION 1..2320: note = Synthetic
MPKKKRKVDKKYSIGLDIGTNSVGWAVITDEYKVPSKKFKVLGNTDRHSIKKNLIGALLFDSGETAEATRLKRTARRRYTRRKNRICYLQEIFSNEMAKVDDSFFHRLEESFLVEEDKKHERHPIFGNIVDEVAYHEKYPTIYHLRKKLVDSTDKADLRLIYLALAHMIKFRGHFLIEGDLNPDNSDVDKLFIQLVQTYNQLFEENPINASGVDAKAILSARLSKSRRLENLIAQLPGEKKNGLFGNLIALSLGLTPNFKSNFDLAEDAKLQLSKDTYDDDLDNLLAQIGDQYADLFLAAKNLSDAILLSDILRVNTEITKAPLSASMIKRYDEHHQDLTLLKALVRQQLPEKYKEIFFDQSKNGYAGYIDGGASQEEFYKFIKPILEKMDGTEELLVKLNREDLLRKQRTFDNGSIPHQIHLGELHAILRRQEDFYPFLKDNREKIEKILTFRIPYYVGPLARGNSRFAWMTRKSEETITPWNFEEVVDKGASAQSFIERMTNFDKNLPNEKVLPKHSLLYEYFTVYNELTKVKYVTEGMRKPAFLSGEQKKAIVDLLFKTNRKVTVKQLKEDYFKKIECFDSVEISGVEDRFNASLGTYHDLLKIIKDKDFLDNEENEDILEDIVLTLTLFEDREMIEERLKTYAHLFDDKVMKQLKRRRYTGWGRLSRKLINGIRDKQSGKTILDFLKSDGFANRNFMQLIHDDSLTFKEDIQKAQVSGQGDSLHEHIANLAGSPAIKKGILQTVKVVDELVKVMGRHKPENIVIEMARENQTTQKGQKNSRERMKRIEEGIKELGSQILKEHPVENTQLQNEKLYLYYLQNGRDMYVDQELDINRLSDYDVDAIVPQSFLKDDSIDNKVLTRSDKNRGKSDNVPSEEVVKKMKNYWRQLLNAKLITQRKFDNLTKAERGGLSELDKAGFIKRQLVETRQITKHVAQILDSRMNTKYDENDKLIREVKVITLKSKLVSDFRKDFQFYKVREINNYHHAHDAYLNAVVGTALIKKYPKLESEFVYGDYKVYDVRKMIAKSEQEIGKATAKYFFYSNIMNFFKTEITLANGEIRKRPLIETNGETGEIVWDKGRDFATVRKVLSMPQVNIVKKTEVQTGGFSKESILPKRNSDKLIARKKDWDPKKYGGFDSPTVAYSVLVVAKVEKGKSKKLKSVKELLGITIMERSSFEKNPIDFLEAKGYKEVKKDLIIKLPKYSLFELENGRKRMLASAGELQKGNELALPSKYVNFLYLASHYEKLKGSPEDNEQKQLFVEQHKHYLDEIIEQISEFSKRVILADANLDKVLSAYNKHRDKPIREQAENIIHLFTLTNLGAPAAFKYFDTTIDRKRYTSTKEVLDATLIHQSITGLYETRIDLSQLGGDGAPESATESGGTSTESEGSAGPKKKRKVTSTESEGSAGSAGSTSGSSSGMKIAVVDKALNNTRYDKHFQLYGEEVDVFHMCNEKLSGRLLKKHITIGTPENPFDPNDYDFVILVGAEPFLYFAGKKGIGDYTGKRVEYNGYANWIASISPAQLHFKPEMKPVFDATVENIHDIINGREKIAKAGDYRPITDPDEAEEYIKMVYNMVIGPVAFASATSALYCRDGYLLGVSISHQEYQGVYIDSDCLTEVAVYYLQKILDSENHTIVFHNLKFDMHFYKYHLGLTFDKAHKERRLHDTMLQHYVLDERRGTHGLKSLAMKYTDMGDYDFELDKFKDDYCKAHKIKKEDFTYDLIPFDIMWPYAAKDTDATIRLHNFFLPKIEKNEKLCSLYYDVLMPGCVFLQRVEDRGVPISIDRLKEAQYQLTHNLNKAREKLYTYPEVKQLEQDQNEAFNPNSVKQLRVLLFDYVGLTPTGKLTDTGADSTDAEALNELATQHPIAKTLLEIRKLTKLISTYVEKILLSIDADGCIRTGFHEHMTTSGRLSSSGKLNLQQLPRDESIIKGCVVAPPGYRVIAWDLTTAEVYYAAVLSGDRNMQQVFINMRNEPDKYPDFHSNIAHMVFKLQCEPRDVKKLFPALRQAAKAITFGILYGSGPAKVAHSVNEALLEQAAKTGEPFVECTVADAKEYIETYFGQFPQLKRWIDKCHDQIKNHGFIYSHFGRKRRLHNIHSEDRGVQGEEIRSGFNAIIQSASSDSLLLGAVDADNEIISLGLEQEMKIVMLVHDSVVAIVREDLIDQYNEILIRNIQKDRGISIPGCPIGIDSDSEAGGSRDYSCGKMKKQHPSIACIDDDEYTRYVKGVLLDAEFEYKKLAAMDKEHPDHSKYKDDKFIAVCKDLDNVKRILGAGGGSGKRTADGSGGGSKRPAATKKAGQAKKKKPAAKRVKLD

SEQ ID NO: 1225 - RNA, 5967 nt, synthetic construct; identical to SEQ ID NO: 1199
  misc_feature 1..5967: note = Synthetic
  source 1..5967: mol_type = other RNA

SEQ ID NO: 1226 - protein, 1988 aa, synthetic construct; identical to SEQ ID NO: 1200
  REGION 1..1988: note = Synthetic

SEQ ID NO: 1227 - RNA, 6526 nt, synthetic construct
  misc_feature 1..6526: note = Synthetic
  source 1..6526: mol_type = other RNA
gggaagctcagaataaacgctcaactttggccggatctgccaccatgaagcggaccgccgacggctccgagttcgagtcccccaagaagaagcggaaggtggacaagaagtactccatcggcctggacatcggcaccaactccgtgggctgggccgtgatcaccgacgagtacaaggtgccctccaagaagttcaaggtgctgggcaacaccgaccggcactccatcaagaagaacctgatcggcgccctgctgttcgactccggcgagaccgccgaggccacccggctgaagcggaccgcccggcggcggtacacccggcggaagaaccggatctgctacctgcaggagatcttctccaacgagatggccaaggtggacgactccttcttccaccggctggaggagtccttcctggtggaggaggacaagaagcacgagcggcaccccatcttcggcaacatcgtggacgaggtggcctaccacgagaagtaccccaccatctaccacctgcggaagaagctggtggactccaccgacaaggccgacctgcggctgatctacctggccctggcccacatgatcaagttccggggccacttcctgatcgagggcgacctgaaccccgacaactccgacgtggacaagctgttcatccagctggtgcagacctacaaccagctgttcgaggagaaccccatcaacgcctccggcgtggacgccaaggccatcctgtccgcccggctgtccaagtcccggcggctggagaacctgatcgcccagctgcccggcgagaagaagaacggcctgttcggcaacctgatcgccctgtccctgggcctgacccccaacttcaagtccaacttcgacctggccgaggacgccaagctgcagctgtccaaggacacctacgacgacgacctggacaacctgctggcccagatcggcgaccagtacgccgacctgttcctggccgccaagaacctgtccgacgccatcctgctgtccgacatcctgcgggtgaacaccgagatcaccaaggcccccctgtccgcctccatgatcaagcggtacgacgagcaccaccaggacctgaccctgctgaaggccctggtgcggcagcagctgcccgagaagtacaaggagatcttcttcgaccagtccaagaacggctacgccggctacatcgacggcggcgcctcccaggaggagttctacaagttcatcaagcccatcctggagaagatggacggcaccgaggagctgctggtgaagctgaaccgggaggacctgctgcggaagcagcggaccttcgacaacggctccatcccccaccagatccacctgggcgagctgcacgccatcctgcggcggcaggaggacttctaccccttcctgaaggacaaccgggagaagatcgagaagatcctgaccttccggatcccctactacgtgggccccctggcccggggcaactcccggttcgcctggatgacccggaagtccgaggagaccatcaccccctggaacttcgaggaggtggtggacaagggcgcctccgcccagtccttcatcgagcggatgaccaacttcgacaagaacctgcccaacgagaaggtgctgcccaagcactccctgctgtacgagtacttcaccgtgtacaacgagctgaccaaggtgaagtacgtgaccgagggcatgcggaagcccgccttcctgtccggcgagcagaagaaggccatcgtggacctgctgttcaagaccaaccggaaggtgaccgtgaagcagctgaaggaggactacttcaagaagatcgagtgcttcgactccgtggagatctccggcgtggaggaccggttcaacgcctccctgggcacctaccacgacctgctgaagatcatcaaggacaaggacttcctggacaacgaggagaacgaggacatcctggaggacatcgtgctgaccctgaccctgttcgaggaccgggagatgatcgaggagcggctgaagacctacgcccacctgttcgacgacaaggtgatgaagcagctgaagcggcggcggtacaccggctggggccggctgtcccggaagctgatcaacggcatccgggacaagcagtccggcaagaccatcctggacttcctgaagtccgacggcttcgccaaccggaacttcatgcagctgatccacgacgactccctgaccttcaaggaggacatccagaaggcccaggtgtccggccagggcgactccctgcacgagcacatcgccaacctggccggctcccccgccatcaagaagggcatcctgcagaccgtgaaggtggtggacgagctggtgaaggtgatgggccggcacaagcccgagaacatcgtgatcgagatggcccgggagaaccagaccacccagaagggccagaagaactcccgggagcggatgaagcggatcgaggagggcatcaaggagctgggctcccagatcctgaaggagcaccccgtggagaacacccagctgcagaacgagaagctgtacctgtactacctgcagaacggccgggacatgtacgtggaccaggagctggacatcaaccggctgtccgactacgacgtggacgccatcgtgccccagtccttcctgaaggacgactccatcgacaacaaggtgctgacccggtccgacaagaaccggggcaagtccgacaacgtgccctccgaggaggtggtgaagaagatgaagaactactggcggcagctgctgaacgccaagctgatcacccagcggaagttcgacaacctgaccaaggccgagcggggcggcctgtccgagctggacaaggccggcttcatcaagcggcagctggtggagacccggcagatcaccaagcacgtggcccagatcctggactcccggatgaacaccaagtacgacgagaacgacaagctgatccgggaggtgaaggtgatcaccctgaagtccaagctggtgtccgacttccggaaggacttccagttctacaaggtgcgggagatcaacaactaccaccacgcccacgacgcctacctgaacgccgtggtgggcaccgccctgatcaagaagtaccccaagctggagtccgagttcgtgtacggcgactacaaggtgtacgacgtgcggaagatgatcgccaagtccgagcaggagatcggcaaggccaccgccaagtacttcttctactccaacatcatgaacttcttcaagaccgagatcaccctggccaacggcgagatccggaagcggcccctgatcgagaccaacggcgagaccggcgagatcgtgtgggacaagggccgggacttcgccaccgtgcggaaggtgctgtccatgccccaggtgaacatcgtgaagaagaccgaggtgcagaccggcggcttctccaaggagtccatcctgcccaagcggaactccgacaagctgatcgcccggaagaaggactgggaccccaagaagtacggcggcttcgactcccccaccgtggcctactccgtgctggtggtggccaaggtggagaagggcaagtccaagaagctgaagtccgtgaaggagctgctgggcatcaccatcatggagcggtcctccttcgagaagaaccccatcgacttcctggaggccaagggctacaaggaggtgaagaaggacctgatcatcaagctgcccaagtactccctgttcgagctggagaacggccggaagcggatgctggcctccgccggcgagctgcagaagggcaacgagctggccctgccctccaagtacgtgaacttcctgtacctggcctcccactacgagaagctgaagggctcccccgaggacaacgagcagaagcagctgttcgtggagcagcacaagcactacctggacgagatcatcgagcagatctccgagttctccaagcgggtgatcctggccgacgccaacctggacaaggtgctgtccgcctacaacaagcaccgggacaagcccatccgggagcaggccgagaacatcatccacctgttcaccctgaccaacctgggcgcccccgccgccttcaagtacttcgacaccaccatcgaccggaagcggtacacctccaccaaggaggtgctggacgccaccctgatccaccagtccatcaccggcctgtacgagacccggatcgacctgtcccagctgggcggcgactccggcggctcctccggcggctccaagcggaccgccgacggctccgagttcgagtcccccaagaagaagcggaaggtgtccggcggctcctccggcggctccatggactccaccaaggagaagtgcgactcctacaaggacgacctgctgctgcggatgggcctgaacgacaacaaggccggcatggagggcctggacaaggagaagatcaacaagatcatcatggaggccaccaagggctcccggttctacggcaacgagctgaagaaggagaagcaggtgaaccagcggatcgagaacatgatgcagcagaaggcccagatcacctcccagcagctgcggaaggcccagctgcaggtggaccggttcgccatggagctggagcagtcccggaacctgtccaacaccatcgtgcacatcgacatggacgccttctacgccgccgtggagatgcgggacaaccccgagctgaaggacaagcccatcgccgtgggctccatgtccatgctgtccacctccaactaccacgcccggcggttcggcgtgcgggccgccatgcccggcttcatcgccaagcggctgtgcccccagctgatcatcgtgccccccaacttcgacaagtaccgggccgtgtccaaggaggtgaaggagatcctggccgactacgaccccaacttcatggccatgtccctggacgaggcctacctgaacatcaccaagcacctggaggagcggcagaactggcccgaggacaagcggcggtacttcatcaagatgggctcctccgtggagaacgacaaccccggcaaggaggtgaacaagctgtccgagcacgagcggtccatctcccccctgctgttcgaggagtccccctccgacgtgcagccccccggcgaccccttccaggtgaacttcgaggagcagaacaacccccagatcctgcagaactccgtggtgttcggcacctccgcccaggaggtggtgaaggagatccggttccggatcgagcagaagaccaccctgaccgcctccgccggcatcgcccccaacaccatgctggccaaggtgtgctccgacaagaacaagcccaacggccagtaccagatcctgcccaaccggcaggccgtgatggacttcatcaaggacctgcccatccggaaggtgtccggcatcggcaaggtgaccgagaagatgctgaaggccctgggcatcatcacctgcaccgagctgtaccagcagcgggccctgctgtccctgctgttctccgagacctcctggcactacttcctgcacatctccctgggcctgggctccacccacctgacccgggacggcgagcggaagtccatgtccgtggagcggaccttctccgagatcaacaaggccgaggagcagtactccctgtgccaggagctgtgctccgagctggcccaggacctgcagaaggagcggctgaagggccggaccgtgaccatcaagctgaagaacgtgaacttcgaggtgaagacccgggcctccaccgtgtcctccgtggtgtccaccgccgaggagatcttcgccatcgccaaggagctgctgaagaccgagatcgacgccgacttcccccaccccctgcggctgcggctgatgggcgtgcggatctcctccttccccaacgaggaggaccggaagcaccagcagggcggcggctccggcaagcggaccgccgacggctccggcggcggctcccccaagaagaagcggaaggtgtccgagtccgccacccccgagtccgtgtccggctggcggctgttcaagaagatctcctagctagcaccagcctcaagaacacccgaatggagtctctaagctacataataccaacttacactttacaaaatgttgtcccccaaaatgtagccattcgtatctgctcctaataaaaagaaagtttcttcacattctctcgagaaaaaaaaaaaatggaaaaaaaaaaaacggaaaaaaaaaaaaggtaaaaaaaaaaaatataaaaaaaaaaaacataaaaaaaaaaaacgaaaaaaaaaaaacgtaaaaaaaaaaaactcaaaaaaaaaaaagataaaaaaaaaaaacctaaaaaaaaaaaatgtaaaaaaaaaaaagggaaaaaaaaaaaacgcaaaaaaaaaaaacacaaaaaaaaaaaatgcaaaaaaaaaaaatcgaaaaaaaaaaaatctaaaaaaaaaaaacgaaaaaaaaaaaacccaaaaaaaaaaaagacaaaaaaaaaaaatagaaaaaaaaaaagttaaaaaaaaaaaactgaaaaaaaaaaaatttaaaaaaaaaaaatctag

SEQ ID NO: 1228 - RNA, 5907 nt, synthetic construct
  misc_feature 1..5907: note = Synthetic
  source 1..5907: mol_type = other RNA
atgaagcggaccgccgacggctccgagttcgagtcccccaagaagaagcggaaggtggacaagaagtactccatcggcctggacatcggcaccaactccgtgggctgggccgtgatcaccgacgagtacaaggtgccctccaagaagttcaaggtgctgggcaacaccgaccggcactccatcaagaagaacctgatcggcgccctgctgttcgactccggcgagaccgccgaggccacccggctgaagcggaccgcccggcggcggtacacccggcggaagaaccggatctgctacctgcaggagatcttctccaacgagatggccaaggtggacgactccttcttccaccggctggaggagtccttcctggtggaggaggacaagaagcacgagcggcaccccatcttcggcaacatcgtggacgaggtggcctaccacgagaagtaccccaccatctaccacctgcggaagaagctggtggactccaccgacaaggccgacctgcggctgatctacctggccctggcccacatgatcaagttccggggccacttcctgatcgagggcgacctgaaccccgacaactccgacgtggacaagctgttcatccagctggtgcagacctacaaccagctgttcgaggagaaccccatcaacgcctccggcgtggacgccaaggccatcctgtccgcccggctgtccaagtcccggcggctggagaacctgatcgcccagctgcccggcgagaagaagaacggcctgttcggcaacctgatcgccctgtccctgggcctgacccccaacttcaagtccaacttcgacctggccgaggacgccaagctgcagctgtccaaggacacctacgacgacgacctggacaacctgctggcccagatcggcgaccagtacgccgacctgttcctggccgccaagaacctgtccgacgccatcctgctgtccgacatcctgcgggtgaacaccgagatcaccaaggcccccctgtccgcctccatgatcaagcggtacgacgagcaccaccaggacctgaccctgctgaaggccctggtgcggcagcagctgcccgagaagtacaaggagatcttcttcgaccagtccaagaacggctacgccggctacatcgacggcggcgcctcccaggaggagttctacaagttcatcaagcccatcctggagaagatggacggcaccgaggagctgctggtgaagctgaaccgggaggacctgctgcggaagcagcggaccttcgacaacggctccatcccccaccagatccacctgggcgagctgcacgccatcctgcggcggcaggaggacttctaccccttcctgaaggacaaccgggagaagatcgagaagatcctgaccttccggatcccctactacgtgggccccctggcccggggcaactcccggttcgcctggatgacccggaagtccgaggagaccatcaccccctggaacttcgaggaggtggtggacaagggcgcctccgcccagtccttcatcgagcggatgaccaacttcgacaagaacctgcccaacgagaaggtgctgcccaagcactccctgctgtacgagtacttcaccgtgtacaacgagctgaccaaggtgaagtacgtgaccgagggcatgcggaagcccgccttcctgtccggcgagcagaagaaggccatcgtggacctgctgttcaagaccaaccggaaggtgaccgtgaagcagctgaaggaggactacttcaagaagatcgagtgcttcgactccgtggagatctccggcgtggaggaccggttcaacgcctccctgggcacctaccacgacctgctgaagatcatcaaggacaaggacttcctggacaacgaggagaacgaggacatcctggaggacatcgtgctgaccctgaccctgttcgaggaccgggagatgatcgaggagcggctgaagacctacgcccacctgttcgacgacaaggtgatgaagcagctgaagcggcggcggtacaccggctggggccggctgtcccggaagctgatcaacggcatccgggacaagcagtccggcaagaccatcctggacttcctgaagtccgacggcttcgccaaccggaacttcatgcagctgatccacgacgactccctgaccttcaaggaggacatccagaaggcccaggtgtccggccagggcgactccctgcacgagcacatcgccaacctggccggctcccccgccatcaagaagggcatcctgcagaccgtgaaggtggtggacgagctggtgaaggtgatgggccggcacaagcccgagaacatcgtgatcgagatggcccgggagaaccagaccacccagaagggccagaagaactcccgggagcggatgaagcggatcgaggagggcatcaaggagctgggctcccagatcctgaaggagcaccccgtggagaacacccagctgcagaacgagaagctgtacctgtactacctgcagaacggccgggacatgtacgtggaccaggagctggacatcaaccggctgtccgactacgacgtggacgccatcgtgccccagtccttcctgaaggacgactccatcgacaacaaggtgctgacccggtccgacaagaaccggggcaagtccgacaacgtgccctccgaggaggtggtgaagaagatgaagaactactggcggcagctgctgaacgccaagctgatcacccagcggaagttcgacaacctgaccaaggccgagcggggcggcctgtccgagctggacaaggccggcttcatcaagcggcagctggtggagacccggcagatcaccaagcacgtggcccagatcctggactcccggatgaacaccaagtacgacgagaacgacaagctgatccgggaggtgaaggtgatcaccctgaagtccaagctggtgtccgacttccggaaggacttccagttctacaaggtgcgggagatcaacaactaccaccacgcccacgacgcctacctgaacgccgtggtgggcaccgccctgatcaagaagtaccccaagctggagtccgagttcgtgtacggcgactacaaggtgtacgacgtgcggaagatgatcgccaagtccgagcaggagatcggcaaggccaccgccaagtacttcttctactccaacatcatgaacttcttcaagaccgagatcaccctggccaacggcgagatccggaagcggcccctgatcgagaccaacggcgagaccggcgagatcgtgtgggacaagggccgggacttcgccaccgtgcggaaggtgctgtccatgccccaggtgaacatcgtgaagaagaccgaggtgcagaccggcggcttctccaaggagtccatcctgcccaagcggaactccgacaagctgatcgcccggaagaaggactgggaccccaagaagtacggcggcttcgactcccccaccgtggcctactccgtgctggtggtggccaaggtggagaagggcaagtccaagaagctgaagtccgtgaaggagctgctgggcatcaccatcatggagcggtcctccttcgagaagaaccccatcgacttcctggaggccaagggctacaaggaggtgaagaaggacctgatcatcaagctgcccaagtactccctgttcgagctggagaacggccggaagcggatgctggcctccgccggcgagctgcagaagggcaacgagctggccctgccctccaagtacgtgaacttcctgtacctggcctcccactacgagaagctgaagggctcccccgaggacaacgagcagaagcagctgttcgtggagcagcacaagcactacctggacgagatcatcgagcagatctccgagttctccaagcgggtgatcctggccgacgccaacctggacaaggtgctgtccgcctacaacaagcaccgggacaagcccatccgggagcaggccgagaacatcatccacctgttcaccctgaccaacctgggcgcccccgccgccttcaagtacttcgacaccaccatcgaccggaagcggtacacctccaccaaggaggtgctggacgccaccctgatccaccagtccatcaccggcctgtacgagacccggatcgacctgtcccagctgggcggcgactccggcggctcctccggcggctccaagcggaccgccgacggctccgagttcgagtcccccaagaagaagcggaaggtgtccggcggctcctccggcggctccatggactccaccaaggagaagtgcgactcctacaaggacgacctgctgctgcggatgggcctgaacgacaacaaggccggcatggagggcctggacaaggagaagatcaacaagatcatcatggaggccaccaagggctcccggttctacggcaacgagctgaagaaggagaagcaggtgaaccagcggatcgagaacatgatgcagcagaaggcccagatcacctcccagcagctgcggaaggcccagctgcaggtggaccggttcgccatggagctggagcagtcccggaacctgtccaacaccatcgtgcacatcgacatggacgccttctacgccgccgtggagatgcgggacaaccccgagctgaaggacaagcccatcgccgtgggctccatgtccatgctgtccacctccaactaccacgcccggcggttcggcgtgcgggccgccatgcccggcttcatcgccaagcggctgtgcccccagctgatcatcgtgccccccaacttcgacaagtaccgggccgtgtccaaggaggtgaaggagatcctggccgactacgaccccaacttcatggccatgtccctggacgaggcctacctgaacatcaccaagcacctggaggagcggcagaactggcccgaggacaagcggcggtacttcatcaagatgggctcctccgtggagaacgacaaccccggcaaggaggtgaacaagctgtccgagcacgagcggtccatctcccccctgctgttcgaggagtccccctccgacgtgcagccccccggcgaccccttccaggtgaacttcgaggagcagaacaacccccagatcctgcagaactccgtggtgttcggcacctccgcccaggaggtggtgaaggagatccggttccggatcgagcagaagaccaccctgaccgcctccgccggcatcgcccccaacaccatgctggccaaggtgtgctccgacaagaacaagcccaacggccagtaccagatcctgcccaaccggcaggccgtgatggacttcatcaaggacctgcccatccggaaggtgtccggcatcggcaaggtgaccgagaagatgctgaaggccctgggcatcatcacctgcaccgagctgtaccagcagcgggccctgctgtccctgctgttctccgagacctcctggcactacttcctgcacatctccctgggcctgggctccacccacctgacccgggacggcgagcggaagtccatgtccgtggagcggaccttctccgagatcaacaaggccgaggagcagtactccctgtgccaggagctgtgctccgagctggcccaggacctgcagaaggagcggctgaagggccggaccgtgaccatcaagctgaagaacgtgaacttcgaggtgaagacccgggcctccaccgtgtcctccgtggtgtccaccgccgaggagatcttcgccatcgccaaggagctgctgaagaccgagatcgacgccgacttcccccaccccctgcggctgcggctgatgggcgtgcggatctcctccttccccaacgaggaggaccggaagcaccagcagggcggcggctccggcaagcggaccgccgacggctccggcggcggctcccccaagaagaagcggaaggtg

SEQ ID NO: 1229 - protein, 1969 aa, synthetic construct
  REGION 1..1969: note = Synthetic
MKRTADGSEFESPKKKRKVDKKYSIGLDIGTNSVGWAVITDEYKVPSKKFKVLGNTDRHSIKKNLIGALLFDSGETAEATRLKRTARRRYTRRKNRICYLQEIFSNEMAKVDDSFFHRLEESFLVEEDKKHERHPIFGNIVDEVAYHEKYPTIYHLRKKLVDSTDKADLRLIYLALAHMIKFRGHFLIEGDLNPDNSDVDKLFIQLVQTYNQLFEENPINASGVDAKAILSARLSKSRRLENLIAQLPGEKKNGLFGNLIALSLGLTPNFKSNFDLAEDAKLQLSKDTYDDDLDNLLAQIGDQYADLFLAAKNLSDAILLSDILRVNTEITKAPLSASMIKRYDEHHQDLTLLKALVRQQLPEKYKEIFFDQSKNGYAGYIDGGASQEEFYKFIKPILEKMDGTEELLVKLNREDLLRKQRTFDNGSIPHQIHLGELHAILRRQEDFYPFLKDNREKIEKILTFRIPYYVGPLARGNSRFAWMTRKSEETITPWNFEEVVDKGASAQSFIERMTNFDKNLPNEKVLPKHSLLYEYFTVYNELTKVKYVTEGMRKPAFLSGEQKKAIVDLLFKTNRKVTVKQLKEDYFKKIECFDSVEISGVEDRFNASLGTYHDLLKIIKDKDFLDNEENEDILEDIVLTLTLFEDREMIEERLKTYAHLFDDKVMKQLKRRRYTGWGRLSRKLINGIRDKQSGKTILDFLKSDGFANRNFMQLIHDDSLTFKEDIQKAQVSGQGDSLHEHIANLAGSPAIKKGILQTVKVVDELVKVMGRHKPENIVIEMARENQTTQKGQKNSRERMKRIEEGIKELGSQILKEHPVENTQLQNEKLYLYYLQNGRDMYVDQELDINRLSDYDVDAIVPQSFLKDDSIDNKVLTRSDKNRGKSDNVPSEEVVKKMKNYWRQLLNAKLITQRKFDNLTKAERGGLSELDKAGFIKRQLVETRQITKHVAQILDSRMNTKYDENDKLIREVKVITLKSKLVSDFRKDFQFYKVREINNYHHAHDAYLNAVVGTALIKKYPKLESEFVYGDYKVYDVRKMIAKSEQEIGKATAKYFFYSNIMNFFKTEITLANGEIRKRPLIETNGETGEIVWDKGRDFATVRKVLSMPQVNIVKKTEVQTGGFSKESILPKRNSDKLIARKKDWDPKKYGGFDSPTVAYSVLVVAKVEKGKSKKLKSVKELLGITIMERSSFEKNPIDFLEAKGYKEVKKDLIIKLPKYSLFELENGRKRMLASAGELQKGNELALPSKYVNFLYLASHYEKLKGSPEDNEQKQLFVEQHKHYLDEIIEQISEFSKRVILADANLDKVLSAYNKHRDKPIREQAENIIHLFTLTNLGAPAAFKYFDTTIDRKRYTSTKEVLDATLIHQSITGLYETRIDLSQLGGDSGGSSGGSKRTADGSEFESPKKKRKVSGGSSGGSMDSTKEKCDSYKDDLLLRMGLNDNKAGMEGLDKEKINKIIMEATKGSRFYGNELKKEKQVNQRIENMMQQKAQITSQQLRKAQLQVDRFAMELEQSRNLSNTIVHIDMDAFYAAVEMRDNPELKDKPIAVGSMSMLSTSNYHARRFGVRAAMPGFIAKRLCPQLIIVPPNFDKYRAVSKEVKEILADYDPNFMAMSLDEAYLNITKHLEERQNWPEDKRRYFIKMGSSVENDNPGKEVNKLSEHERSISPLLFEESPSDVQPPGDPFQVNFEEQNNPQILQNSVVFGTSAQEVVKEIRFRIEQKTTLTASAGIAPNTMLAKVCSDKNKPNGQYQILPNRQAVMDFIKDLPIRKVSGIGKVTEKMLKALGIITCTELYQQRALLSLLFSETSWHYFLHISLGLGSTHLTRDGERKSMSVERTFSEINKAEEQYSLCQELCSELAQDLQKERLKGRTVTIKLKNVNFEVKTRASTVSSVVSTAEEIFAIAKELLKTEIDADFPHPLRLRLMGVRISSFPNEEDRKHQQGGGSGKRTADGSGGGSPKKKRKV

SEQ ID NO: 1230 - RNA, 5967 nt, synthetic construct; identical to SEQ ID NO: 1201
  misc_feature 1..5967: note = Synthetic
  source 1..5967: mol_type = other RNA

SEQ ID NO: 1231 - protein, 1988 aa, synthetic construct; identical to SEQ ID NO: 1202
  REGION 1..1988: note = Synthetic

SEQ ID NO: 1232 - RNA, 6526 nt, synthetic construct
  misc_feature 1..6526: note = Synthetic
  source 1..6526: mol_type = other RNA
gggaagctcagaataaacgctcaactttggccggatctgccaccatgaagcggaccgccgacggctccgagttcgagtcccccaagaagaagcggaaggtggacaagaagtactccatcggcctggacatcggcaccaactccgtgggctgggccgtgatcaccgacgagtacaaggtgccctccaagaagttcaaggtgctgggcaacaccgaccggcactccatcaagaagaacctgatcggcgccctgctgttcgactccggcgagaccgccgaggccacccggctgaagcggaccgcccggcggcggtacacccggcggaagaaccggatctgctacctgcaggagatcttctccaacgagatggccaaggtggacgactccttcttccaccggctggaggagtccttcctggtggaggaggacaagaagcacgagcggcaccccatcttcggcaacatcgtggacgaggtggcctaccacgagaagtaccccaccatctaccacctgcggaagaagctggtggactccaccgacaaggccgacctgcggctgatctacctggccctggcccacatgatcaagttccggggccacttcctgatcgagggcgacctgaaccccgacaactccgacgtggacaagctgttcatccagctggtgcagacctacaaccagctgttcgaggagaaccccatcaacgcctccggcgtggacgccaaggccatcctgtccgcccggctgtccaagtcccggcggctggagaacctgatcgcccagctgcccggcgagaagaagaacggcctgttcggcaacctgatcgccctgtccctgggcctgacccccaacttcaagtccaacttcgacctggccgaggacgccaagctgcagctgtccaaggacacctacgacgacgacctggacaacctgctggcccagatcggcgaccagtacgccgacctgttcctggccgccaagaacctgtccgacgccatcctgctgtccgacatcctgcgggtgaacaccgagatcaccaaggcccccctgtccgcctccatgatcaagcggtacgacgagcaccaccaggacctgaccctgctgaaggccctggtgcggcagcagctgcccgagaagtacaaggagatcttcttcgaccagtccaagaacggctacgccggctacatcgacggcggcgcctcccaggaggagttctacaagttcatcaagcccatcctggagaagatggacggcaccgaggagctgctggtgaagctgaaccgggaggacctgctgcggaagcagcggaccttcgacaacggctccatcccccaccagatccacctgggcgagctgcacgccatcctgcggcggcaggaggacttctaccccttcctgaaggacaaccgggagaagatcgagaagatcctgaccttccggatcccctactacgtgggccccctggcccggggcaactcccggttcgcctggatgacccggaagtccgaggagaccatcaccccctggaacttcgaggaggtggtggacaagggcgcctccgcccagtccttcatcgagcggatgaccaacttcgacaagaacctgcccaacgagaaggtgctgcccaagcactccctgctgtacgagtacttcaccgtgtacaacgagctgaccaaggtgaagtacgtgaccgagggcatgcggaagcccgccttcctgtccggcgagcagaagaaggccatcgtggacctgctgttcaagaccaaccggaaggtgaccgtgaagcagctgaaggaggactacttcaagaagatcgagtgcttcgactccgtggagatctccggcgtggaggaccggttcaacgcctccctgggcacctaccacgacctgctgaagatcatcaaggacaaggacttcctggacaacgaggagaacgaggacatcctggaggacatcgtgctgaccctgaccctgttcgaggaccgggagatgatcgaggagcggctgaagacctacgcccacctgttcgacgacaaggtgatgaagcagctgaagcggcggcggtacaccggctggggccggctgtcccggaagctgatcaacggcatccgggacaagcagtccggcaagaccatcctggacttcctgaagtccgacggcttcgccaaccggaacttcatgcagctgatccacgacgactccctgaccttcaaggaggacatccagaaggcccaggtgtccggccagggcgactccctgcacgagcacatcgccaacctggccggctcccccgccatcaagaagggcatcctgcagaccgtgaaggtggtggacgagctggtgaaggtgatgggccggcacaagcccgagaacatcgtgatcgagatggcccgggagaaccagaccacccagaagggccagaagaactcccgggagcggatgaagcggatcgaggagggcatcaaggagctgggctcccagatcctgaaggagcaccccgtggagaacacccagctgcagaacgagaagctgtacctgtactacctgcagaacggccgggacatgtacgtggaccaggagctggacatcaaccggctgtccgactacgacgtggacgccatcgtgccccagtccttcctgaaggacgactccatcgacaacaaggtgctgacccggtccgacaagaaccggggcaagtccgacaacgtgccctccgaggaggtggtgaagaagatgaagaactactggcggcagctgctgaacgccaagctgatcacccagcggaagttcgacaacctgaccaaggccgagcggggcggcctgtccgagctggacaaggccggcttcatcaagcggcagctggtggagacccggcagatcaccaagcacgtggcccagatcctggactcccggatgaacaccaagtacgacgagaacgacaagctgatccgggaggtgaaggtgatcaccctgaagtccaagctggtgtccgacttccggaaggacttccagttctacaaggtgcgggagatcaacaactaccaccacgcccacgacgcctacctgaacgccgtggtgggcaccgccctgatcaagaagtaccccaagctggagtccgagttcgtgtacggcgactacaaggtgtacgacgtgcggaagatgatcgccaagtccgagcaggagatcggcaaggccaccgccaagtacttcttctactccaacatcatgaacttcttcaagaccgagatcaccctggccaacggcgagatccggaagcggcccctgatcgagaccaacggcgagaccggcgagatcgtgtgggacaagggccgggacttcgccaccgtgcggaaggtgctgtccatgccccaggtgaacatcgtgaagaagaccgaggtgcagaccggcggcttctccaaggagtccatcctgcccaagcggaactccgacaagctgatcgcccggaagaaggactgggaccccaagaagtacggcggcttcgactcccccaccgtggcctactccgtgctggtggtggccaaggtggagaagggcaagtccaagaagctgaagtccgtgaaggagctgctgggcatcaccatcatggagcggtcctccttcgagaagaaccccatcgacttcctggaggccaagggctacaaggaggtgaagaaggacctgatcatcaagctgcccaagtactccctgttcgagctggagaacggccggaagcggatgctggcctccgccggcgagctgcagaagggcaacgagctggccctgccctccaagtacgtgaacttcctgtacctggcctcccactacgagaagctgaagggctcccccgaggacaacgagcagaagcagctgttcgtggagcagcacaagcactacctggacgagatcatcgagcagatctccgagttctccaagcgggtgatcctggccgacgccaacctggacaaggtgctgtccgcctacaacaagcaccgggacaagcccatccgggagcaggccgagaacatcatccacctgttcaccctgaccaacctgggcgcccccgccgccttcaagtacttcgacaccaccatcgaccggaagcggtacacctccaccaaggaggtgctggacgccaccctgatccaccagtccatcaccggcctgtacgagacccggatcgacctgtcccagctgggcggcgactccggcggctcctccggcggctccaagcggaccgccgacggctccgagttcgagtcccccaagaagaagcggaaggtgtccggcggctcctccggcggctccatggactccaccaaggagaagtgcgactcctacaaggacgacctgctgctgcggatgggcctgaacgacaacaaggccggcatggagggcctggacaaggagaagatcaacaagatcatcatggaggccaccaagggctcccggttctacggcaacgagctgaagaaggagaagcaggtgaaccagcggatcgagaacatgatgcagcagaaggcccagatcacctcccagcagctgcggaaggcccagctgcaggtggaccggttcgccatggagctggagcagtcccggaacctgtccaacaccatcgtgcacatcgacatggacgccttctacgccgccgtggagatgcgggacaaccccgagctgaaggacaagcccatcgccgtgggctccatgtccatgctgtccacctccaactaccacgcccggcggttcggcgtgcgggccgccatgcccggcttcatcgccaagcggctgtgcccccagctgatcatcgtgccccccaacttcgacaagtaccgggccgtgtccaaggaggtgaaggagatcctggccgactacgaccccaacttcatggccatgtccctggacgaggcctacctgaacatcaccaagcacctggaggagcggcagaactggcccgaggacaagcggcggtacttcatcaagatgggctcctccgtggagaacgacaaccccggcaaggaggtgaacaagctgtccgagcacgagcggtccatctcccccctgctgttcgaggagtccccctccgacgtgcagccccccggcgaccccttccaggtgaacttcgaggagcagaacaacccccagatcctgcagaactccgtggtgttcggcacctccgcccaggaggtggtgaaggagatccggttccggatcgagcagaagaccaccctgaccgcctccgccggcatcgcccccaacaccatgctggccaaggtgtgctccgacaagaacaagcccaacggccagtaccagatcctgcccaaccggcaggccgtgatggacttcatcaaggacctgcccatccggaaggtgtccggcatcggcaaggtgaccgagaagatgctgaaggccctgggcatcatcacctgcaccgagctgtaccagcagcgggccctgctgtccctgctgttctccgagacctcctggcactacttcctgcacatctccctgggcctgggctccacccacctgacccgggaccgggtgcggaagtccatgtccgtggagcggaccttctccgagatcaacaaggccgaggagcagtactccctgtgccaggagctgtgctccgagctggcccaggacctgcagaaggagcggctgaagggccggaccgtgaccatcaagctgaagaacgtgaacttcgaggtgaagacccgggcctccaccgtgtcctccgtggtgtccaccgccgaggagatcttcgccatcgccaaggagctgctgaagaccgagatcgacgccgacttcccccaccccctgcggctgcggctgatgggcgtgcggatctcctccttccccaacgaggaggaccggaagcaccagcagggcggcggctccggcaagcggaccgccgacggctccggcggcggctcccccaagaagaagcggaaggtgtccgagtccgccacccccgagtccgtgtccggctggcggctgttcaagaagatctcctagctagcaccagcctcaagaacacccgaatggagtctctaagctacataataccaacttacactttacaaaatgttgtcccccaaaatgtagccattcgtatctgctcctaataaaaagaaagtttcttcacattctctcgagaaaaaaaaaaaatggaaaaaaaaaaaacggaaaaaaaaaaaaggtaaaaaaaaaaaatataaaaaaaaaaaacataaaaaaaaaaaacgaaaaaaaaaaaacgtaaaaaaaaaaaactcaaaaaaaaaaaagataaaaaaaaaaaacctaaaaaaaaaaaatgtaaaaaaaaaaaagggaaaaaaaaaaaacgcaaaaaaaaaaaacacaaaaaaaaaaaatgcaaaaaaaaaaaatcgaaaaaaaaaaaatctaaaaaaaaaaaacgaaaaaaaaaaaacccaaaaaaaaaaaagacaaaaaaaaaaaatagaaaaaaaaaaagttaaaaaaaaaaaactgaaaaaaaaaaaatttaaaaaaaaaaaatctag

SEQ ID NO: 1233 - RNA, 5907 nt, synthetic construct
  misc_feature 1..5907: note = Synthetic
  source 1..5907: mol_type = other RNA
atgaagcggaccgccgacggctccgagttcgagtcccccaagaagaagcggaaggtggacaagaagtactccatcggcctggacatcggcaccaactccgtgggctgggccgtgatcaccgacgagtacaaggtgccctccaagaagttcaaggtgctgggcaacaccgaccggcactccatcaagaagaacctgatcggcgccctgctgttcgactccggcgagaccgccgaggccacccggctgaagcggaccgcccggcggcggtacacccggcggaagaaccggatctgctacctgcaggagatcttctccaacgagatggccaaggtggacgactccttcttccaccggctggaggagtccttcctggtggaggaggacaagaagcacgagcggcaccccatcttcggcaacatcgtggacgaggtggcctaccacgagaagtaccccaccatctaccacctgcggaagaagctggtggactccaccgacaaggccgacctgcggctgatctacctggccctggcccacatgatcaagttccggggccacttcctgatcgagggcgacctgaaccccgacaactccgacgtggacaagctgttcatccagctggtgcagacctacaaccagctgttcgaggagaaccccatcaacgcctccggcgtggacgccaaggccatcctgtccgcccggctgtccaagtcccggcggctggagaacctgatcgcccagctgcccggcgagaagaagaacggcctgttcggcaacctgatcgccctgtccctgggcctgacccccaacttcaagtccaacttcgacctggccgaggacgccaagctgcagctgtccaaggacacctacgacgacgacctggacaacctgctggcccagatcggcgaccagtacgccgacctgttcctggccgccaagaacctgtccgacgccatcctgctgtccgacatcctgcgggtgaacaccgagatcaccaaggcccccctgtccgcctccatgatcaagcggtacgacgagcaccaccaggacctgaccctgctgaaggccctggtgcggcagcagctgcccgagaagtacaaggagatcttcttcgaccagtccaagaacggctacgccggctacatcgacggcggcgcctcccaggaggagttctacaagttcatcaagcccatcctggagaagatggacggcaccgaggagctgctggtgaagctgaaccgggaggacctgctgcggaagcagcggaccttcgacaacggctccatcccccaccagatccacctgggcgagctgcacgccatcctgcggcggcaggaggacttctaccccttcctgaaggacaaccgggagaagatcgagaagatcctgaccttccggatcccctactacgtgggccccctggcccggggcaactcccggttcgcctggatgacccggaagtccgaggagaccatcaccccctggaacttcgaggaggtggtggacaagggcgcctccgcccagtccttcatcgagcggatgaccaacttcgacaagaacctgcccaacgagaaggtgctgcccaagcactccctgctgtacgagtacttcaccgtgtacaacgagctgaccaaggtgaagtacgtgaccgagggcatgcggaagcccgccttcctgtccggcgagcagaagaaggccatcgtggacctgctgttcaagaccaaccggaaggtgaccgtgaagcagctgaaggaggactacttcaagaagatcgagtgcttcgactccgtggagatctccggcgtggaggaccggttcaacgcctccctgggcacctaccacgacctgctgaagatcatcaaggacaaggacttcctggacaacgaggagaacgaggacatcctggaggacatcgtgctgaccctgaccctgttcgaggaccgggagatgatcgaggagcggctgaagacctacgcccacctgttcgacgacaaggtgatgaagcagctgaagcggcggcggtacaccggctggggccggctgtcccggaagctgatcaacggcatccgggacaagcagtccggcaagaccatcctggacttcctgaagtccgacggcttcgccaaccggaacttcatgcagctgatccacgacgactccctgaccttcaaggaggacatccagaaggcccaggtgtccggccagggcgactccctgcacgagcacatcgccaacctggccggctcccccgccatcaagaagggcatcctgcagaccgtgaaggtggtggacgagctggtgaaggtgatgggccggcacaagcccgagaacatcgtgatcgagatggcccgggagaaccagaccacccagaagggccagaagaactcccgggagcggatgaagcggatcgaggagggcatcaaggagctgggctcccagatcctgaaggagcaccccgtggagaacacccagctgcagaacgagaagctgtacctgtactacctgcagaacggccgggacatgtacgtggaccaggagctggacatcaaccggctgtccgactacgacgtggacgccatcgtgccccagtccttcctgaaggacgactccatcgacaacaaggtgctgacccggtccgacaagaaccggggcaagtccgacaacgtgccctccgaggaggtggtgaagaagatgaagaactactggcggcagctgctgaacgccaagctgatcacccagcggaagttcgacaacctgaccaaggccgagcggggcggcctgtccgagctggacaaggccggcttcatcaagcggcagctggtggagacccggcagatcaccaagcacgtggcccagatcctggactcccggatgaacaccaagtacgacgagaacgacaagctgatccgggaggtgaaggtgatcaccctgaagtccaagctggtgtccgacttccggaaggacttccagttctacaaggtgcgggagatcaacaactaccaccacgcccacgacgcctacctgaacgccgtggtgggcaccgccctgatcaagaagtaccccaagctggagtccgagttcgtgtacggcgactacaaggtgtacgacgtgcggaagatgatcgccaagtccgagcaggagatcggcaaggccaccgccaagtacttcttctactccaacatcatgaacttcttcaagaccgagatcaccctggccaacggcgagatccggaagcggcccctgatcgagaccaacggcgagaccggcgagatcgtgtgggacaagggccgggacttcgccaccgtgcggaaggtgctgtccatgccccaggtgaacatcgtgaagaagaccgaggtgcagaccggcggcttctccaaggagtccatcctgcccaagcggaactccgacaagctgatcgcccggaagaaggactgggaccccaagaagtacggcggcttcgactcccccaccgtggcctactccgtgctggtggtggccaaggtggagaagggcaagtccaagaagctgaagtccgtgaaggagctgctgggcatcaccatcatggagcggtcctccttcgagaagaaccccatcgacttcctggaggccaagggctacaaggaggtgaagaaggacctgatcatcaagctgcccaagtactccctgttcgagctggagaacggccggaagcggatgctggcctccgccggcgagctgcagaagggcaacgagctggccctgccctccaagtacgtgaacttcctgtacctggcctcccactacgagaagctgaagggctcccccgaggacaacgagcagaagcagctgttcgtggagcagcacaagcactacctggacgagatcatcgagcagatctccgagttctccaagcgggtgatcctggccgacgccaacctggacaaggtgctgtccgcctacaacaagcaccgggacaagcccatccgggagcaggccgagaacatcatccacctgttcaccctgaccaacctgggcgcccccgccgccttcaagtacttcgacaccaccatcgaccggaagcggtacacctccaccaaggaggtgctggacgccaccctgatccaccagtccatcaccggcctgtacgagacccggatcgacctgtcccagctgggcggcgactccggcggctcctccggcggctccaagcggaccgccgacggctccgagttcgagtcccccaagaagaagcggaaggtgtccggcggctcctccggcggctccatggactccaccaaggagaagtgcgactcctacaaggacgacctgctgctgcggatgggcctgaacgacaacaaggccggcatggagggcctggacaaggagaagatcaacaagatcatcatggaggccaccaagggctcccggttctacggcaacgagctgaagaaggagaagcaggtgaaccagcggatcgagaacatgatgcagcagaaggcccagatcacctcccagcagctgcggaaggcccagctgcaggtggaccggttcgccatggagctggagcagtcccggaacctgtccaacaccatcgtgcacatcgacatggacgccttctacgccgccgtggagatgcgggacaaccccgagctgaaggacaagcccatcgccgtgggctccatgtccatgctgtccacctccaactaccacgcccggcggttcggcgtgcgggccgccatgcccggcttcatcgccaagcggctgtgcccccagctgatcatcgtgccccccaacttcgacaagtaccgggccgtgtccaaggaggtgaaggagatcctggccgactacgaccccaacttcatggccatgtccctggacgaggcctacctgaacatcaccaagcacctggaggagcggcagaactggcccgaggacaagcggcggtacttcatcaagatgggctcctccgtggagaacgacaaccccggcaaggaggtgaacaagctgtccgagcacgagcggtccatctcccccctgctgttcgaggagtccccctccgacgtgcagccccccggcgaccccttccaggtgaacttcgaggagcagaacaacccccagatcctgcagaactccgtggtgttcggcacctccgcccaggaggtggtgaaggagatccggttccggatcgagcagaagaccaccctgaccgcctccgccggcatcgcccccaacaccatgctggccaaggtgtgctccgacaagaacaagcccaacggccagtaccagatcctgcccaaccggcaggccgtgatggacttcatcaaggacctgcccatccggaaggtgtccggcatcggcaaggtgaccgagaagatgctgaaggccctgggcatcatcacctgcaccgagctgtaccagcagcgggccctgctgtccctgctgttctccgagacctcctggcactacttcctgcacatctccctgggcctgggctccacccacctgacccgggaccgggtgcggaagtccatgtccgtggagcggaccttctccgagatcaacaaggccgaggagcagtactccctgtgccaggagctgtgctccgagctggcccaggacctgcagaaggagcggctgaagggccggaccgtgaccatcaagctgaagaacgtgaacttcgaggtgaagacccgggcctccaccgtgtcctccgtggtgtccaccgccgaggagatcttcgccatcgccaaggagctgctgaagaccgagatcgacgccgacttcccccaccccctgcggctgcggctgatgggcgtgcggatctcctccttccccaacgaggaggaccggaagcaccagcagggcggcggctccggcaagcggaccgccgacggctccggcggcggctcccccaagaagaagcggaaggtg

SEQ ID NO: 1234 - protein, 1969 aa, synthetic construct
  REGION 1..1969: note = Synthetic
MKRTADGSEFESPKKKRKVDKKYSIGLDIGTNSVGWAVITDEYKVPSKKFKVLGNTDRHSIKKNLIGALLFDSGETAEATRLKRTARRRYTRRKNRICYLQEIFSNEMAKVDDSFFHRLEESFLVEEDKKHERHPIFGNIVDEVAYHEKYPTIYHLRKKLVDSTDKADLRLIYLALAHMIKFRGHFLIEGDLNPDNSDVDKLFIQLVQTYNQLFEENPINASGVDAKAILSARLSKSRRLENLIAQLPGEKKNGLFGNLIALSLGLTPNFKSNFDLAEDAKLQLSKDTYDDDLDNLLAQIGDQYADLFLAAKNLSDAILLSDILRVNTEITKAPLSASMIKRYDEHHQDLTLLKALVRQQLPEKYKEIFFDQSKNGYAGYIDGGASQEEFYKFIKPILEKMDGTEELLVKLNREDLLRKQRTFDNGSIPHQIHLGELHAILRRQEDFYPFLKDNREKIEKILTFRIPYYVGPLARGNSRFAWMTRKSEETITPWNFEEVVDKGASAQSFIERMTNFDKNLPNEKVLPKHSLLYEYFTVYNELTKVKYVTEGMRKPAFLSGEQKKAIVDLLFKTNRKVTVKQLKEDYFKKIECFDSVEISGVEDRFNASLGTYHDLLKIIKDKDFLDNEENEDILEDIVLTLTLFEDREMIEERLKTYAHLFDDKVMKQLKRRRYTGWGRLSRKLINGIRDKQSGKTILDFLKSDGFANRNFMQLIHDDSLTFKEDIQKAQVSGQGDSLHEHIANLAGSPAIKKGILQTVKVVDELVKVMGRHKPENIVIEMARENQTTQKGQKNSRERMKRIEEGIKELGSQILKEHPVENTQLQNEKLYLYYLQNGRDMYVDQELDINRLSDYDVDAIVPQSFLKDDSIDNKVLTRSDKNRGKSDNVPSEEVVKKMKNYWRQLLNAKLITQRKFDNLTKAERGGLSELDKAGFIKRQLVETRQITKHVAQILDSRMNTKYDENDKLIREVKVITLKSKLVSDFRKDFQFYKVREINNYHHAHDAYLNAVVGTALIKKYPKLESEFVYGDYKVYDVRKMIAKSEQEIGKATAKYFFYSNIMNFFKTEITLANGEIRKRPLIETNGETGEIVWDKGRDFATVRKVLSMPQVNIVKKTEVQTGGFSKESILPKRNSDKLIARKKDWDPKKYGGFDSPTVAYSVLVVAKVEKGKSKKLKSVKELLGITIMERSSFEKNPIDFLEAKGYKEVKKDLIIKLPKYSLFELENGRKRMLASAGELQKGNELALPSKYVNFLYLASHYEKLKGSPEDNEQKQLFVEQHKHYLDEIIEQISEFSKRVILADANLDKVLSAYNKHRDKPIREQAENIIHLFTLTNLGAPAAFKYFDTTIDRKRYTSTKEVLDATLIHQSITGLYETRIDLSQLGGDSGGSSGGSKRTADGSEFESPKKKRKVSGGSSGGSMDSTKEKCDSYKDDLLLRMGLNDNKAGMEGLDKEKINKIIMEATKGSRFYGNELKKEKQVNQRIENMMQQKAQITSQQLRKAQLQVDRFAMELEQSRNLSNTIVHIDMDAFYAAVEMRDNPELKDKPIAVGSMSMLSTSNYHARRFGVRAAMPGFIAKRLCPQLIIVPPNFDKYRAVSKEVKEILADYDPNFMAMSLDEAYLNITKHLEERQNWPEDKRRYFIKMGSSVENDNPGKEVNKLSEHERSISPLLFEESPSDVQPPGDPFQVNFEEQNNPQILQNSVVFGTSAQEVVKEIRFRIEQKTTLTASAGIAPNTMLAKVCSDKNKPNGQYQILPNRQAVMDFIKDLPIRKVSGIGKVTEKMLKALGIITCTELYQQRALLSLLFSETSWHYFLHISLGLGSTHLTRDRVRKSMSVERTFSEINKAEEQYSLCQELCSELAQDLQKERLKGRTVTIKLKNVNFEVKTRASTVSSVVSTAEEIFAIAKELLKTEIDADFPHPLRLRLMGVRISSFPNEEDRKHQQGGGSGKRTADGSGGGSPKKKRKV

SEQ ID NO: 1235 - RNA, 1263 nt, synthetic construct
  misc_feature 1..1263: note = Synthetic
  source 1..1263: mol_type = other RNA
atgggcatccagggcctggccaagctgatcgccgacgtggccccctccgccatccgggagaacgacatcaagtcctacttcggccggaaggtggccatcgacgcctccatgtccatctaccagttcctgatcgccgtgcggcagggcggcgacgtgctgcagaacgaggagggcgagaccacctcccacctgatgggcatgttctaccggaccatccggatgatggagaacggcatcaagcccgtgtacgtgttcgacggcaagcccccccagctgaagtccggcgagctggccaagcggtccgagcggcgggccgaggccgagaagcagctgcagcaggcccaggccgccggcgccgagcaggaggtggagaagttcaccaagcggctggtgaaggtgaccaagcagcacaacgacgagtgcaagcacctgctgtccctgatgggcatcccctacctggacgccccctccgaggccgaggcctcctgcgccgccctggtgaaggccggcaaggtgtacgccgccgccaccgaggacatggcctgcctgaccttcggctcccccgtgctgatgcggcacctgaccgcctccgaggccaagaagctgcccatccaggagttccacctgtcccggatcctgcaggagctgggcctgaaccaggagcagttcgtggacctgtgcatcctgctgggctccgactactgcgagtccatccggggcatcggccccaagcgggccgtggacctgatccagaagcacaagtccatcgaggagatcgtgcggcggctggaccccaacaagtaccccgtgcccgagaactggctgcacaaggaggcccaccagctgttcctggagcccgaggtgctggaccccgagtccgtggagctgaagtggtccgagcccaacgaggaggagctgatcaagttcatgtgcggcgagaagcagttctccgaggagcggatccggtccggcgtgaagcggctgtccaagtcccggcagggctccacccagggccggctggacgacttcttcaaggtgaccggctccctgtcctccgccaagcggaaggagcccgagcccaagggctccaccaagaagaaggccaagaccggcgccgccggcaagttcaagcggggcaagtccggcggctccaagcggaccgccgacggctccgagttcgagcccaagaagaagcggaaggtgtccgagtccgccacccccgagtccgtgtccggctggcggctgttcaagaagatctcctag

SEQ ID NO: 1236 - protein, 420 aa, synthetic construct
  REGION 1..420: note = Synthetic
MGIQGLAKLIADVAPSAIRENDIKSYFGRKVAIDASMSIYQFLIAVRQGGDVLQNEEGETTSHLMGMFYRTIRMMENGIKPVYVFDGKPPQLKSGELAKRSERRAEAEKQLQQAQAAGAEQEVEKFTKRLVKVTKQHNDECKHLLSLMGIPYLDAPSEAEASCAALVKAGKVYAAATEDMACLTFGSPVLMRHLTASEAKKLPIQEFHLSRILQELGLNQEQFVDLCILLGSDYCESIRGIGPKRAVDLIQKHKSIEEIVRRLDPNKYPVPENWLHKEAHQLFLEPEVLDPESVELKWSEPNEEELIKFMCGEKQFSEERIRSGVKRLSKSRQGSTQGRLDDFFKVTGSLSSAKRKEPEPKGSTKKKAKTGAAGKFKRGKSGGSKRTADGSEFEPKKKRKVSESATPESVSGWRLFKKIS

SEQ ID NO: 1237 - RNA, 6643 nt, synthetic construct
  misc_feature 1..6643: note = Synthetic
  source 1..6643: mol_type = other RNA
gggaagctcagaataaacgctcaactttggccggatctgccaccatggacaagaagtactccatcggcctggacatcggcaccaactccgtgggctgggccgtgatcaccgacgagtacaaggtgccctccaagaagttcaaggtgctgggcaacaccgaccggcactccatcaagaagaacctgatcggcgccctgctgttcgactccggcgagaccgccgaggccacccggctgaagcggaccgcccggcggcggtacacccggcggaagaaccggatctgctacctgcaggagatcttctccaacgagatggccaaggtggacgactccttcttccaccggctggaggagtccttcctggtggaggaggacaagaagcacgagcggcaccccatcttcggcaacatcgtggacgaggtggcctaccacgagaagtaccccaccatctaccacctgcggaagaagctggtggactccaccgacaaggccgacctgcggctgatctacctggccctggcccacatgatcaagttccggggccacttcctgatcgagggcgacctgaaccccgacaactccgacgtggacaagctgttcatccagctggtgcagacctacaaccagctgttcgaggagaaccccatcaacgcctccggcgtggacgccaaggccatcctgtccgcccggctgtccaagtcccggcggctggagaacctgatcgcccagctgcccggcgagaagaagaacggcctgttcggcaacctgatcgccctgtccctgggcctgacccccaacttcaagtccaacttcgacctggccgaggacgccaagctgcagctgtccaaggacacctacgacgacgacctggacaacctgctggcccagatcggcgaccagtacgccgacctgttcctggccgccaagaacctgtccgacgccatcctgctgtccgacatcctgcgggtgaacaccgagatcaccaaggcccccctgtccgcctccatgatcaagcggtacgacgagcaccaccaggacctgaccctgctgaaggccctggtgcggcagcagctgcccgagaagtacaaggagatcttcttcgaccagtccaagaacggctacgccggctacatcgacggcggcgcctcccaggaggagttctacaagttcatcaagcccatcctggagaagatggacggcaccgaggagctgctggtgaagctgaaccgggaggacctgctgcggaagcagcggaccttcgacaacggctccatcccccaccagatccacctgggcgagctgcacgccatcctgcggcggcaggaggacttctaccccttcctgaaggacaaccgggagaagatcgagaagatcctgaccttccggatcccctactacgtgggccccctggcccggggcaactcccggttcgcctggatgacccggaagtccgaggagaccatcaccccctggaacttcgaggaggtggtggacaagggcgcctccgcccagtccttcatcgagcggatgaccaacttcgacaagaacctgcccaacgagaaggtgctgcccaagcactccctgctgtacgagtacttcaccgtgtacaacgagctgaccaaggtgaagtacgtgaccgagggcatgcggaagcccgccttcctgtccggcgagcagaagaaggccatcgtggacctgctgttcaagaccaaccggaaggtgaccgtgaagcagctgaaggaggactacttcaagaagatcgagtgcttcgactccgtggagatctccggcgtggaggaccggttcaacgcctccctgggcacctaccacgacctgctgaagatcatcaaggacaaggacttcctggacaacgaggagaacgaggacatcctggaggacatcgtgctgaccctgaccctgttcgaggaccgggagatgatcgaggagcggctgaagacctacgcccacctgttcgacgacaaggtgatgaagcagctgaagcggcggcggtacaccggctggggccggctgtcccggaagctgatcaacggcatccgggacaagcagtccggcaagaccatcctggacttcctgaagtccgacggcttcgccaaccggaacttcatgcagctgatccacgacgactccctgaccttcaaggaggacatccagaaggcccaggtgtccggccagggcgactccctgcacgagcacatcgccaacctggccggctcccccgccatcaagaagggcatcctgcagaccgtgaaggtggtggacgagctggtgaaggtgatgggccggcacaagcccgagaacatcgtgatcgagatggcccgggagaaccagaccacccagaagggccagaagaactcccgggagcggatgaagcggatcgaggagggcatcaaggagctgggctcccagatcctgaaggagcaccccgtggagaacacccagctgcagaacgagaagctgtacctgtactacctgcagaacggccgggacatgtacgtggaccaggagctggacatcaaccggctgtccgactacgacgtggacgccatcgtgccccagtccttcctgaaggacgactccatcgacaacaaggtgctgacccggtccgacaagaaccggggcaagtccgacaacgtgccctccgaggaggtggtgaagaagatgaagaactactggcggcagctgctgaacgccaagctgatcacccagcggaagttcgacaacctgaccaaggccgagcggggcggcctgtccgagctggacaaggccggcttcatcaagcggcagctggtggagacccggcagatcaccaagcacgtggcccagatcctggactcccggatgaacaccaagtacgacgagaacgacaagctgatccgggaggtgaaggtgatcaccctgaagtccaagctggtgtccgacttccggaaggacttccagttctacaaggtgcgggagatcaacaactaccaccacgcccacgacgcctacctgaacgccgtggtgggcaccgccctgatcaagaagtaccccaagctggagtccgagttcgtgtacggcgactacaaggtgtacgacgtgcggaagatgatcgccaagtccgagcaggagatcggcaaggccaccgccaagtacttcttctactccaacatcatgaacttcttcaagaccgagatcaccctggccaacggcgagatccggaagcggcccctgatcgagaccaacggcgagaccggcgagatcgtgtgggacaagggccgggacttcgccaccgtgcggaaggtgctgtccatgccccaggtgaacatcgtgaagaagaccgaggtgcagaccggcggcttctccaaggagtccatcctgcccaagcggaactccgacaagctgatcgcccggaagaaggactgggaccccaagaagtacggcggcttcgactcccccaccgtggcctactccgtgctggtggtggccaaggtggagaagggcaagtccaagaagctgaagtccgtgaaggagctgctgggcatcaccatcatggagcggtcctccttcgagaagaaccccatcgacttcctggaggccaagggctacaaggaggtgaagaaggacctgatcatcaagctgcccaagtactccctgttcgagctggagaacggccggaagcggatgctggcctccgccggcgagctgcagaagggcaacgagctggccctgccctccaagtacgtgaacttcctgtacctggcctcccactacgagaagctgaagggctcccccgaggacaacgagcagaagcagctgttcgtggagcagcacaagcactacctggacgagatcatcgagcagatctccgagttctccaagcgggtgatcctggccgacgccaacctggacaaggtgctgtccgcctacaacaagcaccgggacaagcccatccgggagcaggccgagaacatcatccacctgttcaccctgaccaacctgggcgcccccgccgccttcaagtacttcgacaccaccatcgaccggaagcggtacacctccaccaaggaggtgctggacgccaccctgatccaccagtccatcaccggcctgtacgagacccggatcgacctgtcccagctgggcggcgacggcgcccccgagtccgccaccgagtccggcggcacctccaccgagtccgagggctccgccggcacctccaccgagtccgagggctccgccggctccgccggctccacctccggctcctcctccggcatgaagcacatgccccggaagcggtactcctgcgccttcgccaccaccaccaaggtggaggactgccgggtgtgggcctacggctacatgaacatcgaggaccactccgagtacaagatcggcaactccctggacgagttcatggcctgggccctgaaggtgcaggccgacctgtacttccacaacctgaagttcgacggcgccttcatcatcaactggctggagcggaacggcttcaagtggtccgccgacggcctgcccaacacctacaacaccatcatctcccggaccggccagtggtacatgatcgacatctgcctgggctacaagggcaagcggaagatccacaccgtgatctacgactccctgaagaagctgcccttccccgtgaagaagatcgccaaggacttcaagctgaccgtgctgaagggcgacatcgactaccacaaggagcggcccgtgggctacaagatcacccccgaggagtacgcctacatcaagaacgacatccagatcatcgccgaggccctgctgatccagttcaagcagggcctggaccggatgaccgccggctccgactccctgaaggacttcaaggacatcatcaccaccaagaagttcaagaaggtgttccccaccctgtccctgggcctggacaagaaggtgcggtacgcctaccggggcggcttcacctggctgaacgaccggttcaaggagaaggagatcggcgagggcatggtgttcgacgtgaactccctgtaccccgcccagatgtactcccggctgctgccctacggcgagcccatcgtgttcgagggcaagtacgtgtgggacgaggactaccccctgcacatccagcacatccggtgcgagttcgagctgaaggagggctacatccccaccatccagatcaagcggtcccggttctacaagggcaacgagtacctgaagtcctccggcggcgagatcgccgacctgtggctgtccaacgtggacctggagctgatgaaggagcactacgacctgtacaacgtggagtacatctccggcctgaagttcaaggccaccaccggcctgttcaaggacttcatcgacaagtggacctacatcaagaccacctccgagggcgccatcaagcagctggccaagctgatgctgaactccctgtacggcaagttcgcctccaaccccgacgtgaccggcaaggtgccctacctgaaggagaacggcgccctgggcttccggctgggcgaggaggagaccaaggaccccgtgtacacccccatgggcgtgttcatcaccgcctgggcccggtacaccaccatcaccgccgcccaggcctgctacgaccggatcatctactgcgacaccgactccatccacctgaccggcaccgagatccccgacgtgatcaaggacatcgtggaccccaagaagctgggctactgggcccacgagtccaccttcaagcgggccaagtacctgcggcccaagacctacatccaggacatctacatgaaggaggtggacggcgagctggtggccggctcccccgacgactacaccgacatcaagctgtccgtgaagtgcgccggcatgaccgacaagatcaagaaggaggtgaccttcgagaacttcaaggtgggcttctcccggaagatgaagcccaagcccgtgcaggtgcccggcggcgtggtgctggtggacgacaccttcaccatcaagggcggcggctccggcaagcggaccgccgacggctccggcggcggctcccccaagaagaagcggaaggtgtccgagtccgccacccccgagtccgtgtccggctggcggctgttcaagaagatctcctagctagcaccagcctcaagaacacccgaatggagtctctaagctacataataccaacttacactttacaaaatgttgtcccccaaaatgtagccattcgtatctgctcctaataaaaagaaagtttcttcacattctctcgagaaaaaaaaaaaatggaaaaaaaaaaaacggaaaaaaaaaaaaggtaaaaaaaaaaaatataaaaaaaaaaaacataaaaaaaaaaaacgaaaaaaaaaaaacgtaaaaaaaaaaaactcaaaaaaaaaaaagataaaaaaaaaaaacctaaaaaaaaaaaatgtaaaaaaaaaaaagggaaaaaaaaaaaacgcaaaaaaaaaaaacacaaaaaaaaaaaatgcaaaaaaaaaaaatcgaaaaaaaaaaaatctaaaaaaaaaaaacgaaaaaaaaaaaacccaaaaaaaaaaaagacaaaaaaaaaaaatagaaaaaaaaaaagttaaaaaaaaaaaactgaaaaaaaaaaaatttaaaaaaaaaaaatctag

SEQ ID NO: 1238 - RNA, 1203 nt, synthetic construct
  misc_feature 1..1203: note = Synthetic
  source 1..1203: mol_type = other RNA
atgggcatccagggcctggccaagctgatcgccgacgtggccccctccgccatccgggagaacgacatcaagtcctacttcggccggaaggtggccatcgacgcctccatgtccatctaccagttcctgatcgccgtgcggcagggcggcgacgtgctgcagaacgaggagggcgagaccacctcccacctgatgggcatgttctaccggaccatccggatgatggagaacggcatcaagcccgtgtacgtgttcgacggcaagcccccccagctgaagtccggcgagctggccaagcggtccgagcggcgggccgaggccgagaagcagctgcagcaggcccaggccgccggcgccgagcaggaggtggagaagttcaccaagcggctggtgaaggtgaccaagcagcacaacgacgagtgcaagcacctgctgtccctgatgggcatcccctacctggacgccccctccgaggccgaggcctcctgcgccgccctggtgaaggccggcaaggtgtacgccgccgccaccgaggacatggcctgcctgaccttcggctcccccgtgctgatgcggcacctgaccgcctccgaggccaagaagctgcccatccaggagttccacctgtcccggatcctgcaggagctgggcctgaaccaggagcagttcgtggacctgtgcatcctgctgggctccgactactgcgagtccatccggggcatcggccccaagcgggccgtggacctgatccagaagcacaagtccatcgaggagatcgtgcggcggctggaccccaacaagtaccccgtgcccgagaactggctgcacaaggaggcccaccagctgttcctggagcccgaggtgctggaccccgagtccgtggagctgaagtggtccgagcccaacgaggaggagctgatcaagttcatgtgcggcgagaagcagttctccgaggagcggatccggtccggcgtgaagcggctgtccaagtcccggcagggctccacccagggccggctggacgacttcttcaaggtgaccggctccctgtcctccgccaagcggaaggagcccgagcccaagggctccaccaagaagaaggccaagaccggcgccgccggcaagttcaagcggggcaagtccggcggctccaagcggaccgccgacggctccgagttcgagcccaagaagaagcggaaggtg

SEQ ID NO: 1239 - protein, 401 aa, synthetic construct
  REGION 1..401: note = Synthetic
MGIQGLAKLIADVAPSAIRENDIKSYFGRKVAIDASMSIYQFLIAVRQGGDVLQNEEGETTSHLMGMFYRTIRMMENGIKPVYVFDGKPPQLKSGELAKRSERRAEAEKQLQQAQAAGAEQEVEKFTKRLVKVTKQHNDECKHLLSLMGIPYLDAPSEAEASCAALVKAGKVYAAATEDMACLTFGSPVLMRHLTASEAKKLPIQEFHLSRILQELGLNQEQFVDLCILLGSDYCESIRGIGPKRAVDLIQKHKSIEEIVRRLDPNKYPVPENWLHKEAHQLFLEPEVLDPESVELKWSEPNEEELIKFMCGEKQFSEERIRSGVKRLSKSRQGSTQGRLDDFFKVTGSLSSAKRKEPEPKGSTKKKAKTGAAGKFKRGKSGGSKRTADGSEFEPKKKRKV

SEQ ID NO: 1240 - DNA, 5967 bp, synthetic construct
  misc_feature 1..5967: note = Synthetic
  source 1..5967: mol_type = other DNA
atgaagcggaccgccgacggctccgagttcgagtcccccaagaagaagcggaaggtggacaagaagtactccatcggcctggacatcggcaccaactccgtgggctgggccgtgatcaccgacgagtacaaggtgccctccaagaagttcaaggtgctgggcaacaccgaccggcactccatcaagaagaacctgatcggcgccctgctgttcgactccggcgagaccgccgaggccacccggctgaagcggaccgcccggcggcggtacacccggcggaagaaccggatctgctacctgcaggagatcttctccaacgagatggccaaggtggacgactccttcttccaccggctggaggagtccttcctggtggaggaggacaagaagcacgagcggcaccccatcttcggcaacatcgtggacgaggtggcctaccacgagaagtaccccaccatctaccacctgcggaagaagctggtggactccaccgacaaggccgacctgcggctgatctacctggccctggcccacatgatcaagttccggggccacttcctgatcgagggcgacctgaaccccgacaactccgacgtggacaagctgttcatccagctggtgcagacctacaaccagctgttcgaggagaaccccatcaacgcctccggcgtggacgccaaggccatcctgtccgcccggctgtccaagtcccggcggctggagaacctgatcgcccagctgcccggcgagaagaagaacggcctgttcggcaacctgatcgccctgtccctgggcctgacccccaacttcaagtccaacttcgacctggccgaggacgccaagctgcagctgtccaaggacacctacgacgacgacctggacaacctgctggcccagatcggcgaccagtacgccgacctgttcctggccgccaagaacctgtccgacgccatcctgctgtccgacatcctgcgggtgaacaccgagatcaccaaggcccccctgtccgcctccatgatcaagcggtacgacgagcaccaccaggacctgaccctgctgaaggccctggtgcggcagcagctgcccgagaagtacaaggagatcttcttcgaccagtccaagaacggctacgccggctacatcgacggcggcgcctcccaggaggagttctacaagttcatcaagcccatcctggagaagatggacggcaccgaggagctgctggtgaagctgaaccgggaggacctgctgcggaagcagcggaccttcgacaacggctccatcccccaccagatccacctgggcgagctgcacgccatcctgcggcggcaggaggacttctaccccttcctgaaggacaaccgggagaagatcgagaagatcctgaccttccggatcccctactacgtgggccccctggcccggggcaactcccggttcgcctggatgacccggaagtccgaggagaccatcaccccctggaacttcgaggaggtggtggacaagggcgcctccgcccagtccttcatcgagcggatgaccaacttcgacaagaacctgcccaacgagaaggtgctgcccaagcactccctgctgtacgagtacttcaccgtgtacaacgagctgaccaaggtgaagtacgtgaccgagggcatgcggaagcccgccttcctgtccggcgagcagaagaaggccatcgtggacctgctgttcaagaccaaccggaaggtgaccgtgaagcagctgaaggaggactacttcaagaagatcgagtgcttcgactccgtggagatctccggcgtggaggaccggttcaacgcctccctgggcacctaccacgacctgctgaagatcatcaaggacaaggacttcctggacaacgaggagaacgaggacatcctggaggacatcgtgctgaccctgaccctgttcgaggaccgggagatgatcgaggagcggctgaagacctacgcccacctgttcgacgacaaggtgatgaagcagctgaagcggcggcggtacaccggctggggccggctgtcccggaagctgatcaacggcatccgggacaagcagtccggcaagaccatcctggacttcctgaagtccgacggcttcgccaaccggaacttcatgcagctgatccacgacgactccctgaccttcaaggaggacatccagaaggcccaggtgtccggccagggcgactccctgcacgagcacatcgccaacctggccggctcccccgccatcaagaagggcatcctgcagaccgtgaaggtggtggacgagctggtgaaggtgatgggccggcacaagcccgagaacatcgtgatcgagatggcccgggagaaccagaccacccagaagggccagaagaactcccgggagcggatgaagcggatcgaggagggcatcaaggagctgggctcccagatcctgaaggagcaccccgtggagaacacccagctgcagaacgagaagctgtacctgtactacctgcagaacggccgggacatgtacgtggaccaggagctggacatcaaccggctgtccgactacgacgtggacgccatcgtgccccagtccttcctgaaggacgactccatcgacaacaaggtgctgacccggtccgacaagaaccggggcaagtccgacaacgtgccctccgaggaggtggtgaagaagatgaagaactactggcggcagctgctgaacgccaagctgatcacccagcggaagttcgacaacctgaccaaggccgagcggggcggcctgtccgagctggacaaggccggcttcatcaagcggcagctggtggagacccggcagatcaccaagcacgtggcccagatcctggactcccggatgaacaccaagtacgacgagaacgacaagctgatccgggaggtgaaggtgatcaccctgaagtccaagctggtgtccgacttccggaaggacttccagttctacaaggtgcgggagatcaacaactaccaccacgcccacgacgcctacctgaacgccgtggtgggcaccgccctgatcaagaagtaccccaagctggagtccgagttcgtgtacggcgactacaaggtgtacgacgtgcggaagatgatcgccaagtccgagcaggagatcggcaaggccaccgccaagtacttcttctactccaacatcatgaacttcttcaagaccgagatcaccctggccaacggcgagatccggaagcggcccctgatcgagaccaacggcgagaccggcgagatcgtgtgggacaagggccgggacttcgccaccgtgcggaaggtgctgtccatgccccaggtgaacatcgtgaagaagaccgaggtgcagaccggcggcttctccaaggagtccatcctgcccaagcggaactccgacaagctgatcgcccggaagaaggactgggaccccaagaagtacggcggcttcgactcccccaccgtggcctactccgtgctggtggtggccaaggtggagaagggcaagtccaagaagctgaagtccgtgaaggagctgctgggcatcaccatcatggagcggtcctccttcgagaagaaccccatcgacttcctggaggccaagggctacaaggaggtgaagaaggacctgatcatcaagctgcccaagtactccctgttcgagctggagaacggccggaagcggatgctggcctccgccggcgagctgcagaagggcaacgagctggccctgccctccaagtacgtgaacttcctgtacctggcctcccactacgagaagctgaagggctcccccgaggacaacgagcagaagcagctgttcgtggagcagcacaagcactacctggacgagatcatcgagcagatctccgagttctccaagcgggtgatcctggccgacgccaacctggacaaggtgctgtccgcctacaacaagcaccgggacaagcccatccgggagcaggccgagaacatcatccacctgttcaccctgaccaacctgggcgcccccgccgccttcaagtacttcgacaccaccatcgaccggaagcggtacacctccaccaaggaggtgctggacgccaccctgatccaccagtccatcaccggcctgtacgagacccggatcgacctgtcccagctgggcggcgactccggcggctcctccggcggctccaagcggaccgccgacggctccgagttcgagtcccccaagaagaagcggaaggtgtccggcggctcctccggcggctccatggactccatcaaggagaagtgcgactcctacaaggacgacctgctgctgcggatgggcctgaacgacaacaaggccggcatggagggcctggacaaggagaagatcaacaagatcatcatggaggccaccaagggctcccggttctacggcaacgagctgaagaaggagaagcaggtgaaccagcggatcgagaacatgatgcagcagaaggccgagatcacctcccagcagctgcggaaggcccagctgcaggtggaccggttcgccatggagctggagcagtcccggaacctgtccaacaccatcgtgcacatcgacatggacgccttctacgccgccgtggagatgcgggacaaccccgagctgaaggacaagcccatcgccgtgggctccatgtccatgctgtccacctccaactaccacgcccggcggttcggcgtgcgggccgccatgcccggcttcatcgccaagcggctgtgcccccagctgatcatcgtgccccccaacttcgacaagtaccgggccgtgtccaaggaggtgaaggagatcctggccgactacgaccccaacttcatggccatgtccctggacgaggcctacctgaacatcaccaagcacctggaggagcggcagaactggcccgaggacaagcggaagtacttcatcaagatgggcaactccgtggagaacgacaaccccggcaaggaggtgaacaagctgtccgaccacgagcggtccatctcccccctgctgttcgaggcctccccctccgacctgctgccccccggcgaccccttccaggtgaacttcgaggagcagaactccccccagatcctgcagaactccatcgtgttcggcacctccgccgaggaggtggtgaaggagatccggttccggatcgagcagaagaccaccctgaccgcctccgccggcatcgcccccaacaccatgctggccaaggtgtgctccgacaagaacaagcccaacggccagtaccagatcctgcccaaccggcaggccgtgatggacttcatcaaggacctgcccatccggaaggtgtccggcatcggcaaggtgaccgagaagatgctgaaggccctgggcatcatcacctgcaccgagctgtaccagcagcgggccctgctgtccctgctgttctccgagacctcctggcactacttcctgcacatctccctgggcctgggctccacctacctgacccgggaccgggtgcggaagtccatgtccgtggagcggaccttctccgagatcaacaaggccgaggagcagtactccctgtgcgaggagctgtgctccgagctggcccgggacctgcagaaggagggcctgaagggccggaccgtgaccatcaagctgaagaacgtgaacttcgaggtgaagacccgggcctccaccgtgtcctccgtggtgtccaccgccgaggagatcttcgccatcgccaaggagctgctgaagaccgagatcgaggccgacttcccccaccccctgcggctgcggctgatgggcgtgcggatctcctccttccccaacgaggaggaccggaagcaccagcagggcggcggctccggcaagcggaccgccgacggctccggcggcggctcccccaagaagaagcggaaggtgtccgagtccgccacccccgagtccgtgtccggctggcggctgttcaagaagatctcctag

SEQ ID NO: 1241 - DNA, 6522 bp, synthetic construct
  misc_feature 1..6522: note = Synthetic
  source 1..6522: mol_type = other DNA
gggaagctcagaataaacgctcaactttggccggatctgccaccatgaagcggaccgccgacggctccgagttcgagtcccccaagaagaagcggaaggtggacaagaagtactccatcggcctggacatcggcaccaactccgtgggctgggccgtgatcaccgacgagtacaaggtgccctccaagaagttcaaggtgctgggcaacaccgaccggcactccatcaagaagaacctgatcggcgccctgctgttcgactccggcgagaccgccgaggccacccggctgaagcggaccgcccggcggcggtacacccggcggaagaaccggatctgctacctgcaggagatcttctccaacgagatggccaaggtggacgactccttcttccaccggctggaggagtccttcctggtggaggaggacaagaagcacgagcggcaccccatcttcggcaacatcgtggacgaggtggcctaccacgagaagtaccccaccatctaccacctgcggaagaagctggtggactccaccgacaaggccgacctgcggctgatctacctggccctggcccacatgatcaagttccggggccacttcctgatcgagggcgacctgaaccccgacaactccgacgtggacaagctgttcatccagctggtgcagacctacaaccagctgttcgaggagaaccccatcaacgcctccggcgtggacgccaaggccatcctgtccgcccggctgtccaagtcccggcggctggagaacctgatcgcccagctgcccggcgagaagaagaacggcctgttcggcaacctgatcgccctgtccctgggcctgacccccaacttcaagtccaacttcgacctggccgaggacgccaagctgcagctgtccaaggacacctacgacgacgacctggacaacctgctggcccagatcggcgaccagtacgccgacctgttcctggccgccaagaacctgtccgacgccatcctgctgtccgacatcctgcgggtgaacaccgagatcaccaaggcccccctgtccgcctccatgatcaagcggtacgacgagcaccaccaggacctgaccctgctgaaggccctggtgcggcagcagctgcccgagaagtacaaggagatcttcttcgaccagtccaagaacggctacgccggctacatcgacggcggcgcctcccaggaggagttctacaagttcatcaagcccatcctggagaagatggacggcaccgaggagctgctggtgaagctgaaccgggaggacctgctgcggaagcagcggaccttcgacaacggctccatcccccaccagatccacctgggcgagctgcacgccatcctgcggcggcaggaggacttctaccccttcctgaaggacaaccgggagaagatcgagaagatcctgaccttccggatcccctactacgtgggccccctggcccggggcaactcccggttcgcctggatgacccggaagtccgaggagaccatcaccccctggaacttcgaggaggtggtggacaagggcgcctccgcccagtccttcatcgagcggatgaccaacttcgacaagaacctgcccaacgagaaggtgctgcccaagcactccctgctgtacgagtacttcaccgtgtacaacgagctgaccaaggtgaagtacgtgaccgagggcatgcggaagcccgccttcctgtccggcgagcagaagaaggccatcgtggacctgctgttcaagaccaaccggaaggtgaccgtgaagcagctgaaggaggactacttcaagaagatcgagtgcttcgactccgtggagatctccggcgtggaggaccggttcaacgcctccctgggcacctaccacgacctgctgaagatcatcaaggacaaggacttcctggacaacgaggagaacgaggacatcctggaggacatcgtgctgaccctgaccctgttcgaggaccgggagatgatcgaggagcggctgaagacctacgcccacctgttcgacgacaaggtgatgaagcagctgaagcggcggcggtacaccggctggggccggctgtcccggaagctgatcaacggcatccgggacaagcagtccggcaagaccatcctggacttcctgaagtccgacggcttcgccaaccggaacttcatgcagctgatccacgacgactccctgaccttcaaggaggacatccagaaggcccaggtgtccggccagggcgactccctgcacgagcacatcgccaacctggccggctcccccgccatcaagaagggcatcctgcagaccgtgaaggtggtggacgagctggtgaaggtgatgggccggcacaagcccgagaacatcgtgatcgagatggcccgggagaaccagaccacccagaagggccagaagaactcccgggagcggatgaagcggatcgaggagggcatcaaggagctgggctcccagatcctgaaggagcaccccgtggagaacacccagctgcagaacgagaagctgtacctgtactacctgcagaacggccgggacatgtacgtggaccaggagctggacatcaaccggctgtccgactacgacgtggacgccatcgtgccccagtccttcctgaaggacgactccatcgacaacaaggtgctgacccggtccgacaagaaccggggcaagtccgacaacgtgccctccgaggaggtggtgaagaagatgaagaactactggcggcagctgctgaacgccaagctgatcacccagcggaagttcgacaacctgaccaaggccgagcggggcggcctgtccgagctggacaaggccggcttcatcaagcggcagctggtggagacccggcagatcaccaagcacgtggcccagatcctggactcccggatgaacaccaagtacgacgagaacgacaagctgatccgggaggtgaaggtgatcaccctgaagtccaagctggtgtccgacttccggaaggacttccagttctacaaggtgcgggagatcaacaactaccaccacgcccacgacgcctacctgaacgccgtggtgggcaccgccctgatcaagaagtaccccaagctggagtccgagttcgtgtacggcgactacaaggtgtacgacgtgcggaagatgatcgccaagtccgagcaggagatcggcaaggccaccgccaagtacttcttctactccaacatcatgaacttcttcaagaccgagatcaccctggccaacggcgagatccggaagcggcccctgatcgagaccaacggcgagaccggcgagatcgtgtgggacaagggccgggacttcgccaccgtgcggaaggtgctgtccatgccccaggtgaacatcgtgaagaagaccgaggtgcagaccggcggcttctccaaggagtccatcctgcccaagcggaactccgacaagctgatcgcccggaagaaggactgggaccccaagaagtacggcggcttcgactcccccaccgtggcctactccgtgctggtggtggccaaggtggagaagggcaagtccaagaagctgaagtccgtgaaggagctgctgggcatcaccatcatggagcggtcctccttcgagaagaaccccatcgacttcctggaggccaagggctacaaggaggtgaagaaggacctgatcatcaagctgcccaagtactccctgttcgagctggagaacggccggaagcggatgctggcctccgccggcgagctgcagaagggcaacgagctggccctgccctccaagtacgtgaacttcctgtacctggcctcccactacgagaagctgaagggctcccccgaggacaacgagcagaagcagctgttcgtggagcagcacaagcactacctggacgagatcatcgagcagatctccgagttctccaagcgggtgatcctggccgacgccaacctggacaaggtgctgtccgcctacaacaagcaccgggacaagcccatccgggagcaggccgagaacatcatccacctgttcaccctgaccaacctgggcgcccccgccgccttcaagtacttcgacaccaccatcgaccggaagcggtacacctccaccaaggaggtgctggacgccaccctgatccaccagtccatcaccggcctgtacgagacccggatcgacctgtcccagctgggcggcgactccggcggctcctccggcggctccaagcggaccgccgacggctccgagttcgagtcccccaagaagaagcggaaggtgtccggcggctcctccggcggctccatggactccatcaaggagaagtgcgactcctacaaggacgacctgctgctgcggatgggcctgaacgacaacaaggccggcatggagggcctggacaaggagaagatcaacaagatcatcatggaggccaccaagggctcccggttctacggcaacgagctgaagaaggagaagcaggtgaaccagcggatcgagaacatgatgcagcagaaggccgagatcacctcccagcagctgcggaaggcccagctgcaggtggaccggttcgccatggagctggagcagtcccggaacctgtccaacaccatcgtgcacatcgacatggacgccttctacgccgccgtggagatgcgggacaaccccgagctgaaggacaagcccatcgccgtgggctccatgtccatgctgtccacctccaactaccacgcccggcggttcggcgtgcgggccgccatgcccggcttcatcgccaagcggctgtgcccccagctgatcatcgtgccccccaacttcgacaagtaccgggccgtgtccaaggaggtgaaggagatcctggccgactacgaccccaacttcatggccatgtccctggacgaggcctacctgaacatcaccaagcacctggaggagcggcagaactggcccgaggacaagcggaagtacttcatcaagatgggcaactccgtggagaacgacaaccccggcaaggaggtgaacaagctgtccgaccacgagcggtccatctcccccctgctgttcgaggcctccccctccgacctgctgccccccggcgaccccttccaggtgaacttcgaggagcagaactccccccagatcctgcagaactccatcgtgttcggcacctccgccgaggaggtggtgaaggagatccggttccggatcgagcagaagaccaccctgaccgcctccgccggcatcgcccccaacaccatgctggccaaggtgtgctccgacaagaacaagcccaacggccagtaccagatcctgcccaaccggcaggccgtgatggacttcatcaaggacctgcccatccggaaggtgtccggcatcggcaaggtgaccgagaagatgctgaaggccctgggcatcatcacctgcaccgagctgtaccagcagcgggccctgctgtccctgctgttctccgagacctcctggcactacttcctgcacatctccctgggcctgggctccacctacctgacccgggaccgggtgcggaagtccatgtccgtggagcggaccttctccgagatcaacaaggccgaggagcagtactccctgtgcgaggagctgtgctccgagctggcccgggacctgcagaaggagggcctgaagggccggaccgtgaccatcaagctgaagaacgtgaacttcgaggtgaagacccgggcctccaccgtgtcctccgtggtgtccaccgccgaggagatcttcgccatcgccaaggagctgctgaagaccgagatcgaggccgacttcccccaccccctgcggctgcggctgatgggcgtgcggatctcctccttccccaacgaggaggaccggaagcaccagcagggcggcggctccggcaagcggaccgccgacggctccggcggcggctcccccaagaagaagcggaaggtgtccgagtccgccacccccgagtccgtgtccggctggcggctgttcaagaagatctcctagctagcaccagcctcaagaacacccgaatggagtctctaagctacataataccaacttacactttacaaaatgttgtcccccaaaatgtagccattcgtatctgctcctaataaaaagaaagtttcttcacattctctcgagaaaaaaaaaaaatggaaaaaaaaaaaacggaaaaaaaaaaaaggtaaaaaaaaaaaatataaaaaaaaaaaacataaaaaaaaaaaacgaaaaaaaaaaaacgtaaaaaaaaaaaactcaaaaaaaaaaaagataaaaaaaaaaaacctaaaaaaaaaaaatgtaaaaaaaaaaaagggaaaaaaaaaaaacgcaaaaaaaaaaaacacaaaaaaaaaaaatgcaaaaaaaaaaaatcgaaaaaaaaaaaatctaaaaaaaaaaaacgaaaaaaaaaaaacccaaaaaaaaaaaagacaaaaaaaaaaaatagaaaaaaaaaaagttaaaaaaaaaaaactgaaaaaaaaaaaatttaaaaaaaaaaaat

SEQ ID NO: 1242 - protein, 1988 aa, synthetic construct
  REGION 1..1988: note = Synthetic
MKRTADGSEFESPKKKRKVDKKYSIGLDIGTNSVGWAVITDEYKVPSKKFKVLGNTDRHSIKKNLIGALLFDSGETAEATRLKRTARRRYTRRKNRICYLQEIFSNEMAKVDDSFFHRLEESFLVEEDKKHERHPIFGNIVDEVAYHEKYPTIYHLRKKLVDSTDKADLRLIYLALAHMIKFRGHFLIEGDLNPDNSDVDKLFIQLVQTYNQLFEENPINASGVDAKAILSARLSKSRRLENLIAQLPGEKKNGLFGNLIALSLGLTPNFKSNFDLAEDAKLQLSKDTYDDDLDNLLAQIGDQYADLFLAAKNLSDAILLSDILRVNTEITKAPLSASMIKRYDEHHQDLTLLKALVRQQLPEKYKEIFFDQSKNGYAGYIDGGASQEEFYKFIKPILEKMDGTEELLVKLNREDLLRKQRTFDNGSIPHQIHLGELHAILRRQEDFYPFLKDNREKIEKILTFRIPYYVGPLARGNSRFAWMTRKSEETITPWNFEEVVDKGASAQSFIERMTNFDKNLPNEKVLPKHSLLYEYFTVYNELTKVKYVTEGMRKPAFLSGEQKKAIVDLLFKTNRKVTVKQLKEDYFKKIECFDSVEISGVEDRFNASLGTYHDLLKIIKDKDFLDNEENEDILEDIVLTLTLFEDREMIEERLKTYAHLFDDKVMKQLKRRRYTGWGRLSRKLINGIRDKQSGKTILDFLKSDGFANRNFMQLIHDDSLTFKEDIQKAQVSGQGDSLHEHIANLAGSPAIKKGILQTVKVVDELVKVMGRHKPENIVIEMARENQTTQKGQKNSRERMKRIEEGIKELGSQILKEHPVENTQLQNEKLYLYYLQNGRDMYVDQELDINRLSDYDVDAIVPQSFLKDDSIDNKVLTRSDKNRGKSDNVPSEEVVKKMKNYWRQLLNAKLITQRKFDNLTKAERGGLSELDKAGFIKRQLVETRQITKHVAQILDSRMNTKYDENDKLIREVKVITLKSKLVSDFRKDFQFYKVREINNYHHAHDAYLNAVVGTALIKKYPKLESEFVYGDYKVYDVRKMIAKSEQEIGKATAKYFFYSNIMNFFKTEITLANGEIRKRPLIETNGETGEIVWDKGRDFATVRKVLSMPQVNIVKKTEVQTGGFSKESILPKRNSDKLIARKKDWDPKKYGGFDSPTVAYSVLVVAKVEKGKSKKLKSVKELLGITIMERSSFEKNPIDFLEAKGYKEVKKDLIIKLPKYSLFELENGRKRMLASAGELQKGNELALPSKYVNFLYLASHYEKLKGSPEDNEQKQLFVEQHKHYLDEIIEQISEFSKRVILADANLDKVLSAYNKHRDKPIREQAENIIHLFTLTNLGAPAAFKYFDTTIDRKRYTSTKEVLDATLIHQSITGLYETRIDLSQLGGDSGGSSGGSKRTADGSEFESPKKKRKVSGGSSGGSMDSIKEKCDSYKDDLLLRMGLNDNKAGMEGLDKEKINKIIMEATKGSRFYGNELKKEKQVNQRIENMMQQKAEITSQQLRKAQLQVDRFAMELEQSRNLSNTIVHIDMDAFYAAVEMRDNPELKDKPIAVGSMSMLSTSNYHARRFGVRAAMPGFIAKRLCPQLIIVPPNFDKYRAVSKEVKEILADYDPNFMAMSLDEAYLNITKHLEERQNWPEDKRKYFIKMGNSVENDNPGKEVNKLSDHERSISPLLFEASPSDLLPPGDPFQVNFEEQNSPQILQNSIVFGTSAEEVVKEIRFRIEQKTTLTASAGIAPNTMLAKVCSDKNKPNGQYQILPNRQAVMDFIKDLPIRKVSGIGKVTEKMLKALGIITCTELYQQRALLSLLFSETSWHYFLHISLGLGSTYLTRDRVRKSMSVERTFSEINKAEEQYSLCEELCSELARDLQKEGLKGRTVTIKLKNVNFEVKTRASTVSSVVSTAEEIFAIAKELLKTEIEADFPHPLRLRLMGVRISSFPNEEDRKHQQGGGSGKRTADGSGGGSPKKKRKVSESATPESVSGWRLFKKIS

SEQ ID NO: 1243 - DNA, 5907 bp, synthetic construct
  misc_feature 1..5907: note = Synthetic
  source 1..5907: mol_type = other DNA
atgaagcggaccgccgacggctccgagttcgagtcccccaagaagaagcggaaggtggacaagaagtactccatcggcctggacatcggcaccaactccgtgggctgggccgtgatcaccgacgagtacaaggtgccctccaagaagttcaaggtgctgggcaacaccgaccggcactccatcaagaagaacctgatcggcgccctgctgttcgactccggcgagaccgccgaggccacccggctgaagcggaccgcccggcggcggtacacccggcggaagaaccggatctgctacctgcaggagatcttctccaacgagatggccaaggtggacgactccttcttccaccggctggaggagtccttcctggtggaggaggacaagaagcacgagcggcaccccatcttcggcaacatcgtggacgaggtggcctaccacgagaagtaccccaccatctaccacctgcggaagaagctggtggactccaccgacaaggccgacctgcggctgatctacctggccctggcccacatgatcaagttccggggccacttcctgatcgagggcgacctgaaccccgacaactccgacgtggacaagctgttcatccagctggtgcagacctacaaccagctgttcgaggagaaccccatcaacgcctccggcgtggacgccaaggccatcctgtccgcccggctgtccaagtcccggcggctggagaacctgatcgcccagctgcccggcgagaagaagaacggcctgttcggcaacctgatcgccctgtccctgggcctgacccccaacttcaagtccaacttcgacctggccgaggacgccaagctgcagctgtccaaggacacctacgacgacgacctggacaacctgctggcccagatcggcgaccagtacgccgacctgttcctggccgccaagaacctgtccgacgccatcctgctgtccgacatcctgcgggtgaacaccgagatcaccaaggcccccctgtccgcctccatgatcaagcggtacgacgagcaccaccaggacctgaccctgctgaaggccctggtgcggcagcagctgcccgagaagtacaaggagatcttcttcgaccagtccaagaacggctacgccggctacatcgacggcggcgcctcccaggaggagttctacaagttcatcaagcccatcctggagaagatggacggcaccgaggagctgctggtgaagctgaaccgggaggacctgctgcggaagcagcggaccttcgacaacggctccatcccccaccagatccacctgggcgagctgcacgccatcctgcggcggcaggaggacttctaccccttcctgaaggacaaccgggagaagatcgagaagatcctgaccttccggatcccctactacgtgggccccctggcccggggcaactcccggttcgcctggatgacccggaagtccgaggagaccatcaccccctggaacttcgaggaggtggtggacaagggcgcctccgcccagtccttcatcgagcggatgaccaacttcgacaagaacctgcccaacgagaaggtgctgcccaagcactccctgctgtacgagtacttcaccgtgtacaacgagctgaccaaggtgaagtacgtgaccgagggcatgcggaagcccgccttcctgtccggcgagcagaagaaggccatcgtggacctgctgttcaagaccaaccggaaggtgaccgtgaagcagctgaaggaggactacttcaagaagatcgagtgcttcgactccgtggagatctccggcgtggaggaccggttcaacgcctccctgggcacctaccacgacctgctgaagatcatcaaggacaaggacttcctggacaacgaggagaacgaggacatcctggaggacatcgtgctgaccctgaccctgttcgaggaccgggagatgatcgaggagcggctgaagacctacgcccacctgttcgacgacaaggtgatgaagcagctgaagcggcggcggtacaccggctggggccggctgtcccggaagctgatcaacggcatccgggacaagcagtccggcaagaccatcctggacttcctgaagtccgacggcttcgccaaccggaacttcatgcagctgatccacgacgactccctgaccttcaaggaggacatccagaaggcccaggtgtccggccagggcgactccctgcacgagcacatcgccaacctggccggctcccccgccatcaagaagggcatcctgcagaccgtgaaggtggtggacgagctggtgaaggtgatgggccggcacaagcccgagaacatcgtgatcgagatggcccgggagaaccagaccacccagaagggccagaagaactcccgggagcggatgaagcggatcgaggagggcatcaaggagctgggctcccagatcctgaaggagcaccccgtggagaacacccagctgcagaacgagaagctgtacctgtactacctgcagaacggccgggacatgtacgtggaccaggagctggacatcaaccggctgtccgactacgacgtggacgccatcgtgccccagtccttcctgaaggacgactccatcgacaacaaggtgctgacccggtccgacaagaaccggggcaagtccgacaacgtgccctccgaggaggtggtgaagaagatgaagaactactggcggcagctgctgaacgccaagctgatcacccagcggaagttcgacaacctgaccaaggccgagcggggcggcctgtccgagctggacaaggccggcttcatcaagcggcagctggtggagacccggcagatcaccaagcacgtggcccagatcctggactcccggatgaacaccaagtacgacgagaacgacaagctgatccgggaggtgaaggtgatcaccctgaagtccaagctggtgtccgacttccggaaggacttccagttctacaaggtgcgggagatcaacaactaccaccacgcccacgacgcctacctgaacgccgtggtgggcaccgccctgatcaagaagtaccccaagctggagtccgagttcgtgtacggcgactacaaggtgtacgacgtgcggaagatgatcgccaagtccgagcaggagatcggcaaggccaccgccaagtacttcttctactccaacatcatgaacttcttcaagaccgagatcaccctggccaacggcgagatccggaagcggcccctgatcgagaccaacggcgagaccggcgagatcgtgtgggacaagggccgggacttcgccaccgtgcggaaggtgctgtccatgccccaggtgaacatcgtgaagaagaccgaggtgcagaccggcggcttctccaaggagtccatcctgcccaagcggaactccgacaagctgatcgcccggaagaaggactgggaccccaagaagtacggcggcttcgactcccccaccgtggcctactccgtgctggtggtggccaaggtggagaagggcaagtccaagaagctgaagtccgtgaaggagctgctgggcatcaccatcatggagcggtcctccttcgagaagaaccccatcgacttcctggaggccaagggctacaaggaggtgaagaaggacctgatcatcaagctgcccaagtactccctgttcgagctggagaacggccggaagcggatgctggcctccgccggcgagctgcagaagggcaacgagctggccctgccctccaagtacgtgaacttcctgtacctggcctcccactacgagaagctgaagggctcccccgaggacaacgagcagaagcagctgttcgtggagcagcacaagcactacctggacgagatcatcgagcagatctccgagttctccaagcgggtgatcctggccgacgccaacctggacaaggtgctgtccgcctacaacaagcaccgggacaagcccatccgggagcaggccgagaacatcatccacctgttcaccctgaccaacctgggcgcccccgccgccttcaagtacttcgacaccaccatcgaccggaagcggtacacctccaccaaggaggtgctggacgccaccctgatccaccagtccatcaccggcctgtacgagacccggatcgacctgtcccagctgggcggcgactccggcggctcctccggcggctccaagcggaccgccgacggctccgagttcgagtcccccaagaagaagcggaaggtgtccggcggctcctccggcggctccatggactccatcaaggagaagtgcgactcctacaaggacgacctgctgctgcggatgggcctgaacgacaacaaggccggcatggagggcctggacaaggagaagatcaacaagatcatcatggaggccaccaagggctcccggttctacggcaacgagctgaagaaggagaagcaggtgaaccagcggatcgagaacatgatgcagcagaaggccgagatcacctcccagcagctgcggaaggcccagctgcaggtggaccggttcgccatggagctggagcagtcccggaacctgtccaacaccatcgtgcacatcgacatggacgccttctacgccgccgtggagatgcgggacaaccccgagctgaaggacaagcccatcgccgtgggctccatgtccatgctgtccacctccaactaccacgcccggcggttcggcgtgcgggccgccatgcccggcttcatcgccaagcggctgtgcccccagctgatcatcgtgccccccaacttcgacaagtaccgggccgtgtccaaggaggtgaaggagatcctggccgactacgaccccaacttcatggccatgtccctggacgaggcctacctgaacatcaccaagcacctggaggagcggcagaactggcccgaggacaagcggaagtacttcatcaagatgggcaactccgtggagaacgacaaccccggcaaggaggtgaacaagctgtccgaccacgagcggtccatctcccccctgctgttcgaggcctccccctccgacctgctgccccccggcgaccccttccaggtgaacttcgaggagcagaactccccccagatcctgcagaactccatcgtgttcggcacctccgccgaggaggtggtgaaggagatccggttccggatcgagcagaagaccaccctgaccgcctccgccggcatcgcccccaacaccatgctggccaaggtgtgctccgacaagaacaagcccaacggccagtaccagatcctgcccaaccggcaggccgtgatggacttcatcaaggacctgcccatccggaaggtgtccggcatcggcaaggtgaccgagaagatgctgaaggccctgggcatcatcacctgcaccgagctgtaccagcagcgggccctgctgtccctgctgttctccgagacctcctggcactacttcctgcacatctccctgggcctgggctccacctacctgacccgggaccgggtgcggaagtccatgtccgtggagcggaccttctccgagatcaacaaggccgaggagcagtactccctgtgcgaggagctgtgctccgagctggcccgggacctgcagaaggagggcctgaagggccggaccgtgaccatcaagctgaagaacgtgaacttcgaggtgaagacccgggcctccaccgtgtcctccgtggtgtccaccgccgaggagatcttcgccatcgccaaggagctgctgaagaccgagatcgaggccgacttcccccaccccctgcggctgcggctgatgggcgtgcggatctcctccttccccaacgaggaggaccggaagcaccagcagggcggcggctccggcaagcggaccgccgacggctccggcggcggctcccccaagaagaagcggaaggtg

SEQ ID NO: 1244 - protein, 1969 aa, synthetic construct
  REGION 1..1969: note = Synthetic
MKRTADGSEFESPKKKRKVDKKYSIGLDIGTNSVGWAVITDEYKVPSKKFKVLGNTDRHSIKKNLIGALLFDSGETAEATRLKRTARRRYTRRKNRICYLQEIFSNEMAKVDDSFFHRLEESFLVEEDKKHERHPIFGNIVDEVAYHEKYPTIYHLRKKLVDSTDKADLRLIYLALAHMIKFRGHFLIEGDLNPDNSDVDKLFIQLVQTYNQLFEENPINASGVDAKAILSARLSKSRRLENLIAQLPGEKKNGLFGNLIALSLGLTPNFKSNFDLAEDAKLQLSKDTYDDDLDNLLAQIGDQYADLFLAAKNLSDAILLSDILRVNTEITKAPLSASMIKRYDEHHQDLTLLKALVRQQLPEKYKEIFFDQSKNGYAGYIDGGASQEEFYKFIKPILEKMDGTEELLVKLNREDLLRKQRTFDNGSIPHQIHLGELHAILRRQEDFYPFLKDNREKIEKILTFRIPYYVGPLARGNSRFAWMTRKSEETITPWNFEEVVDKGASAQSFIERMTNFDKNLPNEKVLPKHSLLYEYFTVYNELTKVKYVTEGMRKPAFLSGEQKKAIVDLLFKTNRKVTVKQLKEDYFKKIECFDSVEISGVEDRFNASLGTYHDLLKIIKDKDFLDNEENEDILEDIVLTLTLFEDREMIEERLKTYAHLFDDKVMKQLKRRRYTGWGRLSRKLINGIRDKQSGKTILDFLKSDGFANRNFMQLIHDDSLTFKEDIQKAQVSGQGDSLHEHIANLAGSPAIKKGILQTVKVVDELVKVMGRHKPENIVIEMARENQTTQKGQKNSRERMKRIEEGIKELGSQILKEHPVENTQLQNEKLYLYYLQNGRDMYVDQELDINRLSDYDVDAIVPQSFLKDDSIDNKVLTRSDKNRGKSDNVPSEEVVKKMKNYWRQLLNAKLITQRKFDNLTKAERGGLSELDKAGFIKRQLVETRQITKHVAQILDSRMNTKYDENDKLIREVKVITLKSKLVSDFRKDFQFYKVREINNYHHAHDAYLNAVVGTALIKKYPKLESEFVYGDYKVYDVRKMIAKSEQEIGKATAKYFFYSNIMNFFKTEITLANGEIRKRPLIETNGETGEIVWDKGRDFATVRKVLSMPQVNIVKKTEVQTGGFSKESILPKRNSDKLIARKKDWDPKKYGGFDSPTVAYSVLVVAKVEKGKSKKLKSVKELLGITIMERSSFEKNPIDFLEAKGYKEVKKDLIIKLPKYSLFELENGRKRMLASAGELQKGNELALPSKYVNFLYLASHYEKLKGSPEDNEQKQLFVEQHKHYLDEIIEQISEFSKRVILADANLDKVLSAYNKHRDKPIREQAENIIHLFTLTNLGAPAAFKYFDTTIDRKRYTSTKEVLDATLIHQSITGLYETRIDLSQLGGDSGGSSGGSKRTADGSEFESPKKKRKVSGGSSGGSMDSIKEKCDSYKDDLLLRMGLNDNKAGMEGLDKEKINKIIMEATKGSRFYGNELKKEKQVNQRIENMMQQKAEITSQQLRKAQLQVDRFAMELEQSRNLSNTIVHIDMDAFYAAVEMRDNPELKDKPIAVGSMSMLSTSNYHARRFGVRAAMPGFIAKRLCPQLIIVPPNFDKYRAVSKEVKEILADYDPNFMAMSLDEAYLNITKHLEERQNWPEDKRKYFIKMGNSVENDNPGKEVNKLSDHERSISPLLFEASPSDLLPPGDPFQVNFEEQNSPQILQNSIVFGTSAEEVVKEIRFRIEQKTTLTASAGIAPNTMLAKVCSDKNKPNGQYQILPNRQAVMDFIKDLPIRKVSGIGKVTEKMLKALGIITCTELYQQRALLSLLFSETSWHYFLHISLGLGSTYLTRDRVRKSMSVERTFSEINKAEEQYSLCEELCSELARDLQKEGLKGRTVTIKLKNVNFEVKTRASTVSSVVSTAEEIFAIAKELLKTEIEADFPHPLRLRLMGVRISSFPNEEDRKHQQGGGSGKRTADGSGGGSPKKKRKV

SEQ ID NO: 1245 - DNA, 5964 bp, synthetic construct
  misc_feature 1..5964: note = Synthetic
  source 1..5964: mol_type = other DNA
atgaagcggaccgccgacggctccgagttcgagtcccccaagaagaagcggaaggtggacaagaagtactccatcggcctggacatcggcaccaactccgtgggctgggccgtgatcaccgacgagtacaaggtgccctccaagaagttcaaggtgctgggcaacaccgaccggcactccatcaagaagaacctgatcggcgccctgctgttcgactccggcgagaccgccgaggccacccggctgaagcggaccgcccggcggcggtacacccggcggaagaaccggatctgctacctgcaggagatcttctccaacgagatggccaaggtggacgactccttcttccaccggctggaggagtccttcctggtggaggaggacaagaagcacgagcggcaccccatcttcggcaacatcgtggacgaggtggcctaccacgagaagtaccccaccatctaccacctgcggaagaagctggtggactccaccgacaaggccgacctgcggctgatctacctggccctggcccacatgatcaagttccggggccacttcctgatcgagggcgacctgaaccccgacaactccgacgtggacaagctgttcatccagctggtgcagacctacaaccagctgttcgaggagaaccccatcaacgcctccggcgtggacgccaaggccatcctgtccgcccggctgtccaagtcccggcggctggagaacctgatcgcccagctgcccggcgagaagaagaacggcctgttcggcaacctgatcgccctgtccctgggcctgacccccaacttcaagtccaacttcgacctggccgaggacgccaagctgcagctgtccaaggacacctacgacgacgacctggacaacctgctggcccagatcggcgaccagtacgccgacctgttcctggccgccaagaacctgtccgacgccatcctgctgtccgacatcctgcgggtgaacaccgagatcaccaaggcccccctgtccgcctccatgatcaagcggtacgacgagcaccaccaggacctgaccctgctgaaggccctggtgcggcagcagctgcccgagaagtacaaggagatcttcttcgaccagtccaagaacggctacgccggctacatcgacggcggcgcctcccaggaggagttctacaagttcatcaagcccatcctggagaagatggacggcaccgaggagctgctggtgaagctgaaccgggaggacctgctgcggaagcagcggaccttcgacaacggctccatcccccaccagatccacctgggcgagctgcacgccatcctgcggcggcaggaggacttctaccccttcctgaaggacaaccgggagaagatcgagaagatcctgaccttccggatcccctactacgtgggccccctggcccggggcaactcccggttcgcctggatgacccggaagtccgaggagaccatcaccccctggaacttcgaggaggtggtggacaagggcgcctccgcccagtccttcatcgagcggatgaccaacttcgacaagaacctgcccaacgagaaggtgctgcccaagcactccctgctgtacgagtacttcaccgtgtacaacgagctgaccaaggtgaagtacgtgaccgagggcatgcggaagcccgccttcctgtccggcgagcagaagaaggccatcgtggacctgctgttcaagaccaaccggaaggtgaccgtgaagcagctgaaggaggactacttcaagaagatcgagtgcttcgactccgtggagatctccggcgtggaggaccggttcaacgcctccctgggcacctaccacgacctgctgaagatcatcaaggacaaggacttcctggacaacgaggagaacgaggacatcctggaggacatcgtgctgaccctgaccctgttcgaggaccgggagatgatcgaggagcggctgaagacctacgcccacctgttcgacgacaaggtgatgaagcagctgaagcggcggcggtacaccggctggggccggctgtcccggaagctgatcaacggcatccgggacaagcagtccggcaagaccatcctggacttcctgaagtccgacggcttcgccaaccggaacttcatgcagctgatccacgacgactccctgaccttcaaggaggacatccagaaggcccaggtgtccggccagggcgactccctgcacgagcacatcgccaacctggccggctcccccgccatcaagaagggcatcctgcagaccgtgaaggtggtggacgagctggtgaaggtgatgggccggcacaagcccgagaacatcgtgatcgagatggcccgggagaaccagaccacccagaagggccagaagaactcccgggagcggatgaagcggatcgaggagggcatcaaggagctgggctcccagatcctgaaggagcaccccgtggagaacacccagctgcagaacgagaagctgtacctgtactacctgcagaacggccgggacatgtacgtggaccaggagctggacatcaaccggctgtccgactacgacgtggacgccatcgtgccccagtccttcctgaaggacgactccatcgacaacaaggtgctgacccggtccgacaagaaccggggcaagtccgacaacgtgccctccgaggaggtggtgaagaagatgaagaactactggcggcagctgctgaacgccaagctgatcacccagcggaagttcgacaacctgaccaaggccgagcggggcggcctgtccgagctggacaaggccggcttcatcaagcggcagctggtggagacccggcagatcaccaagcacgtggcccagatcctggactcccggatgaacaccaagtacgacgagaacgacaagctgatccgggaggtgaaggtgatcaccctgaagtccaagctggtgtccgacttccggaaggacttccagttctacaaggtgcgggagatcaacaactaccaccacgcccacgacgcctacctgaacgccgtggtgggcaccgccctgatcaagaagtaccccaagctggagtccgagttcgtgtacggcgactacaaggtgtacgacgtgcggaagatgatcgccaagtccgagcaggagatcggcaaggccaccgccaagtacttcttctactccaacatcatgaacttcttcaagaccgagatcaccctggccaacggcgagatccggaagcggcccctgatcgagaccaacggcgagaccggcgagatcgtgtgggacaagggccgggacttcgccaccgtgcggaaggtgctgtccatgccccaggtgaacatcgtgaagaagaccgaggtgcagaccggcggcttctccaaggagtccatcctgcccaagcggaactccgacaagctgatcgcccggaagaaggactgggaccccaagaagtacggcggcttcgactcccccaccgtggcctactccgtgctggtggtggccaaggtggagaagggcaagtccaagaagctgaagtccgtgaaggagctgctgggcatcaccatcatggagcggtcctccttcgagaagaaccccatcgacttcctggaggccaagggctacaaggaggtgaagaaggacctgatcatcaagctgcccaagtactccctgttcgagctggagaacggccggaagcggatgctggcctccgccggcgagctgcagaagggcaacgagctggccctgccctccaagtacgtgaacttcctgtacctggcctcccactacgagaagctgaagggctcccccgaggacaacgagcagaagcagctgttcgtggagcagcacaagcactacctggacgagatcatcgagcagatctccgagttctccaagcgggtgatcctggccgacgccaacctggacaaggtgctgtccgcctacaacaagcaccgggacaagcccatccgggagcaggccgagaacatcatccacctgttcaccctgaccaacctgggcgcccccgccgccttcaagtacttcgacaccaccatcgaccggaagcggtacacctccaccaaggaggtgctggacgccaccctgatccaccagtccatcaccggcctgtacgagacccggatcgacctgtcccagctgggcggcgactccggcggctcctccggcggctccaagcggaccgccgacggctccgagttcgagtcccccaagaagaagcggaaggtgtccggcggctcctccggcggctccatggacaacaccaaggagaaggacaacttcaaggacgacctgctgctgcggatgggcctgaacgacaacaaggccggcatggagggcctggacaaggagaagatcaacaagatcatcatggaggccaccaagggctcccggttctacggcaacgagctgaagaaggagaagcaggtgaaccagcggatcgagaacatgatgcagcagaaggcccagatcacctcccagcagctgcggaaggcccagctgcaggtggacaagttcgccatggagctggagcggaaccggaacctgaacaacaccatcgtgcacgtggacatggacgccttctacgccgccgtggagatgcgggacaaccccgagctgaaggacaagcccatcgccgtgggctccatgtccatgctggccacctccaactaccacgcccggcggttcggcgtgcgggccgccatgcccggcttcatcgccaagcggctgtgcccccagctgatcatcgtgccccccaacttcgacaagtaccgggccgtgtccaaggaggtgaaggagatcctggccgagtacgaccccaacttcatggccatgtccctggacgaggcctacctgaacatcacccagcacctgcaggagcggcaggactggcccgaggacaagcggcggtacttcatcaagatgggcaactacctgaagatcgacaccccccggcaggaggccaacgagctgaccgagtacgagcggtccatctcccccctgctgttcgaggactccccccccgacctgcagccccagggctcccccttccagctgaactccgaggagcagaacaacccccagatcgcccagaactccgtggtgttcggcacctccgccgaggaggtggtgaaggagatccggttccggatcgagcagaagaccaccctgaccgcctccgccggcatcgcccccaacaccatgctggccaaggtgtgctccgacaagaacaagcccaacggccagtaccagatcctgccctcccggtccgccgtgatggacttcatcaaggacctgcccatccggaaggtgtccggcatcggcaaggtgaccgagaagatgctgatggccctgggcatcgtgacctgcaccgagctgtaccagcagcgggccctgctgtccctgctgttctccgagacctcctggcactacttcctgcacatcgccctgggcctgggctccaccgacctggcccgggaccgggtgcggaagtccatgtccgtggagcggaccttctccgagatctccaagaccgaggagcagtactccctgtgccaggagctgtgcgccgagctggcccacgacctgcagaaggagggcctgaagggccggaccgtgaccatcaagctgaagaacgtgaacttcgaggtgaagacccgggcctccaccgtgcccgccgccatctccaccgccgaggagatcttcgccatcgccaaggagctgctgcggaccgaggtgaacgtgggctccccccaccccctgcggctgcggctgatgggcgtgcggatgtccaccttctcctccgaggacgaccggaagcaccagcagggcggcggctccggcaagcggaccgccgacggctccggcggcggctcccccaagaagaagcggaaggtgtccgagtccgccacccccgagtccgtgtccggctggcggctgttcaagaagatctcctag

SEQ ID NO: 1246 - DNA, 6519 bp, synthetic construct
  misc_feature 1..6519: note = Synthetic
  source 1..6519: mol_type = other DNA
gggaagctcagaataaacgctcaactttggccggatctgccaccatgaagcggaccgccgacggctccgagttcgagtcccccaagaagaagcggaaggtggacaagaagtactccatcggcctggacatcggcaccaactccgtgggctgggccgtgatcaccgacgagtacaaggtgccctccaagaagttcaaggtgctgggcaacaccgaccggcactccatcaagaagaacctgatcggcgccctgctgttcgactccggcgagaccgccgaggccacccggctgaagcggaccgcccggcggcggtacacccggcggaagaaccggatctgctacctgcaggagatcttctccaacgagatggccaaggtggacgactccttcttccaccggctggaggagtccttcctggtggaggaggacaagaagcacgagcggcaccccatcttcggcaacatcgtggacgaggtggcctaccacgagaagtaccccaccatctaccacctgcggaagaagctggtggactccaccgacaaggccgacctgcggctgatctacctggccctggcccacatgatcaagttccggggccacttcctgatcgagggcgacctgaaccccgacaactccgacgtggacaagctgttcatccagctggtgcagacctacaaccagctgttcgaggagaaccccatcaacgcctccggcgtggacgccaaggccatcctgtccgcccggctgtccaagtcccggcggctggagaacctgatcgcccagctgcccggcgagaagaagaacggcctgttcggcaacctgatcgccctgtccctgggcctgacccccaacttcaagtccaacttcgacctggccgaggacgccaagctgcagctgtccaaggacacctacgacgacgacctggacaacctgctggcccagatcggcgaccagtacgccgacctgttcctggccgccaagaacctgtccgacgccatcctgctgtccgacatcctgcgggtgaacaccgagatcaccaaggcccccctgtccgcctccatgatcaagcggtacgacgagcaccaccaggacctgaccctgctgaaggccctggtgcggcagcagctgcccgagaagtacaaggagatcttcttcgaccagtccaagaacggctacgccggctacatcgacggcggcgcctcccaggaggagttctacaagttcatcaagcccatcctggagaagatggacggcaccgaggagctgctggtgaagctgaaccgggaggacctgctgcggaagcagcggaccttcgacaacggctccatcccccaccagatccacctgggcgagctgcacgccatcctgcggcggcaggaggacttctaccccttcctgaaggacaaccgggagaagatcgagaagatcctgaccttccggatcccctactacgtgggccccctggcccggggcaactcccggttcgcctggatgacccggaagtccgaggagaccatcaccccctggaacttcgaggaggtggtggacaagggcgcctccgcccagtccttcatcgagcggatgaccaacttcgacaagaacctgcccaacgagaaggtgctgcccaagcactccctgctgtacgagtacttcaccgtgtacaacgagctgaccaaggtgaagtacgtgaccgagggcatgcggaagcccgccttcctgtccggcgagcagaagaaggccatcgtggacctgctgttcaagaccaaccggaaggtgaccgtgaagcagctgaaggaggactacttcaagaagatcgagtgcttcgactccgtggagatctccggcgtggaggaccggttcaacgcctccctgggcacctaccacgacctgctgaagatcatcaaggacaaggacttcctggacaacgaggagaacgaggacatcctggaggacatcgtgctgaccctgaccctgttcgaggaccgggagatgatcgaggagcggctgaagacctacgcccacctgttcgacgacaaggtgatgaagcagctgaagcggcggcggtacaccggctggggccggctgtcccggaagctgatcaacggcatccgggacaagcagtccggcaagaccatcctggacttcctgaagtccgacggcttcgccaaccggaacttcatgcagctgatccacgacgactccctgaccttcaaggaggacatccagaaggcccaggtgtccggccagggcgactccctgcacgagcacatcgccaacctggccggctcccccgccatcaagaagggcatcctgcagaccgtgaaggtggtggacgagctggtgaaggtgatgggccggcacaagcccgagaacatcgtgatcgagatggcccgggagaaccagaccacccagaagggccagaagaactcccgggagcggatgaagcggatcgaggagggcatcaaggagctgggctcccagatcctgaaggagcaccccgtggagaacacccagctgcagaacgagaagctgtacctgtactacctgcagaacggccgggacatgtacgtggaccaggagctggacatcaaccggctgtccgactacgacgtggacgccatcgtgccccagtccttcctgaaggacgactccatcgacaacaaggtgctgacccggtccgacaagaaccggggcaagtccgacaacgtgccctccgaggaggtggtgaagaagatgaagaactactggcggcagctgctgaacgccaagctgatcacccagcggaagttcgacaacctgaccaaggccgagcggggcggcctgtccgagctggacaaggccggcttcatcaagcggcagctggtggagacccggcagatcaccaagcacgtggcccagatcctggactcccggatgaacaccaagtacgacgagaacgacaagctgatccgggaggtgaaggtgatcaccctgaagtccaagctggtgtccgacttccggaaggacttccagttctacaaggtgcgggagatcaacaactaccaccacgcccacgacgcctacctgaacgccgtggtgggcaccgccctgatcaagaagtaccccaagctggagtccgagttcgtgtacggcgactacaaggtgtacgacgtgcggaagatgatcgccaagtccgagcaggagatcggcaaggccaccgccaagtacttcttctactccaacatcatgaacttcttcaagaccgagatcaccctggccaacggcgagatccggaagcggcccctgatcgagaccaacggcgagaccggcgagatcgtgtgggacaagggccgggacttcgccaccgtgcggaaggtgctgtccatgccccaggtgaacatcgtgaagaagaccgaggtgcagaccggcggcttctccaaggagtccatcctgcccaagcggaactccgacaagctgatcgcccggaagaaggactgggaccccaagaagtacggcggcttcgactcccccaccgtggcctactccgtgctggtggtggccaaggtggagaagggcaagtccaagaagctgaagtccgtgaaggagctgctgggcatcaccatcatggagcggtcctccttcgagaagaaccccatcgacttcctggaggccaagggctacaaggaggtgaagaaggacctgatcatcaagctgcccaagtactccctgttcgagctggagaacggccggaagcggatgctggcctccgccggcgagctgcagaagggcaacgagctggccctgccctccaagtacgtgaacttcctgtacctggcctcccactacgagaagctgaagggctcccccgaggacaacgagcagaagcagctgttcgtggagcagcacaagcactacctggacgagatcatcgagcagatctccgagttctccaagcgggtgatcctggccgacgccaacctggacaaggtgctgtccgcctacaacaagcaccgggacaagcccatccgggagcaggccgagaacatcatccacctgttcaccctgaccaacctgggcgcccccgccgccttcaagtacttcgacaccaccatcgaccggaagcggtacacctccaccaaggaggtgctggacgccaccctgatccaccagtccatcaccggcctgtacgagacccggatcgacctgtcccagctgggcggcgactccggcggctcctccggcggctccaagcggaccgccgacggctccgagttcgagtcccccaagaagaagcggaaggtgtccggcggctcctccggcggctccatggacaacaccaaggagaaggacaacttcaaggacgacctgctgctgcggatgggcctgaacgacaacaaggccggcatggagggcctggacaaggagaagatcaacaagatcatcatggaggccaccaagggctcccggttctacggcaacgagctgaagaaggagaagcaggtgaaccagcggatcgagaacatgatgcagcagaaggcccagatcacctcccagcagctgcggaaggcccagctgcaggtggacaagttcgccatggagctggagcggaaccggaacctgaacaacaccatcgtgcacgtggacatggacgccttctacgccgccgtggagatgcgggacaaccccgagctgaaggacaagcccatcgccgtgggctccatgtccatgctggccacctccaactaccacgcccggcggttcggcgtgcgggccgccatgcccggcttcatcgccaagcggctgtgcccccagctgatcatcgtgccccccaacttcgacaagtaccgggccgtgtccaaggaggtgaaggagatcctggccgagtacgaccccaacttcatggccatgtccctggacgaggcctacctgaacatcacccagcacctgcaggagcggcaggactggcccgaggacaagcggcggtacttcatcaagatgggcaactacctgaagatcgacaccccccggcaggaggccaacgagctgaccgagtacgagcggtccatctcccccctgctgttcgaggactccccccccgacctgcagccccagggctcccccttccagctgaactccgaggagcagaacaacccccagatcgcccagaactccgtggtgttcggcacctccgccgaggaggtggtgaaggagatccggttccggatcgagcagaagaccaccctgaccgcctccgccggcatcgcccccaacaccatgctggccaaggtgtgctccgacaagaacaagcccaacggccagtaccagatcctgccctcccggtccgccgtgatggacttcatcaaggacctgcccatccggaaggtgtccggcatcggcaaggtgaccgagaagatgctgatggccctgggcatcgtgacctgcaccgagctgtaccagcagcgggccctgctgtccctgctgttctccgagacctcctggcactacttcctgcacatcgccctgggcctgggctccaccgacctggcccgggaccgggtgcggaagtccatgtccgtggagcggaccttctccgagatctccaagaccgaggagcagtactccctgtgccaggagctgtgcgccgagctggcccacgacctgcagaaggagggcctgaagggccggaccgtgaccatcaagctgaagaacgtgaacttcgaggtgaagacccgggcctccaccgtgcccgccgccatctccaccgccgaggagatcttcgccatcgccaaggagctgctgcggaccgaggtgaacgtgggctccccccaccccctgcggctgcggctgatgggcgtgcggatgtccaccttctcctccgaggacgaccggaagcaccagcagggcggcggctccggcaagcggaccgccgacggctccggcggcggctcccccaagaagaagcggaaggtgtccgagtccgccacccccgagtccgtgtccggctggcggctgttcaagaagatctcctagctagcaccagcctcaagaacacccgaatggagtctctaagctacataataccaacttacactttacaaaatgttgtcccccaaaatgtagccattcgtatctgctcctaataaaaagaaagtttcttcacattctctcgagaaaaaaaaaaaatggaaaaaaaaaaaacggaaaaaaaaaaaaggtaaaaaaaaaaaatataaaaaaaaaaaacataaaaaaaaaaaacgaaaaaaaaaaaacgtaaaaaaaaaaaactcaaaaaaaaaaaagataaaaaaaaaaaacctaaaaaaaaaaaatgtaaaaaaaaaaaagggaaaaaaaaaaaacgcaaaaaaaaaaaacacaaaaaaaaaaaatgcaaaaaaaaaaaatcgaaaaaaaaaaaatctaaaaaaaaaaaacgaaaaaaaaaaaacccaaaaaaaaaaaagacaaaaaaaaaaaatagaaaaaaaaaaagttaaaaaaaaaaaactgaaaaaaaaaaaatttaaaaaaaaaaaat

SEQ ID NO: 1247 - protein, 1987 aa, synthetic construct
  REGION 1..1987: note = Synthetic
MKRTADGSEFESPKKKRKVDKKYSIGLDIGTNSVGWAVITDEYKVPSKKFKVLGNTDRHSIKKNLIGALLFDSGETAEATRLKRTARRRYTRRKNRICYLQEIFSNEMAKVDDSFFHRLEESFLVEEDKKHERHPIFGNIVDEVAYHEKYPTIYHLRKKLVDSTDKADLRLIYLALAHMIKFRGHFLIEGDLNPDNSDVDKLFIQLVQTYNQLFEENPINASGVDAKAILSARLSKSRRLENLIAQLPGEKKNGLFGNLIALSLGLTPNFKSNFDLAEDAKLQLSKDTYDDDLDNLLAQIGDQYADLFLAAKNLSDAILLSDILRVNTEITKAPLSASMIKRYDEHHQDLTLLKALVRQQLPEKYKEIFFDQSKNGYAGYIDGGASQEEFYKFIKPILEKMDGTEELLVKLNREDLLRKQRTFDNGSIPHQIHLGELHAILRRQEDFYPFLKDNREKIEKILTFRIPYYVGPLARGNSRFAWMTRKSEETITPWNFEEVVDKGASAQSFIERMTNFDKNLPNEKVLPKHSLLYEYFTVYNELTKVKYVTEGMRKPAFLSGEQKKAIVDLLFKTNRKVTVKQLKEDYFKKIECFDSVEISGVEDRFNASLGTYHDLLKIIKDKDFLDNEENEDILEDIVLTLTLFEDREMIEERLKTYAHLFDDKVMKQLKRRRYTGWGRLSRKLINGIRDKQSGKTILDFLKSDGFANRNFMQLIHDDSLTFKEDIQKAQVSGQGDSLHEHIANLAGSPAIKKGILQTVKVVDELVKVMGRHKPENIVIEMARENQTTQKGQKNSRERMKRIEEGIKELGSQILKEHPVENTQLQNEKLYLYYLQNGRDMYVDQELDINRLSDYDVDAIVPQSFLKDDSIDNKVLTRSDKNRGKSDNVPSEEVVKKMKNYWRQLLNAKLITQRKFDNLTKAERGGLSELDKAGFIKRQLVETRQITKHVAQILDSRMNTKYDENDKLIREVKVITLKSKLVSDFRKDFQFYKVREINNYHHAHDAYLNAVVGTALIKKYPKLESEFVYGDYKVYDVRKMIAKSEQEIGKATAKYFFYSNIMNFFKTEITLANGEIRKRPLIETNGETGEIVWDKGRDFATVRKVLSMPQVNIVKKTEVQTGGFSKESILPKRNSDKLIARKKDWDPKKYGGFDSPTVAYSVLVVAKVEKGKSKKLKSVKELLGITIMERSSFEKNPIDFLEAKGYKEVKKDLIIKLPKYSLFELENGRKRMLASAGELQKGNELALPSKYVNFLYLASHYEKLKGSPEDNEQKQLFVEQHKHYLDEIIEQISEFSKRVILADANLDKVLSAYNKHRDKPIREQAENIIHLFTLTNLGAPAAFKYFDTTIDRKRYTSTKEVLDATLIHQSITGLYETRIDLSQLGGDSGGSSGGSKRTADGSEFESPKKKRKVSGGSSGGSMDNTKEKDNFKDDLLLRMGLNDNKAGMEGLDKEKINKIIMEATKGSRFYGNELKKEKQVNQRIENMMQQKAQITSQQLRKAQLQVDKFAMELERNRNLNNTIVHVDMDAFYAAVEMRDNPELKDKPIAVGSMSMLATSNYHARRFGVRAAMPGFIAKRLCPQLIIVPPNFDKYRAVSKEVKEILAEYDPNFMAMSLDEAYLNITQHLQERQDWPEDKRRYFIKMGNYLKIDTPRQEANELTEYERSISPLLFEDSPPDLQPQGSPFQLNSEEQNNPQIAQNSVVFGTSAEEVVKEIRFRIEQKTTLTASAGIAPNTMLAKVCSDKNKPNGQYQILPSRSAVMDFIKDLPIRKVSGIGKVTEKMLMALGIVTCTELYQQRALLSLLFSETSWHYFLHIALGLGSTDLARDRVRKSMSVERTFSEISKTEEQYSLCQELCAELAHDLQKEGLKGRTVTIKLKNVNFEVKTRASTVPAAISTAEEIFAIAKELLRTEVNVGSPHPLRLRLMGVRMSTFSSEDDRKHQQGGGSGKRTADGSGGGSPKKKRKVSESATPESVSGWRLFKKIS

SEQ ID NO: 1248 - DNA, 5904 bp, synthetic construct
  misc_feature 1..5904: note = Synthetic
  source 1..5904: mol_type = other DNA
atgaagcggaccgccgacggctccgagttcgagtcccccaagaagaagcggaaggtggacaagaagtactccatcggcctggacatcggcaccaactccgtgggctgggccgtgatcaccgacgagtacaaggtgccctccaagaagttcaaggtgctgggcaacaccgaccggcactccatcaagaagaacctgatcggcgccctgctgttcgactccggcgagaccgccgaggccacccggctgaagcggaccgcccggcggcggtacacccggcggaagaaccggatctgctacctgcaggagatcttctccaacgagatggccaaggtggacgactccttcttccaccggctggaggagtccttcctggtggaggaggacaagaagcacgagcggcaccccatcttcggcaacatcgtggacgaggtggcctaccacgagaagtaccccaccatctaccacctgcggaagaagctggtggactccaccgacaaggccgacctgcggctgatctacctggccctggcccacatgatcaagttccggggccacttcctgatcgagggcgacctgaaccccgacaactccgacgtggacaagctgttcatccagctggtgcagacctacaaccagctgttcgaggagaaccccatcaacgcctccggcgtggacgccaaggccatcctgtccgcccggctgtccaagtcccggcggctggagaacctgatcgcccagctgcccggcgagaagaagaacggcctgttcggcaacctgatcgccctgtccctgggcctgacccccaacttcaagtccaacttcgacctggccgaggacgccaagctgcagctgtccaaggacacctacgacgacgacctggacaacctgctggcccagatcggcgaccagtacgccgacctgttcctggccgccaagaacctgtccgacgccatcctgctgtccgacatcctgcgggtgaacaccgagatcaccaaggcccccctgtccgcctccatgatcaagcggtacgacgagcaccaccaggacctgaccctgctgaaggccctggtgcggcagcagctgcccgagaagtacaaggagatcttcttcgaccagtccaagaacggctacgccggctacatcgacggcggcgcctcccaggaggagttctacaagttcatcaagcccatcctggagaagatggacggcaccgaggagctgctggtgaagctgaaccgggaggacctgctgcggaagcagcggaccttcgacaacggctccatcccccaccagatccacctgggcgagctgcacgccatcctgcggcggcaggaggacttctaccccttcctgaaggacaaccgggagaagatcgagaagatcctgaccttccggatcccctactacgtgggccccctggcccggggcaactcccggttcgcctggatgacccggaagtccgaggagaccatcaccccctggaacttcgaggaggtggtggacaagggcgcctccgcccagtccttcatcgagcggatgaccaacttcgacaagaacctgcccaacgagaaggtgctgcccaagcactccctgctgtacgagtacttcaccgtgtacaacgagctgaccaaggtgaagtacgtgaccgagggcatgcggaagcccgccttcctgtccggcgagcagaagaaggccatcgtggacctgctgttcaagaccaaccggaaggtgaccgtgaagcagctgaaggaggactacttcaagaagatcgagtgcttcgactccgtggagatctccggcgtggaggaccggttcaacgcctccctgggcacctaccacgacctgctgaagatcatcaaggacaaggacttcctggacaacgaggagaacgaggacatcctggaggacatcgtgctgaccctgaccctgttcgaggaccgggagatgatcgaggagcggctgaagacctacgcccacctgttcgacgacaaggtgatgaagcagctgaagcggcggcggtacaccggctggggccggctgtcccggaagctgatcaacggcatccgggacaagcagtccggcaagaccatcctggacttcctgaagtccgacggcttcgccaaccggaacttcatgcagctgatccacgacgactccctgaccttcaaggaggacatccagaaggcccaggtgtccggccagggcgactccctgcacgagcacatcgccaacctggccggctcccccgccatcaagaagggcatcctgcagaccgtgaaggtggtggacgagctggtgaaggtgatgggccggcacaagcccgagaacatcgtgatcgagatggcccgggagaaccagaccacccagaagggccagaagaactcccgggagcggatgaagcggatcgaggagggcatcaaggagctgggctcccagatcctgaaggagcaccccgtggagaacacccagctgcagaacgagaagctgtacctgtactacctgcagaacggccgggacatgtacgtggaccaggagctggacatcaaccggctgtccgactacgacgtggacgccatcgtgccccagtccttcctgaaggacgactccatcgacaacaaggtgctgacccggtccgacaagaaccggggcaagtccgacaacgtgccctccgaggaggtggtgaagaagatgaagaactactggcggcagctgctgaacgccaagctgatcacccagcggaagttcgacaacctgaccaaggccgagcggggcggcctgtccgagctggacaaggccggcttcatcaagcggcagctggtggagacccggcagatcaccaagcacgtggcccagatcctggactcccggatgaacaccaagtacgacgagaacgacaagctgatccgggaggtgaaggtgatcaccctgaagtccaagctggtgtccgacttccggaaggacttccagttctacaaggtgcgggagatcaacaactaccaccacgcccacgacgcctacctgaacgccgtggtgggcaccgccctgatcaagaagtaccccaagctggagtccgagttcgtgtacggcgactacaaggtgtacgacgtgcggaagatgatcgccaagtccgagcaggagatcggcaaggccaccgccaagtacttcttctactccaacatcatgaacttcttcaagaccgagatcaccctggccaacggcgagatccggaagcggcccctgatcgagaccaacggcgagaccggcgagatcgtgtgggacaagggccgggacttcgccaccgtgcggaaggtgctgtccatgccccaggtgaacatcgtgaagaagaccgaggtgcagaccggcggcttctccaaggagtccatcctgcccaagcggaactccgacaagctgatcgcccggaagaaggactgggaccccaagaagtacggcggcttcgactcccccaccgtggcctactccgtgctggtggtggccaaggtggagaagggcaagtccaagaagctgaagtccgtgaaggagctgctgggcatcaccatcatggagcggtcctccttcgagaagaaccccatcgacttcctggaggccaagggctacaaggaggtgaagaaggacctgatcatcaagctgcccaagtactccctgttcgagctggagaacggccggaagcggatgctggcctccgccggcgagctgcagaagggcaacgagctggccctgccctccaagtacgtgaacttcctgtacctggcctcccactacgagaagctgaagggctcccccgaggacaacgagcagaagcagctgttcgtggagcagcacaagcactacctggacgagatcatcgagcagatctccgagttctccaagcgggtgatcctggccgacgccaacctggacaaggtgctgtccgcctacaacaagcaccgggacaagcccatccgggagcaggccgagaacatcatccacctgttcaccctgaccaacctgggcgcccccgccgccttcaagtacttcgacaccaccatcgaccggaagcggtacacctccaccaaggaggtgctggacgccaccctgatccaccagtccatcaccggcctgtacgagacccggatcgacctgtcccagctgggcggcgactccggcggctcctccggcggctccaagcggaccgccgacggctccgagttcgagtcccccaagaagaagcggaaggtgtccggcggctcctccggcggctccatggacaacaccaaggagaaggacaacttcaaggacgacctgctgctgcggatgggcctgaacgacaacaaggccggcatggagggcctggacaaggagaagatcaacaagatcatcatggaggccaccaagggctcccggttctacggcaacgagctgaagaaggagaagcaggtgaaccagcggatcgagaacatgatgcagcagaaggcccagatcacctcccagcagctgcggaaggcccagctgcaggtggacaagttcgccatggagctggagcggaaccggaacctgaacaacaccatcgtgcacgtggacatggacgccttctacgccgccgtggagatgcgggacaaccccgagctgaaggacaagcccatcgccgtgggctccatgtccatgctggccacctccaactaccacgcccggcggttcggcgtgcgggccgccatgcccggcttcatcgccaagcggctgtgcccccagctgatcatcgtgccccccaacttcgacaagtaccgggccgtgtccaaggaggtgaaggagatcctggccgagtacgaccccaacttcatggccatgtccctggacgaggcctacctgaacatcacccagcacctgcaggagcggcaggactggcccgaggacaagcggcggtacttcatcaagatgggcaactacctgaagatcgacaccccccggcaggaggccaacgagctgaccgagtacgagcggtccatctcccccctgctgttcgaggactccccccccgacctgcagccccagggctcccccttccagctgaactccgaggagcagaacaacccccagatcgcccagaactccgtggtgttcggcacctccgccgaggaggtggtgaaggagatccggttccggatcgagcagaagaccaccctgaccgcctccgccggcatcgcccccaacaccatgctggccaaggtgtgctccgacaagaacaagcccaacggccagtaccagatcctgccctcccggtccgccgtgatggacttcatcaaggacctgcccatccggaaggtgtccggcatcggcaaggtgaccgagaagatgctgatggccctgggcatcgtgacctgcaccgagctgtaccagcagcgggccctgctgtccctgctgttctccgagacctcctggcactacttcctgcacatcgccctgggcctgggctccaccgacctggcccgggaccgggtgcggaagtccatgtccgtggagcggaccttctccgagatctccaagaccgaggagcagtactccctgtgccaggagctgtgcgccgagctggcccacgacctgcagaaggagggcctgaagggccggaccgtgaccatcaagctgaagaacgtgaacttcgaggtgaagacccgggcctccaccgtgcccgccgccatctccaccgccgaggagatcttcgccatcgccaaggagctgctgcggaccgaggtgaacgtgggctccccccaccccctgcggctgcggctgatgggcgtgcggatgtccaccttctcctccgaggacgaccggaagcaccagcagggcggcggctccggcaagcggaccgccgacggctccggcggcggctcccccaagaagaagcggaaggtg

SEQ ID NO: 1249 - protein, 1968 aa, synthetic construct
  REGION 1..1968: note = Synthetic
MKRTADGSEFESPKKKRKVDKKYSIGLDIGTNSVGWAVITDEYKVPSKKFKVLGNTDRHSIKKNLIGALLFDSGETAEATRLKRTARRRYTRRKNRICYLQEIFSNEMAKVDDSFFHRLEESFLVEEDKKHERHPIFGNIVDEVAYHEKYPTIYHLRKKLVDSTDKADLRLIYLALAHMIKFRGHFLIEGDLNPDNSDVDKLFIQLVQTYNQLFEENPINASGVDAKAILSARLSKSRRLENLIAQLPGEKKNGLFGNLIALSLGLTPNFKSNFDLAEDAKLQLSKDTYDDDLDNLLAQIGDQYADLFLAAKNLSDAILLSDILRVNTEITKAPLSASMIKRYDEHHQDLTLLKALVRQQLPEKYKEIFFDQSKNGYAGYIDGGASQEEFYKFIKPILEKMDGTEELLVKLNREDLLRKQRTFDNGSIPHQIHLGELHAILRRQEDFYPFLKDNREKIEKILTFRIPYYVGPLARGNSRFAWMTRKSEETITPWNFEEVVDKGASAQSFIERMTNFDKNLPNEKVLPKHSLLYEYFTVYNELTKVKYVTEGMRKPAFLSGEQKKAIVDLLFKTNRKVTVKQLKEDYFKKIECFDSVEISGVEDRFNASLGTYHDLLKIIKDKDFLDNEENEDILEDIVLTLTLFEDREMIEERLKTYAHLFDDKVMKQLKRRRYTGWGRLSRKLINGIRDKQSGKTILDFLKSDGFANRNFMQLIHDDSLTFKEDIQKAQVSGQGDSLHEHIANLAGSPAIKKGILQTVKVVDELVKVMGRHKPENIVIEMARENQTTQKGQKNSRERMKRIEEGIKELGSQILKEHPVENTQLQNEKLYLYYLQNGRDMYVDQELDINRLSDYDVDAIVPQSFLKDDSIDNKVLTRSDKNRGKSDNVPSEEVVKKMKNYWRQLLNAKLITQRKFDNLTKAERGGLSELDKAGFIKRQLVETRQITKHVAQILDSRMNTKYDENDKLIREVKVITLKSKLVSDFRKDFQFYKVREINNYHHAHDAYLNAVVGTALIKKYPKLESEFVYGDYKVYDVRKMIAKSEQEIGKATAKYFFYSNIMNFFKTEITLANGEIRKRPLIETNGETGEIVWDKGRDFATVRKVLSMPQVNIVKKTEVQTGGFSKESILPKRNSDKLIARKKDWDPKKYGGFDSPTVAYSVLVVAKVEKGKSKKLKSVKELLGITIMERSSFEKNPIDFLEAKGYKEVKKDLIIKLPKYSLFELENGRKRMLASAGELQKGNELALPSKYVNFLYLASHYEKLKGSPEDNEQKQLFVEQHKHYLDEIIEQISEFSKRVILADANLDKVLSAYNKHRDKPIREQAENIIHLFTLTNLGAPAAFKYFDTTIDRKRYTSTKEVLDATLIHQSITGLYETRIDLSQLGGDSGGSSGGSKRTADGSEFESPKKKRKVSGGSSGGSMDNTKEKDNFKDDLLLRMGLNDNKAGMEGLDKEKINKIIMEATKGSRFYGNELKKEKQVNQRIENMMQQKAQITSQQLRKAQLQVDKFAMELERNRNLNNTIVHVDMDAFYAAVEMRDNPELKDKPIAVGSMSMLATSNYHARRFGVRAAMPGFIAKRLCPQLIIVPPNFDKYRAVSKEVKEILAEYDPNFMAMSLDEAYLNITQHLQERQDWPEDKRRYFIKMGNYLKIDTPRQEANELTEYERSISPLLFEDSPPDLQPQGSPFQLNSEEQNNPQIAQNSVVFGTSAEEVVKEIRFRIEQKTTLTASAGIAPNTMLAKVCSDKNKPNGQYQILPSRSAVMDFIKDLPIRKVSGIGKVTEKMLMALGIVTCTELYQQRALLSLLFSETSWHYFLHIALGLGSTDLARDRVRKSMSVERTFSEISKTEEQYSLCQELCAELAHDLQKEGLKGRTVTIKLKNVNFEVKTRASTVPAAISTAEEIFAIAKELLRTEVNVGSPHPLRLRLMGVRMSTFSSEDDRKHQQGGGSGKRTADGSGGGSPKKKRKV

SEQ ID NO: 1250 - DNA, 7005 bp, synthetic construct
  misc_feature 1..7005: note = Synthetic
  source 1..7005: mol_type = other DNA
atggacaagaagtactccatcggcctggacatcggcaccaactccgtgggctgggccgtgatcaccgacgagtacaaggtgccctccaagaagttcaaggtgctgggcaacaccgaccggcactccatcaagaagaacctgatcggcgccctgctgttcgactccggcgagaccgccgaggccacccggctgaagcggaccgcccggcggcggtacacccggcggaagaaccggatctgctacctgcaggagatcttctccaacgagatggccaaggtggacgactccttcttccaccggctggaggagtccttcctggtggaggaggacaagaagcacgagcggcaccccatcttcggcaacatcgtggacgaggtggcctaccacgagaagtaccccaccatctaccacctgcggaagaagctggtggactccaccgacaaggccgacctgcggctgatctacctggccctggcccacatgatcaagttccggggccacttcctgatcgagggcgacctgaaccccgacaactccgacgtggacaagctgttcatccagctggtgcagacctacaaccagctgttcgaggagaaccccatcaacgcctccggcgtggacgccaaggccatcctgtccgcccggctgtccaagtcccggcggctggagaacctgatcgcccagctgcccggcgagaagaagaacggcctgttcggcaacctgatcgccctgtccctgggcctgacccccaacttcaagtccaacttcgacctggccgaggacgccaagctgcagctgtccaaggacacctacgacgacgacctggacaacctgctggcccagatcggcgaccagtacgccgacctgttcctggccgccaagaacctgtccgacgccatcctgctgtccgacatcctgcgggtgaacaccgagatcaccaaggcccccctgtccgcctccatgatcaagcggtacgacgagcaccaccaggacctgaccctgctgaaggccctggtgcggcagcagctgcccgagaagtacaaggagatcttcttcgaccagtccaagaacggctacgccggctacatcgacggcggcgcctcccaggaggagttctacaagttcatcaagcccatcctggagaagatggacggcaccgaggagctgctggtgaagctgaaccgggaggacctgctgcggaagcagcggaccttcgacaacggctccatcccccaccagatccacctgggcgagctgcacgccatcctgcggcggcaggaggacttctaccccttcctgaaggacaaccgggagaagatcgagaagatcctgaccttccggatcccctactacgtgggccccctggcccggggcaactcccggttcgcctggatgacccggaagtccgaggagaccatcaccccctggaacttcgaggaggtggtggacaagggcgcctccgcccagtccttcatcgagcggatgaccaacttcgacaagaacctgcccaacgagaaggtgctgcccaagcactccctgctgtacgagtacttcaccgtgtacaacgagctgaccaaggtgaagtacgtgaccgagggcatgcggaagcccgccttcctgtccggcgagcagaagaaggccatcgtggacctgctgttcaagaccaaccggaaggtgaccgtgaagcagctgaaggaggactacttcaagaagatcgagtgcttcgactccgtggagatctccggcgtggaggaccggttcaacgcctccctgggcacctaccacgacctgctgaagatcatcaaggacaaggacttcctggacaacgaggagaacgaggacatcctggaggacatcgtgctgaccctgaccctgttcgaggaccgggagatgatcgaggagcggctgaagacctacgcccacctgttcgacgacaaggtgatgaagcagctgaagcggcggcggtacaccggctggggccggctgtcccggaagctgatcaacggcatccgggacaagcagtccggcaagaccatcctggacttcctgaagtccgacggcttcgccaaccggaacttcatgcagctgatccacgacgactccctgaccttcaaggaggacatccagaaggcccaggtgtccggccagggcgactccctgcacgagcacatcgccaacctggccggctcccccgccatcaagaagggcatcctgcagaccgtgaaggtggtggacgagctggtgaaggtgatgggccggcacaagcccgagaacatcgtgatcgagatggcccgggagaaccagaccacccagaagggccagaagaactcccgggagcggatgaagcggatcgaggagggcatcaaggagctgggctcccagatcctgaaggagcaccccgtggagaacacccagctgcagaacgagaagctgtacctgtactacctgcagaacggccgggacatgtacgtggaccaggagctggacatcaaccggctgtccgactacgacgtggacgccatcgtgccccagtccttcctgaaggacgactccatcgacaacaaggtgctgacccggtccgacaagaaccggggcaagtccgacaacgtgccctccgaggaggtggtgaagaagatgaagaactactggcggcagctgctgaacgccaagctgatcacccagcggaagttcgacaacctgaccaaggccgagcggggcggcctgtccgagctggacaaggccggcttcatcaagcggcagctggtggagacccggcagatcaccaagcacgtggcccagatcctggactcccggatgaacaccaagtacgacgagaacgacaagctgatccgggaggtgaaggtgatcaccctgaagtccaagctggtgtccgacttccggaaggacttccagttctacaaggtgcgggagatcaacaactaccaccacgcccacgacgcctacctgaacgccgtggtgggcaccgccctgatcaagaagtaccccaagctggagtccgagttcgtgtacggcgactacaaggtgtacgacgtgcggaagatgatcgccaagtccgagcaggagatcggcaaggccaccgccaagtacttcttctactccaacatcatgaacttcttcaagaccgagatcaccctggccaacggcgagatccggaagcggcccctgatcgagaccaacggcgagaccggcgagatcgtgtgggacaagggccgggacttcgccaccgtgcggaaggtgctgtccatgccccaggtgaacatcgtgaagaagaccgaggtgcagaccggcggcttctccaaggagtccatcctgcccaagcggaactccgacaagctgatcgcccggaagaaggactgggaccccaagaagtacggcggcttcgactcccccaccgtggcctactccgtgctggtggtggccaaggtggagaagggcaagtccaagaagctgaagtccgtgaaggagctgctgggcatcaccatcatggagcggtcctccttcgagaagaaccccatcgacttcctggaggccaagggctacaaggaggtgaagaaggacctgatcatcaagctgcccaagtactccctgttcgagctggagaacggccggaagcggatgctggcctccgccggcgagctgcagaagggcaacgagctggccctgccctccaagtacgtgaacttcctgtacctggcctcccactacgagaagctgaagggctcccccgaggacaacgagcagaagcagctgttcgtggagcagcacaagcactacctggacgagatcatcgagcagatctccgagttctccaagcgggtgatcctggccgacgccaacctggacaaggtgctgtccgcctacaacaagcaccgggacaagcccatccgggagcaggccgagaacatcatccacctgttcaccctgaccaacctgggcgcccccgccgccttcaagtacttcgacaccaccatcgaccggaagcggtacacctccaccaaggaggtgctggacgccaccctgatccaccagtccatcaccggcctgtacgagacccggatcgacctgtcccagctgggcggcgacggcgcccccgagtccgccaccgagtccggcggcacctccaccgagtccgagggctccgccggcacctccaccgagtccgagggctccgccggctccgccggctccacctccggctcctcctccggcatgaagatcgccgtggtggacaaggccctgaacaacacccggtacgacaagcacttccagctgtacggcgaggaggtggacgtgttccacatgtgcaacgagaagctgtccggccggctgctgaagaagcacatcaccatcggcacccccgagaaccccttcgaccccaacgactacgacttcgtgatcctggtgggcgccgagcccttcctgtacttcgccggcaagaagggcatcggcgactacaccggcaagcgggtggagtacaacggctacgccaactggatcgcctccatctcccccgcccagctgcacttcaagcccgagatgaagcccgtgttcgacgccaccgtggagaacatccacgacatcatcaacggccgggagaagatcgccaaggccggcgactaccggcccatcaccgaccccgacgaggccgaggagtacatcaagatggtgtacaacatggtgatcggccccgtggccttcgcctccgccacctccgccctgtactgccgggacggctacctgctgggcgtgtccatctcccaccaggagtaccagggcgtgtacatcgactccgactgcctgaccgaggtggccgtgtactacctgcagaagatcctggactccgagaaccacaccatcgtgttccacaacctgaagttcgacatgcacttctacaagtaccacctgggcctgaccttcgacaaggcccacaaggagcggcggctgcacgacaccatgctgcagcactacgtgctggacgagcggcggggcacccacggcctgaagtccctggccatgaagtacaccgacatgggcgactacgacttcgagctggacaagttcaaggacgactactgcaaggcccacaagatcaagaaggaggacttcacctacgacctgatccccttcgacatcatgtggccctacgccgccaaggacaccgacgccaccatccggctgcacaacttcttcctgcccaagatcgagaagaacgagaagctgtgctccctgtactacgacgtgctgatgcccggctgcgtgttcctgcagcgggtggaggaccggggcgtgcccatctccatcgaccggctgaaggaggcccagtaccagctgacccacaacctgaacaaggcccgggagaagctgtacacctaccccgaggtgaagcagctggagcaggaccagaacgaggccttcaaccccaactccgtgaagcagctgcgggtgctgctgttcgactacgtgggcctgacccccaccggcaagctgaccgacaccggcgccgactccaccgacgccgaggccctgaacgagctggccacccagcaccccatcgccaagaccctgctggagatccggaagctgaccaagctgatctccacctacgtggagaagatcctgctgtccatcgacgccgacggctgcatccggaccggcttccacgagcacatgaccacctccggccggctgtcctcctccggcaagctgaacctgcagcagctgccccgggacgagtccatcatcaagggctgcgtggtggccccccccggctaccgggtgatcgcctgggacctgaccaccgccgaggtgtactacgccgccgtgctgtccggcgaccggaacatgcagcaggtgttcatcaacatgcggaacgagcccgacaagtaccccgacttccactccaacatcgcccacatggtgttcaagctgcagtgcgagccccgggacgtgaagaagctgttccccgccctgcggcaggccgccaaggccatcaccttcggcatcctgtacggctccggccccgccaaggtggcccactccgtgaacgaggccctgctggagcaggccgccaagaccggcgagcccttcgtggagtgcaccgtggccgacgccaaggagtacatcgagacctacttcggccagttcccccagctgaagcggtggatcgacaagtgccacgaccagatcaagaaccacggcttcatctactcccacttcggccggaagcggcggctgcacaacatccactccgaggaccggggcgtgcagggcgaggagatccggtccggcttcaacgccatcatccagtccgcctcctccgactccctgctgctgggcgccgtggacgccgacaacgagatcatctccctgggcctggagcaggagatgaagatcgtgatgctggtgcacgactccgtggtggccatcgtgcgggaggacctgatcgaccagtacaacgagatcctgatccggaacatccagaaggaccggggcatctccatccccggctgccccatcggcatcgactccgactccgaggccggcggctcccgggactactcctgcggcaagatgaagaagcagcacccctccatcgcctgcatcgacgacgacgagtacacccggtacgtgaagggcgtgctgctggacgccgagttcgagtacaagaagctggccgccatggacaaggagcaccccgaccactccaagtacaaggacgacaagttcatcgccgtgtgcaaggacctggacaacgtgaagcggatcctgggcgccggcggcggctccggcaagcggaccgccgacggctccggcggcggctcccccaagaagaagcggaaggtgtccgagtccgccacccccgagtccgtgtccggctggcggctgttcaagaagatctccatcgccgccctggagaaggagatcgccgccctggagaaggagaacgccgccctggagtgggagatcgccgccctggagaagtag

SEQ ID NO: 1251 - RNA, 7564 nt, synthetic construct
  misc_feature 1..7564: note = Synthetic
  source 1..7564: mol_type = other RNA
gggaagctcagaataaacgctcaactttggccggatctgccaccatggacaagaagtactccatcggcctggacatcggcaccaactccgtgggctgggccgtgatcaccgacgagtacaaggtgccctccaagaagttcaaggtgctgggcaacaccgaccggcactccatcaagaagaacctgatcggcgccctgctgttcgactccggcgagaccgccgaggccacccggctgaagcggaccgcccggcggcggtacacccggcggaagaaccggatctgctacctgcaggagatcttctccaacgagatggccaaggtggacgactccttcttccaccggctggaggagtccttcctggtggaggaggacaagaagcacgagcggcaccccatcttcggcaacatcgtggacgaggtggcctaccacgagaagtaccccaccatctaccacctgcggaagaagctggtggactccaccgacaaggccgacctgcggctgatctacctggccctggcccacatgatcaagttccggggccacttcctgatcgagggcgacctgaaccccgacaactccgacgtggacaagctgttcatccagctggtgcagacctacaaccagctgttcgaggagaaccccatcaacgcctccggcgtggacgccaaggccatcctgtccgcccggctgtccaagtcccggcggctggagaacctgatcgcccagctgcccggcgagaagaagaacggcctgttcggcaacctgatcgccctgtccctgggcctgacccccaacttcaagtccaacttcgacctggccgaggacgccaagctgcagctgtccaaggacacctacgacgacgacctggacaacctgctggcccagatcggcgaccagtacgccgacctgttcctggccgccaagaacctgtccgacgccatcctgctgtccgacatcctgcgggtgaacaccgagatcaccaaggcccccctgtccgcctccatgatcaagcggtacgacgagcaccaccaggacctgaccctgctgaaggccctggtgcggcagcagctgcccgagaagtacaaggagatcttcttcgaccagtccaagaacggctacgccggctacatcgacggcggcgcctcccaggaggagttctacaagttcatcaagcccatcctggagaagatggacggcaccgaggagctgctggtgaagctgaaccgggaggacctgctgcggaagcagcggaccttcgacaacggctccatcccccaccagatccacctgggcgagctgcacgccatcctgcggcggcaggaggacttctaccccttcctgaaggacaaccgggagaagatcgagaagatcctgaccttccggatcccctactacgtgggccccctggcccggggcaactcccggttcgcctggatgacccggaagtccgaggagaccatcaccccctggaacttcgaggaggtggtggacaagggcgcctccgcccagtccttcatcgagcggatgaccaacttcgacaagaacctgcccaacgagaaggtgctgcccaagcactccctgctgtacgagtacttcaccgtgtacaacgagctgaccaaggtgaagtacgtgaccgagggcatgcggaagcccgccttcctgtccggcgagcagaagaaggccatcgtggacctgctgttcaagaccaaccggaaggtgaccgtgaagcagctgaaggaggactacttcaagaagatcgagtgcttcgactccgtggagatctccggcgtggaggaccggttcaacgcctccctgggcacctaccacgacctgctgaagatcatcaaggacaaggacttcctggacaacgaggagaacgaggacatcctggaggacatcgtgctgaccctgaccctgttcgaggaccgggagatgatcgaggagcggctgaagacctacgcccacctgttcgacgacaaggtgatgaagcagctgaagcggcggcggtacaccggctggggccggctgtcccggaagctgatcaacggcatccgggacaagcagtccggcaagaccatcctggacttcctgaagtccgacggcttcgccaaccggaacttcatgcagctgatccacgacgactccctgaccttcaaggaggacatccagaaggcccaggtgtccggccagggcgactccctgcacgagcacatcgccaacctggccggctcccccgccatcaagaagggcatcctgcagaccgtgaaggtggtggacgagctggtgaaggtgatgggccggcacaagcccgagaacatcgtgatcgagatggcccgggagaaccagaccacccagaagggccagaagaactcccgggagcggatgaagcggatcgaggagggcatcaaggagctgggctcccagatcctgaaggagcaccccgtggagaacacccagctgcagaacgagaagctgtacctgtactacctgcagaacggccgggacatgtacgtggaccaggagctggacatcaaccggctgtccgactacgacgtggacgccatcgtgccccagtccttcctgaaggacgactccatcgacaacaaggtgctgacccggtccgacaagaaccggggcaagtccgacaacgtgccctccgaggaggtggtgaagaagatgaagaactactggcggcagctgctgaacgccaagctgatcacccagcggaagttcgacaacctgaccaaggccgagcggggcggcctgtccgagctggacaaggccggcttcatcaagcggcagctggtggagacccggcagatcaccaagcacgtggcccagatcctggactcccggatgaacaccaagtacgacgagaacgacaagctgatccgggaggtgaaggtgatcaccctgaagtccaagctggtgtccgacttccggaaggacttccagttctacaaggtgcgggagatcaacaactaccaccacgcccacgacgcctacctgaacgccgtggtgggcaccgccctgatcaagaagtaccccaagctggagtccgagttcgtgtacggcgactacaaggtgtacgacgtgcggaagatgatcgccaagtccgagcaggagatcggcaaggccaccgccaagtacttcttctactccaacatcatgaacttcttcaagaccgagatcaccctggccaacggcgagatccggaagcggcccctgatcgagaccaacggcgagaccggcgagatcgtgtgggacaagggccgggacttcgccaccgtgcggaaggtgctgtccatgccccaggtgaacatcgtgaagaagaccgaggtgcagaccggcggcttctccaaggagtccatcctgcccaagcggaactccgacaagctgatcgcccggaagaaggactgggaccccaagaagtacggcggcttcgactcccccaccgtggcctactccgtgctggtggtggccaaggtggagaagggcaagtccaagaagctgaagtccgtgaaggagctgctgggcatcaccatcatggagcggtcctccttcgagaagaaccccatcgacttcctggaggccaagggctacaaggaggtgaagaaggacctgatcatcaagctgcccaagtactccctgttcgagctggagaacggccggaagcggatgctggcctccgccggcgagctgcagaagggcaacgagctggccctgccctccaagtacgtgaacttcctgtacctggcctcccactacgagaagctgaagggctcccccgaggacaacgagcagaagcagctgttcgtggagcagcacaagcactacctggacgagatcatcgagcagatctccgagttctccaagcgggtgatcctggccgacgccaacctggacaaggtgctgtccgcctacaacaagcaccgggacaagcccatccgggagcaggccgagaacatcatccacctgttcaccctgaccaacctgggcgcccccgccgccttcaagtacttcgacaccaccatcgaccggaagcggtacacctccaccaaggaggtgctggacgccaccctgatccaccagtccatcaccggcctgtacgagacccggatcgacctgtcccagctgggcggcgacggcgcccccgagtccgccaccgagtccggcggcacctccaccgagtccgagggctccgccggcacctccaccgagtccgagggctccgccggctccgccggctccacctccggctcctcctccggcatgaagatcgccgtggtggacaaggccctgaacaacacccggtacgacaagcacttccagctgtacggcgaggaggtggacgtgttccacatgtgcaacgagaagctgtccggccggctgctgaagaagcacatcaccatcggcacccccgagaaccccttcgaccccaacgactacgacttcgtgatcctggtgggcgccgagcccttcctgtacttcgccggcaagaagggcatcggcgactacaccggcaagcgggtggagtacaacggctacgccaactggatcgcctccatctcccccgcccagctgcacttcaagcccgagatgaagcccgtgttcgacgccaccgtggagaacatccacgacatcatcaacggccgggagaagatcgccaaggccggcgactaccggcccatcaccgaccccgacgaggccgaggagtacatcaagatggtgtacaacatggtgatcggccccgtggccttcgcctccgccacctccgccctgtactgccgggacggctacctgctgggcgtgtccatctcccaccaggagtaccagggcgtgtacatcgactccgactgcctgaccgaggtggccgtgtactacctgcagaagatcctggactccgagaaccacaccatcgtgttccacaacctgaagttcgacatgcacttctacaagtaccacctgggcctgaccttcgacaaggcccacaaggagcggcggctgcacgacaccatgctgcagcactacgtgctggacgagcggcggggcacccacggcctgaagtccctggccatgaagtacaccgacatgggcgactacgacttcgagctggacaagttcaaggacgactactgcaaggcccacaagatcaagaaggaggacttcacctacgacctgatccccttcgacatcatgtggccctacgccgccaaggacaccgacgccaccatccggctgcacaacttcttcctgcccaagatcgagaagaacgagaagctgtgctccctgtactacgacgtgctgatgcccggctgcgtgttcctgcagcgggtggaggaccggggcgtgcccatctccatcgaccggctgaaggaggcccagtaccagctgacccacaacctgaacaaggcccgggagaagctgtacacctaccccgaggtgaagcagctggagcaggaccagaacgaggccttcaaccccaactccgtgaagcagctgcgggtgctgctgttcgactacgtgggcctgacccccaccggcaagctgaccgacaccggcgccgactccaccgacgccgaggccctgaacgagctggccacccagcaccccatcgccaagaccctgctggagatccggaagctgaccaagctgatctccacctacgtggagaagatcctgctgtccatcgacgccgacggctgcatccggaccggcttccacgagcacatgaccacctccggccggctgtcctcctccggcaagctgaacctgcagcagctgccccgggacgagtccatcatcaagggctgcgtggtggccccccccggctaccgggtgatcgcctgggacctgaccaccgccgaggtgtactacgccgccgtgctgtccggcgaccggaacatgcagcaggtgttcatcaacatgcggaacgagcccgacaagtaccccgacttccactccaacatcgcccacatggtgttcaagctgcagtgcgagccccgggacgtgaagaagctgttccccgccctgcggcaggccgccaaggccatcaccttcggcatcctgtacggctccggccccgccaaggtggcccactccgtgaacgaggccctgctggagcaggccgccaagaccggcgagcccttcgtggagtgcaccgtggccgacgccaaggagtacatcgagacctacttcggccagttcccccagctgaagcggtggatcgacaagtgccacgaccagatcaagaaccacggcttcatctactcccacttcggccggaagcggcggctgcacaacatccactccgaggaccggggcgtgcagggcgaggagatccggtccggcttcaacgccatcatccagtccgcctcctccgactccctgctgctgggcgccgtggacgccgacaacgagatcatctccctgggcctggagcaggagatgaagatcgtgatgctggtgcacgactccgtggtggccatcgtgcgggaggacctgatcgaccagtacaacgagatcctgatccggaacatccagaaggaccggggcatctccatccccggctgccccatcggcatcgactccgactccgaggccggcggctcccgggactactcctgcggcaagatgaagaagcagcacccctccatcgcctgcatcgacgacgacgagtacacccggtacgtgaagggcgtgctgctggacgccgagttcgagtacaagaagctggccgccatggacaaggagcaccccgaccactccaagtacaaggacgacaagttcatcgccgtgtgcaaggacctggacaacgtgaagcggatcctgggcgccggcggcggctccggcaagcggaccgccgacggctccggcggcggctcccccaagaagaagcggaaggtgtccgagtccgccacccccgagtccgtgtccggctggcggctgttcaagaagatctccatcgccgccctggagaaggagatcgccgccctggagaaggagaacgccgccctggagtgggagatcgccgccctggagaagtagctagcaccagcctcaagaacacccgaatggagtctctaagctacataataccaacttacactttacaaaatgttgtcccccaaaatgtagccattcgtatctgctcctaataaaaagaaagtttcttcacattctctcgagaaaaaaaaaaaatggaaaaaaaaaaaacggaaaaaaaaaaaaggtaaaaaaaaaaaatataaaaaaaaaaaacataaaaaaaaaaaacgaaaaaaaaaaaacgtaaaaaaaaaaaactcaaaaaaaaaaaagataaaaaaaaaaaacctaaaaaaaaaaaatgtaaaaaaaaaaaagggaaaaaaaaaaaacgcaaaaaaaaaaaacacaaaaaaaaaaaatgcaaaaaaaaaaaatcgaaaaaaaaaaaatctaaaaaaaaaaaacgaaaaaaaaaaaacccaaaaaaaaaaaagacaaaaaaaaaaaatagaaaaaaaaaaagttaaaaaaaaaaaactgaaaaaaaaaaaatttaaaaaaaaaaaatctag

SEQ ID NO: 1252 - protein, 2334 aa, synthetic construct
  REGION 1..2334: note = Synthetic
MDKKYSIGLDIGTNSVGWAVITDEYKVPSKKFKVLGNTDRHSIKKNLIGALLFDSGETAEATRLKRTARRRYTRRKNRICYLQEIFSNEMAKVDDSFFHRLEESFLVEEDKKHERHPIFGNIVDEVAYHEKYPTIYHLRKKLVDSTDKADLRLIYLALAHMIKFRGHFLIEGDLNPDNSDVDKLFIQLVQTYNQLFEENPINASGVDAKAILSARLSKSRRLENLIAQLPGEKKNGLFGNLIALSLGLTPNFKSNFDLAEDAKLQLSKDTYDDDLDNLLAQIGDQYADLFLAAKNLSDAILLSDILRVNTEITKAPLSASMIKRYDEHHQDLTLLKALVRQQLPEKYKEIFFDQSKNGYAGYIDGGASQEEFYKFIKPILEKMDGTEELLVKLNREDLLRKQRTFDNGSIPHQIHLGELHAILRRQEDFYPFLKDNREKIEKILTFRIPYYVGPLARGNSRFAWMTRKSEETITPWNFEEVVDKGASAQSFIERMTNFDKNLPNEKVLPKHSLLYEYFTVYNELTKVKYVTEGMRKPAFLSGEQKKAIVDLLFKTNRKVTVKQLKEDYFKKIECFDSVEISGVEDRFNASLGTYHDLLKIIKDKDFLDNEENEDILEDIVLTLTLFEDREMIEERLKTYAHLFDDKVMKQLKRRRYTGWGRLSRKLINGIRDKQSGKTILDFLKSDGFANRNFMQLIHDDSLTFKEDIQKAQVSGQGDSLHEHIANLAGSPAIKKGILQTVKVVDELVKVMGRHKPENIVIEMARENQTTQKGQKNSRERMKRIEEGIKELGSQILKEHPVENTQLQNEKLYLYYLQNGRDMYVDQELDINRLSDYDVDAIVPQSFLKDDSIDNKVLTRSDKNRGKSDNVPSEEVVKKMKNYWRQLLNAKLITQRKFDNLTKAERGGLSELDKAGFIKRQLVETRQITKHVAQILDSRMNTKYDENDKLIREVKVITLKSKLVSDFRKDFQFYKVREINNYHHAHDAYLNAVVGTALIKKYPKLESEFVYGDYKVYDVRKMIAKSEQEIGKATAKYFFYSNIMNFFKTEITLANGEIRKRPLIETNGETGEIVWDKGRDFATVRKVLSMPQVNIVKKTEVQTGGFSKESILPKRNSDKLIARKKDWDPKKYGGFDSPTVAYSVLVVAKVEKGKSKKLKSVKELLGITIMERSSFEKNPIDFLEAKGYKEVKKDLIIKLPKYSLFELENGRKRMLASAGELQKGNELALPSKYVNFLYLASHYEKLKGSPEDNEQKQLFVEQHKHYLDEIIEQISEFSKRVILADANLDKVLSAYNKHRDKPIREQAENIIHLFTLTNLGAPAAFKYFDTTIDRKRYTSTKEVLDATLIHQSITGLYETRIDLSQLGGDGAPESATESGGTSTESEGSAGTSTESEGSAGSAGSTSGSSSGMKIAVVDKALNNTRYDKHFQLYGEEVDVFHMCNEKLSGRLLKKHITIGTPENPFDPNDYDFVILVGAEPFLYFAGKKGIGDYTGKRVEYNGYANWIASISPAQLHFKPEMKPVFDATVENIHDIINGREKIAKAGDYRPITDPDEAEEYIKMVYNMVIGPVAFASATSALYCRDGYLLGVSISHQEYQGVYIDSDCLTEVAVYYLQKILDSENHTIVFHNLKFDMHFYKYHLGLTFDKAHKERRLHDTMLQHYVLDERRGTHGLKSLAMKYTDMGDYDFELDKFKDDYCKAHKIKKEDFTYDLIPFDIMWPYAAKDTDATIRLHNFFLPKIEKNEKLCSLYYDVLMPGCVFLQRVEDRGVPISIDRLKEAQYQLTHNLNKAREKLYTYPEVKQLEQDQNEAFNPNSVKQLRVLLFDYVGLTPTGKLTDTGADSTDAEALNELATQHPIAKTLLEIRKLTKLISTYVEKILLSIDADGCIRTGFHEHMTTSGRLSSSGKLNLQQLPRDESIIKGCVVAPPGYRVIAWDLTTAEVYYAAVLSGDRNMQQVFINMRNEPDKYPDFHSNIAHMVFKLQCEPRDVKKLFPALRQAAKAITFGILYGSGPAKVAHSVNEALLEQAAKTGEPFVECTVADAKEYIETYFGQFPQLKRWIDKCHDQIKNHGFIYSHFGRKRRLHNIHSEDRGVQGEEIRSGFNAIIQSASSDSLLLGAVDADNEIISLGLEQEMKIVMLVHDSVVAIVREDLIDQYNEILIRNIQKDRGISIPGCPIGIDSDSEAGGSRDYSCGKMKKQHPSIACIDDDEYTRYVKGVLLDAEFEYKKLAAMDKEHPDHSKYKDDKFIAVCKDLDNVKRILGAGGGSGKRTADGSGGGSPKKKRKVSESATPESVSGWRLFKKISIAALEKEIAALEKENAALEWEIAALEK

SEQ ID NO: 1253 - DNA, 6948 bp, synthetic construct
  misc_feature 1..6948: note = Synthetic
  source 1..6948: mol_type = other DNA
atggacaagaagtactccatcggcctggacatcggcaccaactccgtgggctgggccgtgatcaccgacgagtacaaggtgccctccaagaagttcaaggtgctgggcaacaccgaccggcactccatcaagaagaacctgatcggcgccctgctgttcgactccggcgagaccgccgaggccacccggctgaagcggaccgcccggcggcggtacacccggcggaagaaccggatctgctacctgcaggagatcttctccaacgagatggccaaggtggacgactccttcttccaccggctggaggagtccttcctggtggaggaggacaagaagcacgagcggcaccccatcttcggcaacatcgtggacgaggtggcctaccacgagaagtaccccaccatctaccacctgcggaagaagctggtggactccaccgacaaggccgacctgcggctgatctacctggccctggcccacatgatcaagttccggggccacttcctgatcgagggcgacctgaaccccgacaactccgacgtggacaagctgttcatccagctggtgcagacctacaaccagctgttcgaggagaaccccatcaacgcctccggcgtggacgccaaggccatcctgtccgcccggctgtccaagtcccggcggctggagaacctgatcgcccagctgcccggcgagaagaagaacggcctgttcggcaacctgatcgccctgtccctgggcctgacccccaacttcaagtccaacttcgacctggccgaggacgccaagctgcagctgtccaaggacacctacgacgacgacctggacaacctgctggcccagatcggcgaccagtacgccgacctgttcctggccgccaagaacctgtccgacgccatcctgctgtccgacatcctgcgggtgaacaccgagatcaccaaggcccccctgtccgcctccatgatcaagcggtacgacgagcaccaccaggacctgaccctgctgaaggccctggtgcggcagcagctgcccgagaagtacaaggagatcttcttcgaccagtccaagaacggctacgccggctacatcgacggcggcgcctcccaggaggagttctacaagttcatcaagcccatcctggagaagatggacggcaccgaggagctgctggtgaagctgaaccgggaggacctgctgcggaagcagcggaccttcgacaacggctccatcccccaccagatccacctgggcgagctgcacgccatcctgcggcggcaggaggacttctaccccttcctgaaggacaaccgggagaagatcgagaagatcctgaccttccggatcccctactacgtgggccccctggcccggggcaactcccggttcgcctggatgacccggaagtccgaggagaccatcaccccctggaacttcgaggaggtggtggacaagggcgcctccgcccagtccttcatcgagcggatgaccaacttcgacaagaacctgcccaacgagaaggtgctgcccaagcactccctgctgtacgagtacttcaccgtgtacaacgagctgaccaaggtgaagtacgtgaccgagggcatgcggaagcccgccttcctgtccggcgagcagaagaaggccatcgtggacctgctgttcaagaccaaccggaaggtgaccgtgaagcagctgaaggaggactacttcaagaagatcgagtgcttcgactccgtggagatctccggcgtggaggaccggttcaacgcctccctgggcacctaccacgacctgctgaagatcatcaaggacaaggacttcctggacaacgaggagaacgaggacatcctggaggacatcgtgctgaccctgaccctgttcgaggaccgggagatgatcgaggagcggctgaagacctacgcccacctgttcgacgacaaggtgatgaagcagctgaagcggcggcggtacaccggctggggccggctgtcccggaagctgatcaacggcatccgggacaagcagtccggcaagaccatcctggacttcctgaagtccgacggcttcgccaaccggaacttcatgcagctgatccacgacgactccctgaccttcaaggaggacatccagaaggcccaggtgtccggccagggcgactccctgcacgagcacatcgccaacctggccggctcccccgccatcaagaagggcatcctgcagaccgtgaaggtggtggacgagctggtgaaggtgatgggccggcacaagcccgagaacatcgtgatcgagatggcccgggagaaccagaccacccagaagggccagaagaactcccgggagcggatgaagcggatcgaggagggcatcaaggagctgggctcccagatcctgaaggagcaccccgtggagaacacccagctgcagaacgagaagctgtacctgtactacctgcagaacggccgggacatgtacgtggaccaggagctggacatcaaccggctgtccgactacgacgtggacgccatcgtgccccagtccttcctgaaggacgactccatcgacaacaaggtgctgacccggtccgacaagaaccggggcaagtccgacaacgtgccctccgaggaggtggtgaagaagatgaagaactactggcggcagctgctgaacgccaagctgatcacccagcggaagttcgacaacctgaccaaggccgagcggggcggcctgtccgagctggacaaggccggcttcatcaagcggcagctggtggagacccggcagatcaccaagcacgtggcccagatcctggactcccggatgaacaccaagtacgacgagaacgacaagctgatccgggaggtgaaggtgatcaccctgaagtccaagctggtgtccgacttccggaaggacttccagttctacaaggtgcgggagatcaacaactaccaccacgcccacgacgcctacctgaacgccgtggtgggcaccgccctgatcaagaagtaccccaagctggagtccgagttcgtgtacggcgactacaaggtgtacgacgtgcggaagatgatcgccaagtccgagcaggagatcggcaaggccaccgccaagtacttcttctactccaacatcatgaacttcttcaagaccgagatcaccctggccaacggcgagatccggaagcggcccctgatcgagaccaacggcgagaccggcgagatcgtgtgggacaagggccgggacttcgccaccgtgcggaaggtgctgtccatgccccaggtgaacatcgtgaagaagaccgaggtgcagaccggcggcttctccaaggagtccatcctgcccaagcggaactccgacaagctgatcgcccggaagaaggactgggaccccaagaagtacggcggcttcgactcccccaccgtggcctactccgtgctggtggtggccaaggtggagaagggcaagtccaagaagctgaagtccgtgaaggagctgctgggcatcaccatcatggagcggtcctccttcgagaagaaccccatcgacttcctggaggccaagggctacaaggaggtgaagaaggacctgatcatcaagctgcccaagtactccctgttcgagctggagaacggccggaagcggatgctggcctccgccggcgagctgcagaagggcaacgagctggccctgccctccaagtacgtgaacttcctgtacctggcctcccactacgagaagctgaagggctcccccgaggacaacgagcagaagcagctgttcgtggagcagcacaagcactacctggacgagatcatcgagcagatctccgagttctccaagcgggtgatcctggccgacgccaacctggacaaggtgctgtccgcctacaacaagcaccgggacaagcccatccgggagcaggccgagaacatcatccacctgttcaccctgaccaacctgggcgcccccgccgccttcaagtacttcgacaccaccatcgaccggaagcggtacacctccaccaaggaggtgctggacgccaccctgatccaccagtccatcaccggcctgtacgagacccggatcgacctgtcccagctgggcggcgacggcgcccccgagtccgccaccgagtccggcggcacctccaccgagtccgagggctccgccggcacctccaccgagtccgagggctccgccggctccgccggctccacctccggctcctcctccggcatgaagatcgccgtggtggacaaggccctgaacaacacccggtacgacaagcacttccagctgtacggcgaggaggtggacgtgttccacatgtgcaacgagaagctgtccggccggctgctgaagaagcacatcaccatcggcacccccgagaaccccttcgaccccaacgactacgacttcgtgatcctggtgggcgccgagcccttcctgtacttcgccggcaagaagggcatcggcgactacaccggcaagcgggtggagtacaacggctacgccaactggatcgcctccatctcccccgcccagctgcacttcaagcccgagatgaagcccgtgttcgacgccaccgtggagaacatccacgacatcatcaacggccgggagaagatcgccaaggccggcgactaccggcccatcaccgaccccgacgaggccgaggagtacatcaagatggtgtacaacatggtgatcggccccgtggccttcgcctccgccacctccgccctgtactgccgggacggctacctgctgggcgtgtccatctcccaccaggagtaccagggcgtgtacatcgactccgactgcctgaccgaggtggccgtgtactacctgcagaagatcctggactccgagaaccacaccatcgtgttccacaacctgaagttcgacatgcacttctacaagtaccacctgggcctgaccttcgacaaggcccacaaggagcggcggctgcacgacaccatgctgcagcactacgtgctggacgagcggcggggcacccacggcctgaagtccctggccatgaagtacaccgacatgggcgactacgacttcgagctggacaagttcaaggacgactactgcaaggcccacaagatcaagaaggaggacttcacctacgacctgatccccttcgacatcatgtggccctacgccgccaaggacaccgacgccaccatccggctgcacaacttcttcctgcccaagatcgagaagaacgagaagctgtgctccctgtactacgacgtgctgatgcccggctgcgtgttcctgcagcgggtggaggaccggggcgtgcccatctccatcgaccggctgaaggaggcccagtaccagctgacccacaacctgaacaaggcccgggagaagctgtacacctaccccgaggtgaagcagctggagcaggaccagaacgaggccttcaaccccaactccgtgaagcagctgcgggtgctgctgttcgactacgtgggcctgacccccaccggcaagctgaccgacaccggcgccgactccaccgacgccgaggccctgaacgagctggccacccagcaccccatcgccaagaccctgctggagatccggaagctgaccaagctgatctccacctacgtggagaagatcctgctgtccatcgacgccgacggctgcatccggaccggcttccacgagcacatgaccacctccggccggctgtcctcctccggcaagctgaacctgcagcagctgccccgggacgagtccatcatcaagggctgcgtggtggccccccccggctaccgggtgatcgcctgggacctgaccaccgccgaggtgtactacgccgccgtgctgtccggcgaccggaacatgcagcaggtgttcatcaacatgcggaacgagcccgacaagtaccccgacttccactccaacatcgcccacatggtgttcaagctgcagtgcgagccccgggacgtgaagaagctgttccccgccctgcggcaggccgccaaggccatcaccttcggcatcctgtacggctccggccccgccaaggtggcccactccgtgaacgaggccctgctggagcaggccgccaagaccggcgagcccttcgtggagtgcaccgtggccgacgccaaggagtacatcgagacctacttcggccagttcccccagctgaagcggtggatcgacaagtgccacgaccagatcaagaaccacggcttcatctactcccacttcggccggaagcggcggctgcacaacatccactccgaggaccggggcgtgcagggcgaggagatccggtccggcttcaacgccatcatccagtccgcctcctccgactccctgctgctgggcgccgtggacgccgacaacgagatcatctccctgggcctggagcaggagatgaagatcgtgatgctggtgcacgactccgtggtggccatcgtgcgggaggacctgatcgaccagtacaacgagatcctgatccggaacatccagaaggaccggggcatctccatccccggctgccccatcggcatcgactccgactccgaggccggcggctcccgggactactcctgcggcaagatgaagaagcagcacccctccatcgcctgcatcgacgacgacgagtacacccggtacgtgaagggcgtgctgctggacgccgagttcgagtacaagaagctggccgccatggacaaggagcaccccgaccactccaagtacaaggacgacaagttcatcgccgtgtgcaaggacctggacaacgtgaagcggatcctgggcgccggcggcggctccggcaagcggaccgccgacggctccggcggcggctcccccaagaagaagcggaaggtgatcgccgccctggagaaggagatcgccgccctggagaaggagaacgccgccctggagtgggagatcgccgccctggagaagtag

SEQ ID NO: 1254 - protein, 2315 aa, synthetic construct
  REGION 1..2315: note = Synthetic
MDKKYSIGLDIGTNSVGWAVITDEYKVPSKKFKVLGNTDRHSIKKNLIGALLFDSGETAEATRLKRTARRRYTRRKNRICYLQEIFSNEMAKVDDSFFHRLEESFLVEEDKKHERHPIFGNIVDEVAYHEKYPTIYHLRKKLVDSTDKADLRLIYLALAHMIKFRGHFLIEGDLNPDNSDVDKLFIQLVQTYNQLFEENPINASGVDAKAILSARLSKSRRLENLIAQLPGEKKNGLFGNLIALSLGLTPNFKSNFDLAEDAKLQLSKDTYDDDLDNLLAQIGDQYADLFLAAKNLSDAILLSDILRVNTEITKAPLSASMIKRYDEHHQDLTLLKALVRQQLPEKYKEIFFDQSKNGYAGYIDGGASQEEFYKFIKPILEKMDGTEELLVKLNREDLLRKQRTFDNGSIPHQIHLGELHAILRRQEDFYPFLKDNREKIEKILTFRIPYYVGPLARGNSRFAWMTRKSEETITPWNFEEVVDKGASAQSFIERMTNFDKNLPNEKVLPKHSLLYEYFTVYNELTKVKYVTEGMRKPAFLSGEQKKAIVDLLFKTNRKVTVKQLKEDYFKKIECFDSVEISGVEDRFNASLGTYHDLLKIIKDKDFLDNEENEDILEDIVLTLTLFEDREMIEERLKTYAHLFDDKVMKQLKRRRYTGWGRLSRKLINGIRDKQSGKTILDFLKSDGFANRNFMQLIHDDSLTFKEDIQKAQVSGQGDSLHEHIANLAGSPAIKKGILQTVKVVDELVKVMGRHKPENIVIEMARENQTTQKGQKNSRERMKRIEEGIKELGSQILKEHPVENTQLQNEKLYLYYLQNGRDMYVDQELDINRLSDYDVDAIVPQSFLKDDSIDNKVLTRSDKNRGKSDNVPSEEVVKKMKNYWRQLLNAKLITQRKFDNLTKAERGGLSELDKAGFIKRQLVETRQITKHVAQILDSRMNTKYDENDKLIREVKVITLKSKLVSDFRKDFQFYKVREINNYHHAHDAYLNAVVGTALIKKYPKLESEFVYGDYKVYDVRKMIAKSEQEIGKATAKYFFYSNIMNFFKTEITLANGEIRKRPLIETNGETGEIVWDKGRDFATVRKVLSMPQVNIVKKTEVQTGGFSKESILPKRNSDKLIARKKDWDPKKYGGFDSPTVAYSVLVVAKVEKGKSKKLKSVKELLGITIMERSSFEKNPIDFLEAKGYKEVKKDLIIKLPKYSLFELENGRKRMLASAGELQKGNELALPSKYVNFLYLASHYEKLKGSPEDNEQKQLFVEQHKHYLDEIIEQISEFSKRVILADANLDKVLSAYNKHRDKPIREQAENIIHLFTLTNLGAPAAFKYFDTTIDRKRYTSTKEVLDATLIHQSITGLYETRIDLSQLGGDGAPESATESGGTSTESEGSAGTSTESEGSAGSAGSTSGSSSGMKIAVVDKALNNTRYDKHFQLYGEEVDVFHMCNEKLSGRLLKKHITIGTPENPFDPNDYDFVILVGAEPFLYFAGKKGIGDYTGKRVEYNGYANWIASISPAQLHFKPEMKPVFDATVENIHDIINGREKIAKAGDYRPITDPDEAEEYIKMVYNMVIGPVAFASATSALYCRDGYLLGVSISHQEYQGVYIDSDCLTEVAVYYLQKILDSENHTIVFHNLKFDMHFYKYHLGLTFDKAHKERRLHDTMLQHYVLDERRGTHGLKSLAMKYTDMGDYDFELDKFKDDYCKAHKIKKEDFTYDLIPFDIMWPYAAKDTDATIRLHNFFLPKIEKNEKLCSLYYDVLMPGCVFLQRVEDRGVPISIDRLKEAQYQLTHNLNKAREKLYTYPEVKQLEQDQNEAFNPNSVKQLRVLLFDYVGLTPTGKLTDTGADSTDAEALNELATQHPIAKTLLEIRKLTKLISTYVEKILLSIDADGCIRTGFHEHMTTSGRLSSSGKLNLQQLPRDESIIKGCVVAPPGYRVIAWDLTTAEVYYAAVLSGDRNMQQVFINMRNEPDKYPDFHSNIAHMVFKLQCEPRDVKKLFPALRQAAKAITFGILYGSGPAKVAHSVNEALLEQAAKTGEPFVECTVADAKEYIETYFGQFPQLKRWIDKCHDQIKNHGFIYSHFGRKRRLHNIHSEDRGVQGEEIRSGFNAIIQSASSDSLLLGAVDADNEIISLGLEQEMKIVMLVHDSVVAIVREDLIDQYNEILIRNIQKDRGISIPGCPIGIDSDSEAGGSRDYSCGKMKKQHPSIACIDDDEYTRYVKGVLLDAEFEYKKLAAMDKEHPDHSKYKDDKFIAVCKDLDNVKRILGAGGGSGKRTADGSGGGSPKKKRKVIAALEKEIAALEKENAALEWEIAALEK

SEQ ID NO: 1255 - DNA, 7008 bp, synthetic construct
  misc_feature 1..7008: note = Synthetic
  source 1..7008: mol_type = other DNA
atggacaagaagtactccatcggcctggacatcggcaccaactccgtgggctgggccgtgatcaccgacgagtacaaggtgccctccaagaagttcaaggtgctgggcaacaccgaccggcactccatcaagaagaacctgatcggcgccctgctgttcgactccggcgagaccgccgaggccacccggctgaagcggaccgcccggcggcggtacacccggcggaagaaccggatctgctacctgcaggagatcttctccaacgagatggccaaggtggacgactccttcttccaccggctggaggagtccttcctggtggaggaggacaagaagcacgagcggcaccccatcttcggcaacatcgtggacgaggtggcctaccacgagaagtaccccaccatctaccacctgcggaagaagctggtggactccaccgacaaggccgacctgcggctgatctacctggccctggcccacatgatcaagttccggggccacttcctgatcgagggcgacctgaaccccgacaactccgacgtggacaagctgttcatccagctggtgcagacctacaaccagctgttcgaggagaaccccatcaacgcctccggcgtggacgccaaggccatcctgtccgcccggctgtccaagtcccggcggctggagaacctgatcgcccagctgcccggcgagaagaagaacggcctgttcggcaacctgatcgccctgtccctgggcctgacccccaacttcaagtccaacttcgacctggccgaggacgccaagctgcagctgtccaaggacacctacgacgacgacctggacaacctgctggcccagatcggcgaccagtacgccgacctgttcctggccgccaagaacctgtccgacgccatcctgctgtccgacatcctgcgggtgaacaccgagatcaccaaggcccccctgtccgcctccatgatcaagcggtacgacgagcaccaccaggacctgaccctgctgaaggccctggtgcggcagcagctgcccgagaagtacaaggagatcttcttcgaccagtccaagaacggctacgccggctacatcgacggcggcgcctcccaggaggagttctacaagttcatcaagcccatcctggagaagatggacggcaccgaggagctgctggtgaagctgaaccgggaggacctgctgcggaagcagcggaccttcgacaacggctccatcccccaccagatccacctgggcgagctgcacgccatcctgcggcggcaggaggacttctaccccttcctgaaggacaaccgggagaagatcgagaagatcctgaccttccggatcccctactacgtgggccccctggcccggggcaactcccggttcgcctggatgacccggaagtccgaggagaccatcaccccctggaacttcgaggaggtggtggacaagggcgcctccgcccagtccttcatcgagcggatgaccaacttcgacaagaacctgcccaacgagaaggtgctgcccaagcactccctgctgtacgagtacttcaccgtgtacaacgagctgaccaaggtgaagtacgtgaccgagggcatgcggaagcccgccttcctgtccggcgagcagaagaaggccatcgtggacctgctgttcaagaccaaccggaaggtgaccgtgaagcagctgaaggaggactacttcaagaagatcgagtgcttcgactccgtggagatctccggcgtggaggaccggttcaacgcctccctgggcacctaccacgacctgctgaagatcatcaaggacaaggacttcctggacaacgaggagaacgaggacatcctggaggacatcgtgctgaccctgaccctgttcgaggaccgggagatgatcgaggagcggctgaagacctacgcccacctgttcgacgacaaggtgatgaagcagctgaagcggcggcggtacaccggctggggccggctgtcccggaagctgatcaacggcatccgggacaagcagtccggcaagaccatcctggacttcctgaagtccgacggcttcgccaaccggaacttcatgcagctgatccacgacgactccctgaccttcaaggaggacatccagaaggcccaggtgtccggccagggcgactccctgcacgagcacatcgccaacctggccggctcccccgccatcaagaagggcatcctgcagaccgtgaaggtggtggacgagctggtgaaggtgatgggccggcacaagcccgagaacatcgtgatcgagatggcccgggagaaccagaccacccagaagggccagaagaactcccgggagcggatgaagcggatcgaggagggcatcaaggagctgggctcccagatcctgaaggagcaccccgtggagaacacccagctgcagaacgagaagctgtacctgtactacctgcagaacggccgggacatgtacgtggaccaggagctggacatcaaccggctgtccgactacgacgtggacgccatcgtgccccagtccttcctgaaggacgactccatcgacaacaaggtgctgacccggtccgacaagaaccggggcaagtccgacaacgtgccctccgaggaggtggtgaagaagatgaagaactactggcggcagctgctgaacgccaagctgatcacccagcggaagttcgacaacctgaccaaggccgagcggggcggcctgtccgagctggacaaggccggcttcatcaagcggcagctggtggagacccggcagatcaccaagcacgtggcccagatcctggactcccggatgaacaccaagtacgacgagaacgacaagctgatccgggaggtgaaggtgatcaccctgaagtccaagctggtgtccgacttccggaaggacttccagttctacaaggtgcgggagatcaacaactaccaccacgcccacgacgcctacctgaacgccgtggtgggcaccgccctgatcaagaagtaccccaagctggagtccgagttcgtgtacggcgactacaaggtgtacgacgtgcggaagatgatcgccaagtccgagcaggagatcggcaaggccaccgccaagtacttcttctactccaacatcatgaacttcttcaagaccgagatcaccctggccaacggcgagatccggaagcggcccctgatcgagaccaacggcgagaccggcgagatcgtgtgggacaagggccgggacttcgccaccgtgcggaaggtgctgtccatgccccaggtgaacatcgtgaagaagaccgaggtgcagaccggcggcttctccaaggagtccatcctgcccaagcggaactccgacaagctgatcgcccggaagaaggactgggaccccaagaagtacggcggcttcgactcccccaccgtggcctactccgtgctggtggtggccaaggtggagaagggcaagtccaagaagctgaagtccgtgaaggagctgctgggcatcaccatcatggagcggtcctccttcgagaagaaccccatcgacttcctggaggccaagggctacaaggaggtgaagaaggacctgatcatcaagctgcccaagtactccctgttcgagctggagaacggccggaagcggatgctggcctccgccggcgagctgcagaagggcaacgagctggccctgccctccaagtacgtgaacttcctgtacctggcctcccactacgagaagctgaagggctcccccgaggacaacgagcagaagcagctgttcgtggagcagcacaagcactacctggacgagatcatcgagcagatctccgagttctccaagcgggtgatcctggccgacgccaacctggacaaggtgctgtccgcctacaacaagcaccgggacaagcccatccgggagcaggccgagaacatcatccacctgttcaccctgaccaacctgggcgcccccgccgccttcaagtacttcgacaccaccatcgaccggaagcggtacacctccaccaaggaggtgctggacgccaccctgatccaccagtccatcaccggcctgtacgagacccggatcgacctgtcccagctgggcggcgacggcgcccccgagtccgccaccgagtccggcggcacctccaccgagtccgagggctccgccggcacctccaccgagtccgagggctccgccggctccgccggctccacctccggctcctcctccggcatgaagatcgccgtggtggacaaggccctgaacaacacccggtacgacaagcacttccagctgtacggcgaggaggtggacgtgttccacatgtgcaacgagaagctgtccggccggctgctgaagaagcacatcaccatcggcacccccgagaaccccttcgaccccaacgactacgacttcgtgatcctggtgggcgccgagcccttcctgtacttcgccggcaagaagggcatcggcgactacaccggcaagcgggtggagtacaacggctacgccaactggatcgcctccatctcccccgcccagctgcacttcaagcccgagatgaagcccgtgttcgacgccaccgtggagaacatccacgacatcatcaacggccgggagaagatcgccaaggccggcgactaccggcccatcaccgaccccgacgaggccgaggagtacatcaagatggtgtacaacatggtgatcggccccgtggccttcgcctccgccacctccgccctgtactgccgggacggctacctgctgggcgtgtccatctcccaccaggagtaccagggcgtgtacatcgactccgactgcctgaccgaggtggccgtgtactacctgcagaagatcctggactccgagaaccacaccatcgtgttccacaacctgaagttcgacatgcacttctacaagtaccacctgggcctgaccttcgacaaggcccacaaggagcggcggctgcacgacaccatgctgcagcactacgtgctggacgagcggcggggcacccacggcctgaagtccctggccatgaagtacaccgacatgggcgactacgacttcgagctggacaagttcaaggacgactactgcaaggcccacaagatcaagaaggaggacttcacctacgacctgatccccttcgacatcatgtggccctacgccgccaaggacaccgacgccaccatccggctgcacaacttcttcctgcccaagatcgagaagaacgagaagctgtgctccctgtactacgacgtgctgatgcccggctgcgtgttcctgcagcgggtggaggaccggggcgtgcccatctccatcgaccggctgaaggaggcccagtaccagctgacccacaacctgaacaaggcccgggagaagctgtacacctaccccgaggtgaagcagctggagcaggaccagaacgaggccttcaaccccaactccgtgaagcagctgcgggtgctgctgttcgactacgtgggcctgacccccaccggcaagctgaccgacaccggcgccgactccaccgacgccgaggccctgaacgagctggccacccagcaccccatcgccaagaccctgctggagatccggaagctgaccaagctgatctccacctacgtggagaagatcctgctgtccatcgacgccgacggctgcatccggaccggcttccacgagcacatgaccacctccggccggctgtcctcctccggcaagctgaacctgcagcagctgccccgggacgagtccatcatcaagggctgcgtggtggccccccccggctaccgggtgatcgcctgggacctgaccaccgccgaggtgtactacgccgccgtgctgtccggcgaccggaacatgcagcaggtgttcatcaacatgcggaacgagcccgacaagtaccccgacttccactccaacatcgcccacatggtgttcaagctgcagtgcgagccccgggacgtgaagaagctgttccccgccctgcggcaggccgccaaggccatcaccttcggcatcctgtacggctccggccccgccaaggtggcccactccgtgaacgaggccctgctggagcaggccgccaagaccggcgagcccttcgtggagtgcaccgtggccgacgccaaggagtacatcgagacctacttcggccagttcccccagctgaagcggtggatcgacaagtgccacgaccagatcaagaaccacggcttcatctactcccacttcggccggaagcggcggctgcacaacatccactccgaggaccggggcgtgcagggcgaggagatccggtccggcttcaacgccatcatccagtccgcctcctccgactccctgctgctgggcgccgtggacgccgacaacgagatcatctccctgggcctggagcaggagatgaagatcgtgatgctggtgcacgactccgtggtggccatcgtgcgggaggacctgatcgaccagtacaacgagatcctgatccggaacatccagaaggaccggggcatctccatccccggctgccccatcggcatcgactccgactccgaggccggcggctcccgggactactcctgcggcaagatgaagaagcagcacccctccatcgcctgcatcgacgacgacgagtacacccggtacgtgaagggcgtgctgctggacgccgagttcgagtacaagaagctggccgccatggacaaggagcaccccgaccactccaagtacaaggacgacaagttcatcgccgtgtgcaaggacctggacaacgtgaagcggatcctgggcgccggcggcggctccggcaagcggaccgccgacggctccggcggcggctcccccaagaagaagcggaaggtgtccgagtccgccacccccgagtccgtgtccggctggcggctgttcaagaagatctccaagatcgccgccctgaaggagaagatcgccgccctgaaggagaagaacgccgccctgaagtggaagatcgccgccctgaaggagtag

SEQ ID NO: 1256 - RNA, 7567 nt, synthetic construct
  misc_feature 1..7567: note = Synthetic
  source 1..7567: mol_type = other RNA
gggaagctcagaataaacgctcaactttggccggatctgccaccatggacaagaagtactccatcggcctggacatcggcaccaactccgtgggctgggccgtgatcaccgacgagtacaaggtgccctccaagaagttcaaggtgctgggcaacaccgaccggcactccatcaagaagaacctgatcggcgccctgctgttcgactccggcgagaccgccgaggccacccggctgaagcggaccgcccggcggcggtacacccggcggaagaaccggatctgctacctgcaggagatcttctccaacgagatggccaaggtggacgactccttcttccaccggctggaggagtccttcctggtggaggaggacaagaagcacgagcggcaccccatcttcggcaacatcgtggacgaggtggcctaccacgagaagtaccccaccatctaccacctgcggaagaagctggtggactccaccgacaaggccgacctgcggctgatctacctggccctggcccacatgatcaagttccggggccacttcctgatcgagggcgacctgaaccccgacaactccgacgtggacaagctgttcatccagctggtgcagacctacaaccagctgttcgaggagaaccccatcaacgcctccggcgtggacgccaaggccatcctgtccgcccggctgtccaagtcccggcggctggagaacctgatcgcccagctgcccggcgagaagaagaacggcctgttcggcaacctgatcgccctgtccctgggcctgacccccaacttcaagtccaacttcgacctggccgaggacgccaagctgcagctgtccaaggacacctacgacgacgacctggacaacctgctggcccagatcggcgaccagtacgccgacctgttcctggccgccaagaacctgtccgacgccatcctgctgtccgacatcctgcgggtgaacaccgagatcaccaaggcccccctgtccgcctccatgatcaagcggtacgacgagcaccaccaggacctgaccctgctgaaggccctggtgcggcagcagctgcccgagaagtacaaggagatcttcttcgaccagtccaagaacggctacgccggctacatcgacggcggcgcctcccaggaggagttctacaagttcatcaagcccatcctggagaagatggacggcaccgaggagctgctggtgaagctgaaccgggaggacctgctgcggaagcagcggaccttcgacaacggctccatcccccaccagatccacctgggcgagctgcacgccatcctgcggcggcaggaggacttctaccccttcctgaaggacaaccgggagaagatcgagaagatcctgaccttccggatcccctactacgtgggccccctggcccggggcaactcccggttcgcctggatgacccggaagtccgaggagaccatcaccccctggaacttcgaggaggtggtggacaagggcgcctccgcccagtccttcatcgagcggatgaccaacttcgacaagaacctgcccaacgagaaggtgctgcccaagcactccctgctgtacgagtacttcaccgtgtacaacgagctgaccaaggtgaagtacgtgaccgagggcatgcggaagcccgccttcctgtccggcgagcagaagaaggccatcgtggacctgctgttcaagaccaaccggaaggtgaccgtgaagcagctgaaggaggactacttcaagaagatcgagtgcttcgactccgtggagatctccggcgtggaggaccggttcaacgcctccctgggcacctaccacgacctgctgaagatcatcaaggacaaggacttcctggacaacgaggagaacgaggacatcctggaggacatcgtgctgaccctgaccctgttcgaggaccgggagatgatcgaggagcggctgaagacctacgcccacctgttcgacgacaaggtgatgaagcagctgaagcggcggcggtacaccggctggggccggctgtcccggaagctgatcaacggcatccgggacaagcagtccggcaagaccatcctggacttcctgaagtccgacggcttcgccaaccggaacttcatgcagctgatccacgacgactccctgaccttcaaggaggacatccagaaggcccaggtgtccggccagggcgactccctgcacgagcacatcgccaacctggccggctcccccgccatcaagaagggcatcctgcagaccgtgaaggtggtggacgagctggtgaaggtgatgggccggcacaagcccgagaacatcgtgatcgagatggcccgggagaaccagaccacccagaagggccagaagaactcccgggagcggatgaagcggatcgaggagggcatcaaggagctgggctcccagatcctgaaggagcaccccgtggagaacacccagctgcagaacgagaagctgtacctgtactacctgcagaacggccgggacatgtacgtggaccaggagctggacatcaaccggctgtccgactacgacgtggacgccatcgtgccccagtccttcctgaaggacgactccatcgacaacaaggtgctgacccggtccgacaagaaccggggcaagtccgacaacgtgccctccgaggaggtggtgaagaagatgaagaactactggcggcagctgctgaacgccaagctgatcacccagcggaagttcgacaacctgaccaaggccgagcggggcggcctgtccgagctggacaaggccggcttcatcaagcggcagctggtggagacccggcagatcaccaagcacgtggcccagatcctggactcccggatgaacaccaagtacgacgagaacgacaagctgatccgggaggtgaaggtgatcaccctgaagtccaagctggtgtccgacttccggaaggacttccagttctacaaggtgcgggagatcaacaactaccaccacgcccacgacgcctacctgaacgccgtggtgggcaccgccctgatcaagaagtaccccaagctggagtccgagttcgtgtacggcgactacaaggtgtacgacgtgcggaagatgatcgccaagtccgagcaggagatcggcaaggccaccgccaagtacttcttctactccaacatcatgaacttcttcaagaccgagatcaccctggccaacggcgagatccggaagcggcccctgatcgagaccaacggcgagaccggcgagatcgtgtgggacaagggccgggacttcgccaccgtgcggaaggtgctgtccatgccccaggtgaacatcgtgaagaagaccgaggtgcagaccggcggcttctccaaggagtccatcctgcccaagcggaactccgacaagctgatcgcccggaagaaggactgggaccccaagaagtacggcggcttcgactcccccaccgtggcctactccgtgctggtggtggccaaggtggagaagggcaagtccaagaagctgaagtccgtgaaggagctgctgggcatcaccatcatggagcggtcctccttcgagaagaaccccatcgacttcctggaggccaagggctacaaggaggtgaagaaggacctgatcatcaagctgcccaagtactccctgttcgagctggagaacggccggaagcggatgctggcctccgccggcgagctgcagaagggcaacgagctggccctgccctccaagtacgtgaacttcctgtacctggcctcccactacgagaagctgaagggctcccccgaggacaacgagcagaagcagctgttcgtggagcagcacaagcactacctggacgagatcatcgagcagatctccgagttctccaagcgggtgatcctggccgacgccaacctggacaaggtgctgtccgcctacaacaagcaccgggacaagcccatccgggagcaggccgagaacatcatccacctgttcaccctgaccaacctgggcgcccccgccgccttcaagtacttcgacaccaccatcgaccggaagcggtacacctccaccaaggaggtgctggacgccaccctgatccaccagtccatcaccggcctgtacgagacccggatcgacctgtcccagctgggcggcgacggcgcccccgagtccgccaccgagtccggcggcacctccaccgagtccgagggctccgccggcacctccaccgagtccgagggctccgccggctccgccggctccacctccggctcctcctccggcatgaagatcgccgtggtggacaaggccctgaacaacacccggtacgacaagcacttccagctgtacggcgaggaggtggacgtgttccacatgtgcaacgagaagctgtccggccggctgctgaagaagcacatcaccatcggcacccccgagaaccccttcgaccccaacgactacgacttcgtgatcctggtgggcgccgagcccttcctgtacttcgccggcaagaagggcatcggcgactacaccggcaagcgggtggagtacaacggctacgccaactggatcgcctccatctcccccgcccagctgcacttcaagcccgagatgaagcccgtgttcgacgccaccgtggagaacatccacgacatcatcaacggccgggagaagatcgccaaggccggcgactaccggcccatcaccgaccccgacgaggccgaggagtacatcaagatggtgtacaacatggtgatcggccccgtggccttcgcctccgccacctccgccctgtactgccgggacggctacctgctgggcgtgtccatctcccaccaggagtaccagggcgtgtacatcgactccgactgcctgaccgaggtggccgtgtactacctgcagaagatcctggactccgagaaccacaccatcgtgttccacaacctgaagttcgacatgcacttctacaagtaccacctgggcctgaccttcgacaaggcccacaaggagcggcggctgcacgacaccatgctgcagcactacgtgctggacgagcggcggggcacccacggcctgaagtccctggccatgaagtacaccgacatgggcgactacgacttcgagctggacaagttcaaggacgactactgcaaggcccacaagatcaagaaggaggacttcacctacgacctgatccccttcgacatcatgtggccctacgccgccaaggacaccgacgccaccatccggctgcacaacttcttcctgcccaagatcgagaagaacgagaagctgtgctccctgtactacgacgtgctgatgcccggctgcgtgttcctgcagcgggtggaggaccggggcgtgcccatctccatcgaccggctgaaggaggcccagtaccagctgacccacaacctgaacaaggcccgggagaagctgtacacctaccccgaggtgaagcagctggagcaggaccagaacgaggccttcaaccccaactccgtgaagcagctgcgggtgctgctgttcgactacgtgggcctgacccccaccggcaagctgaccgacaccggcgccgactccaccgacgccgaggccctgaacgagctggccacccagcaccccatcgccaagaccctgctggagatccggaagctgaccaagctgatctccacctacgtggagaagatcctgctgtccatcgacgccgacggctgcatccggaccggcttccacgagcacatgaccacctccggccggctgtcctcctccggcaagctgaacctgcagcagctgccccgggacgagtccatcatcaagggctgcgtggtggccccccccggctaccgggtgatcgcctgggacctgaccaccgccgaggtgtactacgccgccgtgctgtccggcgaccggaacatgcagcaggtgttcatcaacatgcggaacgagcccgacaagtaccccgacttccactccaacatcgcccacatggtgttcaagctgcagtgcgagccccgggacgtgaagaagctgttccccgccctgcggcaggccgccaaggccatcaccttcggcatcctgtacggctccggccccgccaaggtggcccactccgtgaacgaggccctgctggagcaggccgccaagaccggcgagcccttcgtggagtgcaccgtggccgacgccaaggagtacatcgagacctacttcggccagttcccccagctgaagcggtggatcgacaagtgccacgaccagatcaagaaccacggcttcatctactcccacttcggccggaagcggcggctgcacaacatccactccgaggaccggggcgtgcagggcgaggagatccggtccggcttcaacgccatcatccagtccgcctcctccgactccctgctgctgggcgccgtggacgccgacaacgagatcatctccctgggcctggagcaggagatgaagatcgtgatgctggtgcacgactccgtggtggccatcgtgcgggaggacctgatcgaccagtacaacgagatcctgatccggaacatccagaaggaccggggcatctccatccccggctgccccatcggcatcgactccgactccgaggccggcggctcccgggactactcctgcggcaagatgaagaagcagcacccctccatcgcctgcatcgacgacgacgagtacacccggtacgtgaagggcgtgctgctggacgccgagttcgagtacaagaagctggccgccatggacaaggagcaccccgaccactccaagtacaaggacgacaagttcatcgccgtgtgcaaggacctggacaacgtgaagcggatcctgggcgccggcggcggctccggcaagcggaccgccgacggctccggcggcggctcccccaagaagaagcggaaggtgtccgagtccgccacccccgagtccgtgtccggctggcggctgttcaagaagatctccaagatcgccgccctgaaggagaagatcgccgccctgaaggagaagaacgccgccctgaagtggaagatcgccgccctgaaggagtagctagcaccagcctcaagaacacccgaatggagtctctaagctacataataccaacttacactttacaaaatgttgtcccccaaaatgtagccattcgtatctgctcctaataaaaagaaagtttcttcacattctctcgagaaaaaaaaaaaatggaaaaaaaaaaaacggaaaaaaaaaaaaggtaaaaaaaaaaaatataaaaaaaaaaaacataaaaaaaaaaaacgaaaaaaaaaaaacgtaaaaaaaaaaaactcaaaaaaaaaaaagataaaaaaaaaaaacctaaaaaaaaaaaatgtaaaaaaaaaaaagggaaaaaaaaaaaacgcaaaaaaaaaaaacacaaaaaaaaaaaatgcaaaaaaaaaaaatcgaaaaaaaaaaaatctaaaaaaaaaaaacgaaaaaaaaaaaacccaaaaaaaaaaaagacaaaaaaaaaaaatagaaaaaaaaaaagttaaaaaaaaaaaactgaaaaaaaaaaaatttaaaaaaaaaaaatctag

SEQ ID NO: 1257 - protein, 2335 aa, synthetic construct
  REGION 1..2335: note = Synthetic
MDKKYSIGLDIGTNSVGWAVITDEYKVPSKKFKVLGNTDRHSIKKNLIGALLFDSGETAEATRLKRTARRRYTRRKNRICYLQEIFSNEMAKVDDSFFHRLEESFLVEEDKKHERHPIFGNIVDEVAYHEKYPTIYHLRKKLVDSTDKADLRLIYLALAHMIKFRGHFLIEGDLNPDNSDVDKLFIQLVQTYNQLFEENPINASGVDAKAILSARLSKSRRLENLIAQLPGEKKNGLFGNLIALSLGLTPNFKSNFDLAEDAKLQLSKDTYDDDLDNLLAQIGDQYADLFLAAKNLSDAILLSDILRVNTEITKAPLSASMIKRYDEHHQDLTLLKALVRQQLPEKYKEIFFDQSKNGYAGYIDGGASQEEFYKFIKPILEKMDGTEELLVKLNREDLLRKQRTFDNGSIPHQIHLGELHAILRRQEDFYPFLKDNREKIEKILTFRIPYYVGPLARGNSRFAWMTRKSEETITPWNFEEVVDKGASAQSFIERMTNFDKNLPNEKVLPKHSLLYEYFTVYNELTKVKYVTEGMRKPAFLSGEQKKAIVDLLFKTNRKVTVKQLKEDYFKKIECFDSVEISGVEDRFNASLGTYHDLLKIIKDKDFLDNEENEDILEDIVLTLTLFEDREMIEERLKTYAHLFDDKVMKQLKRRRYTGWGRLSRKLINGIRDKQSGKTILDFLKSDGFANRNFMQLIHDDSLTFKEDIQKAQVSGQGDSLHEHIANLAGSPAIKKGILQTVKVVDELVKVMGRHKPENIVIEMARENQTTQKGQKNSRERMKRIEEGIKELGSQILKEHPVENTQLQNEKLYLYYLQNGRDMYVDQELDINRLSDYDVDAIVPQSFLKDDSIDNKVLTRSDKNRGKSDNVPSEEVVKKMKNYWRQLLNAKLITQRKFDNLTKAERGGLSELDKAGFIKRQLVETRQITKHVAQILDSRMNTKYDENDKLIREVKVITLKSKLVSDFRKDFQFYKVREINNYHHAHDAYLNAVVGTALIKKYPKLESEFVYGDYKVYDVRKMIAKSEQEIGKATAKYFFYSNIMNFFKTEITLANGEIRKRPLIETNGETGEIVWDKGRDFATVRKVLSMPQVNIVKKTEVQTGGFSKESILPKRNSDKLIARKKDWDPKKYGGFDSPTVAYSVLVVAKVEKGKSKKLKSVKELLGITIMERSSFEKNPIDFLEAKGYKEVKKDLIIKLPKYSLFELENGRKRMLASAGELQKGNELALPSKYVNFLYLASHYEKLKGSPEDNEQKQLFVEQHKHYLDEIIEQISEFSKRVILADANLDKVLSAYNKHRDKPIREQAENIIHLFTLTNLGAPAAFKYFDTTIDRKRYTSTKEVLDATLIHQSITGLYETRIDLSQLGGDGAPESATESGGTSTESEGSAGTSTESEGSAGSAGSTSGSSSGMKIAVVDKALNNTRYDKHFQLYGEEVDVFHMCNEKLSGRLLKKHITIGTPENPFDPNDYDFVILVGAEPFLYFAGKKGIGDYTGKRVEYNGYANWIASISPAQLHFKPEMKPVFDATVENIHDIINGREKIAKAGDYRPITDPDEAEEYIKMVYNMVIGPVAFASATSALYCRDGYLLGVSISHQEYQGVYIDSDCLTEVAVYYLQKILDSENHTIVFHNLKFDMHFYKYHLGLTFDKAHKERRLHDTMLQHYVLDERRGTHGLKSLAMKYTDMGDYDFELDKFKDDYCKAHKIKKEDFTYDLIPFDIMWPYAAKDTDATIRLHNFFLPKIEKNEKLCSLYYDVLMPGCVFLQRVEDRGVPISIDRLKEAQYQLTHNLNKAREKLYTYPEVKQLEQDQNEAFNPNSVKQLRVLLFDYVGLTPTGKLTDTGADSTDAEALNELATQHPIAKTLLEIRKLTKLISTYVEKILLSIDADGCIRTGFHEHMTTSGRLSSSGKLNLQQLPRDESIIKGCVVAPPGYRVIAWDLTTAEVYYAAVLSGDRNMQQVFINMRNEPDKYPDFHSNIAHMVFKLQCEPRDVKKLFPALRQAAKAITFGILYGSGPAKVAHSVNEALLEQAAKTGEPFVECTVADAKEYIETYFGQFPQLKRWIDKCHDQIKNHGFIYSHFGRKRRLHNIHSEDRGVQGEEIRSGFNAIIQSASSDSLLLGAVDADNEIISLGLEQEMKIVMLVHDSVVAIVREDLIDQYNEILIRNIQKDRGISIPGCPIGIDSDSEAGGSRDYSCGKMKKQHPSIACIDDDEYTRYVKGVLLDAEFEYKKLAAMDKEHPDHSKYKDDKFIAVCKDLDNVKRILGAGGGSGKRTADGSGGGSPKKKRKVSESATPESVSGWRLFKKISKIAALKEKIAALKEKNAALKWKIAALKE

SEQ ID NO: 1258 - DNA, 6951 bp, synthetic construct
  misc_feature 1..6951: note = Synthetic
  source 1..6951: mol_type = other DNA
atggacaagaagtactccatcggcctggacatcggcaccaactccgtgggctgggccgtgatcaccgacgagtacaaggtgccctccaagaagttcaaggtgctgggcaacaccgaccggcactccatcaagaagaacctgatcggcgccctgctgttcgactccggcgagaccgccgaggccacccggctgaagcggaccgcccggcggcggtacacccggcggaagaaccggatctgctacctgcaggagatcttctccaacgagatggccaaggtggacgactccttcttccaccggctggaggagtccttcctggtggaggaggacaagaagcacgagcggcaccccatcttcggcaacatcgtggacgaggtggcctaccacgagaagtaccccaccatctaccacctgcggaagaagctggtggactccaccgacaaggccgacctgcggctgatctacctggccctggcccacatgatcaagttccggggccacttcctgatcgagggcgacctgaaccccgacaactccgacgtggacaagctgttcatccagctggtgcagacctacaaccagctgttcgaggagaaccccatcaacgcctccggcgtggacgccaaggccatcctgtccgcccggctgtccaagtcccggcggctggagaacctgatcgcccagctgcccggcgagaagaagaacggcctgttcggcaacctgatcgccctgtccctgggcctgacccccaacttcaagtccaacttcgacctggccgaggacgccaagctgcagctgtccaaggacacctacgacgacgacctggacaacctgctggcccagatcggcgaccagtacgccgacctgttcctggccgccaagaacctgtccgacgccatcctgctgtccgacatcctgcgggtgaacaccgagatcaccaaggcccccctgtccgcctccatgatcaagcggtacgacgagcaccaccaggacctgaccctgctgaaggccctggtgcggcagcagctgcccgagaagtacaaggagatcttcttcgaccagtccaagaacggctacgccggctacatcgacggcggcgcctcccaggaggagttctacaagttcatcaagcccatcctggagaagatggacggcaccgaggagctgctggtgaagctgaaccgggaggacctgctgcggaagcagcggaccttcgacaacggctccatcccccaccagatccacctgggcgagctgcacgccatcctgcggcggcaggaggacttctaccccttcctgaaggacaaccgggagaagatcgagaagatcctgaccttccggatcccctactacgtgggccccctggcccggggcaactcccggttcgcctggatgacccggaagtccgaggagaccatcaccccctggaacttcgaggaggtggtggacaagggcgcctccgcccagtccttcatcgagcggatgaccaacttcgacaagaacctgcccaacgagaaggtgctgcccaagcactccctgctgtacgagtacttcaccgtgtacaacgagctgaccaaggtgaagtacgtgaccgagggcatgcggaagcccgccttcctgtccggcgagcagaagaaggccatcgtggacctgctgttcaagaccaaccggaaggtgaccgtgaagcagctgaaggaggactacttcaagaagatcgagtgcttcgactccgtggagatctccggcgtggaggaccggttcaacgcctccctgggcacctaccacgacctgctgaagatcatcaaggacaaggacttcctggacaacgaggagaacgaggacatcctggaggacatcgtgctgaccctgaccctgttcgaggaccgggagatgatcgaggagcggctgaagacctacgcccacctgttcgacgacaaggtgatgaagcagctgaagcggcggcggtacaccggctggggccggctgtcccggaagctgatcaacggcatccgggacaagcagtccggcaagaccatcctggacttcctgaagtccgacggcttcgccaaccggaacttcatgcagctgatccacgacgactccctgaccttcaaggaggacatccagaaggcccaggtgtccggccagggcgactccctgcacgagcacatcgccaacctggccggctcccccgccatcaagaagggcatcctgcagaccgtgaaggtggtggacgagctggtgaaggtgatgggccggcacaagcccgagaacatcgtgatcgagatggcccgggagaaccagaccacccagaagggccagaagaactcccgggagcggatgaagcggatcgaggagggcatcaaggagctgggctcccagatcctgaaggagcaccccgtggagaacacccagctgcagaacgagaagctgtacctgtactacctgcagaacggccgggacatgtacgtggaccaggagctggacatcaaccggctgtccgactacgacgtggacgccatcgtgccccagtccttcctgaaggacgactccatcgacaacaaggtgctgacccggtccgacaagaaccggggcaagtccgacaacgtgccctccgaggaggtggtgaagaagatgaagaactactggcggcagctgctgaacgccaagctgatcacccagcggaagttcgacaacctgaccaaggccgagcggggcggcctgtccgagctggacaaggccggcttcatcaagcggcagctggtggagacccggcagatcaccaagcacgtggcccagatcctggactcccggatgaacaccaagtacgacgagaacgacaagctgatccgggaggtgaaggtgatcaccctgaagtccaagctggtgtccgacttccggaaggacttccagttctacaaggtgcgggagatcaacaactaccaccacgcccacgacgcctacctgaacgccgtggtgggcaccgccctgatcaagaagtaccccaagctggagtccgagttcgtgtacggcgactacaaggtgtacgacgtgcggaagatgatcgccaagtccgagcaggagatcggcaaggccaccgccaagtacttcttctactccaacatcatgaacttcttcaagaccgagatcaccctggccaacggcgagatccggaagcggcccctgatcgagaccaacggcgagaccggcgagatcgtgtgggacaagggccgggacttcgccaccgtgcggaaggtgctgtccatgccccaggtgaacatcgtgaagaagaccgaggtgcagaccggcggcttctccaaggagtccatcctgcccaagcggaactccgacaagctgatcgcccggaagaaggactgggaccccaagaagtacggcggcttcgactcccccaccgtggcctactccgtgctggtggtggccaaggtggagaagggcaagtccaagaagctgaagtccgtgaaggagctgctgggcatcaccatcatggagcggtcctccttcgagaagaaccccatcgacttcctggaggccaagggctacaaggaggtgaagaaggacctgatcatcaagctgcccaagtactccctgttcgagctggagaacggccggaagcggatgctggcctccgccggcgagctgcagaagggcaacgagctggccctgccctccaagtacgtgaacttcctgtacctggcctcccactacgagaagctgaagggctcccccgaggacaacgagcagaagcagctgttcgtggagcagcacaagcactacctggacgagatcatcgagcagatctccgagttctccaagcgggtgatcctggccgacgccaacctggacaaggtgctgtccgcctacaacaagcaccgggacaagcccatccgggagcaggccgagaacatcatccacctgttcaccctgaccaacctgggcgcccccgccgccttcaagtacttcgacaccaccatcgaccggaagcggtacacctccaccaaggaggtgctggacgccaccctgatccaccagtccatcaccggcctgtacgagacccggatcgacctgtcccagctgggcggcgacggcgcccccgagtccgccaccgagtccggcggcacctccaccgagtccgagggctccgccggcacctccaccgagtccgagggctccgccggctccgccggctccacctccggctcctcctccggcatgaagatcgccgtggtggacaaggccctgaacaacacccggtacgacaagcacttccagctgtacggcgaggaggtggacgtgttccacatgtgcaacgagaagctgtccggccggctgctgaagaagcacatcaccatcggcacccccgagaaccccttcgaccccaacgactacgacttcgtgatcctggtgggcgccgagcccttcctgtacttcgccggcaagaagggcatcggcgactacaccggcaagcgggtggagtacaacggctacgccaactggatcgcctccatctcccccgcccagctgcacttcaagcccgagatgaagcccgtgttcgacgccaccgtggagaacatccacgacatcatcaacggccgggagaagatcgccaaggccggcgactaccggcccatcaccgaccccgacgaggccgaggagtacatcaagatggtgtacaacatggtgatcggccccgtggccttcgcctccgccacctccgccctgtactgccgggacggctacctgctgggcgtgtccatctcccaccaggagtaccagggcgtgtacatcgactccgactgcctgaccgaggtggccgtgtactacctgcagaagatcctggactccgagaaccacaccatcgtgttccacaacctgaagttcgacatgcacttctacaagtaccacctgggcctgaccttcgacaaggcccacaaggagcggcggctgcacgacaccatgctgcagcactacgtgctggacgagcggcggggcacccacggcctgaagtccctggccatgaagtacaccgacatgggcgactacgacttcgagctggacaagttcaaggacgactactgcaaggcccacaagatcaagaaggaggacttcacctacgacctgatccccttcgacatcatgtggccctacgccgccaaggacaccgacgccaccatccggctgcacaacttcttcctgcccaagatcgagaagaacgagaagctgtgctccctgtactacgacgtgctgatgcccggctgcgtgttcctgcagcgggtggaggaccggggcgtgcccatctccatcgaccggctgaaggaggcccagtaccagctgacccacaacctgaacaaggcccgggagaagctgtacacctaccccgaggtgaagcagctggagcaggaccagaacgaggccttcaaccccaactccgtgaagcagctgcgggtgctgctgttcgactacgtgggcctgacccccaccggcaagctgaccgacaccggcgccgactccaccgacgccgaggccctgaacgagctggccacccagcaccccatcgccaagaccctgctggagatccggaagctgaccaagctgatctccacctacgtggagaagatcctgctgtccatcgacgccgacggctgcatccggaccggcttccacgagcacatgaccacctccggccggctgtcctcctccggcaagctgaacctgcagcagctgccccgggacgagtccatcatcaagggctgcgtggtggccccccccggctaccgggtgatcgcctgggacctgaccaccgccgaggtgtactacgccgccgtgctgtccggcgaccggaacatgcagcaggtgttcatcaacatgcggaacgagcccgacaagtaccccgacttccactccaacatcgcccacatggtgttcaagctgcagtgcgagccccgggacgtgaagaagctgttccccgccctgcggcaggccgccaaggccatcaccttcggcatcctgtacggctccggccccgccaaggtggcccactccgtgaacgaggccctgctggagcaggccgccaagaccggcgagcccttcgtggagtgcaccgtggccgacgccaaggagtacatcgagacctacttcggccagttcccccagctgaagcggtggatcgacaagtgccacgaccagatcaagaaccacggcttcatctactcccacttcggccggaagcggcggctgcacaacatccactccgaggaccggggcgtgcagggcgaggagatccggtccggcttcaacgccatcatccagtccgcctcctccgactccctgctgctgggcgccgtggacgccgacaacgagatcatctccctgggcctggagcaggagatgaagatcgtgatgctggtgcacgactccgtggtggccatcgtgcgggaggacctgatcgaccagtacaacgagatcctgatccggaacatccagaaggaccggggcatctccatccccggctgccccatcggcatcgactccgactccgaggccggcggctcccgggactactcctgcggcaagatgaagaagcagcacccctccatcgcctgcatcgacgacgacgagtacacccggtacgtgaagggcgtgctgctggacgccgagttcgagtacaagaagctggccgccatggacaaggagcaccccgaccactccaagtacaaggacgacaagttcatcgccgtgtgcaaggacctggacaacgtgaagcggatcctgggcgccggcggcggctccggcaagcggaccgccgacggctccggcggcggctcccccaagaagaagcggaaggtgaagatcgccgccctgaaggagaagatcgccgccctgaaggagaagaacgccgccctgaagtggaagatcgccgccctgaaggagtag

SEQ ID NO: 1259 - protein, 2316 aa, synthetic construct
  REGION 1..2316: note = Synthetic
MDKKYSIGLDIGTNSVGWAVITDEYKVPSKKFKVLGNTDRHSIKKNLIGALLFDSGETAEATRLKRTARRRYTRRKNRICYLQEIFSNEMAKVDDSFFHRLEESFLVEEDKKHERHPIFGNIVDEVAYHEKYPTIYHLRKKLVDSTDKADLRLIYLALAHMIKFRGHFLIEGDLNPDNSDVDKLFIQLVQTYNQLFEENPINASGVDAKAILSARLSKSRRLENLIAQLPGEKKNGLFGNLIALSLGLTPNFKSNFDLAEDAKLQLSKDTYDDDLDNLLAQIGDQYADLFLAAKNLSDAILLSDILRVNTEITKAPLSASMIKRYDEHHQDLTLLKALVRQQLPEKYKEIFFDQSKNGYAGYIDGGASQEEFYKFIKPILEKMDGTEELLVKLNREDLLRKQRTFDNGSIPHQIHLGELHAILRRQEDFYPFLKDNREKIEKILTFRIPYYVGPLARGNSRFAWMTRKSEETITPWNFEEVVDKGASAQSFIERMTNFDKNLPNEKVLPKHSLLYEYFTVYNELTKVKYVTEGMRKPAFLSGEQKKAIVDLLFKTNRKVTVKQLKEDYFKKIECFDSVEISGVEDRFNASLGTYHDLLKIIKDKDFLDNEENEDILEDIVLTLTLFEDREMIEERLKTYAHLFDDKVMKQLKRRRYTGWGRLSRKLINGIRDKQSGKTILDFLKSDGFANRNFMQLIHDDSLTFKEDIQKAQVSGQGDSLHEHIANLAGSPAIKKGILQTVKVVDELVKVMGRHKPENIVIEMARENQTTQKGQKNSRERMKRIEEGIKELGSQILKEHPVENTQLQNEKLYLYYLQNGRDMYVDQELDINRLSDYDVDAIVPQSFLKDDSIDNKVLTRSDKNRGKSDNVPSEEVVKKMKNYWRQLLNAKLITQRKFDNLTKAERGGLSELDKAGFIKRQLVETRQITKHVAQILDSRMNTKYDENDKLIREVKVITLKSKLVSDFRKDFQFYKVREINNYHHAHDAYLNAVVGTALIKKYPKLESEFVYGDYKVYDVRKMIAKSEQEIGKATAKYFFYSNIMNFFKTEITLANGEIRKRPLIETNGETGEIVWDKGRDFATVRKVLSMPQVNIVKKTEVQTGGFSKESILPKRNSDKLIARKKDWDPKKYGGFDSPTVAYSVLVVAKVEKGKSKKLKSVKELLGITIMERSSFEKNPIDFLEAKGYKEVKKDLIIKLPKYSLFELENGRKRMLASAGELQKGNELALPSKYVNFLYLASHYEKLKGSPEDNEQKQLFVEQHKHYLDEIIEQISEFSKRVILADANLDKVLSAYNKHRDKPIREQAENIIHLFTLTNLGAPAAFKYFDTTIDRKRYTSTKEVLDATLIHQSITGLYETRIDLSQLGGDGAPESATESGGTSTESEGSAGTSTESEGSAGSAGSTSGSSSGMKIAVVDKALNNTRYDKHFQLYGEEVDVFHMCNEKLSGRLLKKHITIGTPENPFDPNDYDFVILVGAEPFLYFAGKKGIGDYTGKRVEYNGYANWIASISPAQLHFKPEMKPVFDATVENIHDIINGREKIAKAGDYRPITDPDEAEEYIKMVYNMVIGPVAFASATSALYCRDGYLLGVSISHQEYQGVYIDSDCLTEVAVYYLQKILDSENHTIVFHNLKFDMHFYKYHLGLTFDKAHKERRLHDTMLQHYVLDERRGTHGLKSLAMKYTDMGDYDFELDKFKDDYCKAHKIKKEDFTYDLIPFDIMWPYAAKDTDATIRLHNFFLPKIEKNEKLCSLYYDVLMPGCVFLQRVEDRGVPISIDRLKEAQYQLTHNLNKAREKLYTYPEVKQLEQDQNEAFNPNSVKQLRVLLFDYVGLTPTGKLTDTGADSTDAEALNELATQHPIAKTLLEIRKLTKLISTYVEKILLSIDADGCIRTGFHEHMTTSGRLSSSGKLNLQQLPRDESIIKGCVVAPPGYRVIAWDLTTAEVYYAAVLSGDRNMQQVFINMRNEPDKYPDFHSNIAHMVFKLQCEPRDVKKLFPALRQAAKAITFGILYGSGPAKVAHSVNEALLEQAAKTGEPFVECTVADAKEYIETYFGQFPQLKRWIDKCHDQIKNHGFIYSHFGRKRRLHNIHSEDRGVQGEEIRSGFNAIIQSASSDSLLLGAVDADNEIISLGLEQEMKIVMLVHDSVVAIVREDLIDQYNEILIRNIQKDRGISIPGCPIGIDSDSEAGGSRDYSCGKMKKQHPSIACIDDDEYTRYVKGVLLDAEFEYKKLAAMDKEHPDHSKYKDDKFIAVCKDLDNVKRILGAGGGSGKRTADGSGGGSPKKKRKVKIAALKEKIAALKEKNAALKWKIAALKE

SEQ ID NO: 1260 - DNA, 2589 bp, synthetic construct
  misc_feature 1..2589: note = Synthetic
  source 1..2589: mol_type = other DNA
atggactccatcaaggagaagtgcgactcctacaaggacgacctgctgctgcggatgggcctgaacgacaacaaggccggcatggagggcctggacaaggagaagatcaacaagatcatcatggaggccaccaagggctcccggttctacggcaacgagctgaagaaggagaagcaggtgaaccagcggatcgagaacatgatgcagcagaaggccgagatcacctcccagcagctgcggaaggcccagctgcaggtggaccggttcgccatggagctggagcagtcccggaacctgtccaacaccatcgtgcacatcgacatggacgccttctacgccgccgtggagatgcgggacaaccccgagctgaaggacaagcccatcgccgtgggctccatgtccatgctgtccacctccaactaccacgcccggcggttcggcgtgcgggccgccatgcccggcttcatcgccaagcggctgtgcccccagctgatcatcgtgccccccaacttcgacaagtaccgggccgtgtccaaggaggtgaaggagatcctggccgactacgaccccaacttcatggccatgtccctggacgaggcctacctgaacatcaccaagcacctggaggagcggcagaactggcccgaggacaagcggaagtacttcatcaagatgggcaactccgtggagaacgacaaccccggcaaggaggtgaacaagctgtccgaccacgagcggtccatctcccccctgctgttcgaggcctccccctccgacctgctgccccccggcgaccccttccaggtgaacttcgaggagcagaactccccccagatcctgcagaactccatcgtgttcggcacctccgccgaggaggtggtgaaggagatccggttccggatcgagcagaagaccaccctgaccgcctccgccggcatcgcccccaacaccatgctggccaaggtgtgctccgacaagaacaagcccaacggccagtaccagatcctgcccaaccggcaggccgtgatggacttcatcaaggacctgcccatccggaaggtgtccggcatcggcaaggtgaccgagaagatgctgaaggccctgggcatcatcacctgcaccgagctgtaccagcagcgggccctgctgtccctgctgttctccgagacctcctggcactacttcctgcacatctccctgggcctgggctccacctacctgacccgggacggcgagcggaagtccatgtccgtggagcggaccttctccgagatcaacaaggccgaggagcagtactccctgtgcgaggagctgtgctccgagctggcccgggacctgcagaaggagggcctgaagggccggaccgtgaccatcaagctgaagaacgtgaacttcgaggtgaagacccgggcctccaccgtgtcctccgtggtgtccaccgccgaggagatcttcgccatcgccaaggagctgctgaagaccgagatcgaggccgacttcccccaccccctgcggctgcggctgatgggcgtgcggatctcctccttccccaacgaggaggaccggaagcaccagcagcggtccatcatcggcttcctgcaggccggcaaccaggccctgtccgccaccggctgcatcctggagaagaccgacaaggaccagttcgtgaagcccctggagatgtcccacaagaagtccttcttcgacaagaagcggtccgagcggaagtggtcccaccaggacaccttcaagtgcgagaccgtgaacaagcagtccttccagacctcccagcccttccaggtgctgaagaagaagatgtccgagaacctggagatctccgagaactccgacaactgccagatcttcacctgccccgtgtgcttccgggcccagggctgcatctccctggaggccttcaacaagcacgtggacgcctgcctggacggctcctccatctccgagaactccaaggtgttctcctgctcccacgtgtccgccacccgggtgaacaagaaggagaacgtgcccgcctcctccctgtgcgagaagcaggactacgaggcccaccccaagatcaaggaggtgtcctccgtggactgcgtggccctggtggacaccatcgacaactcctccaaggccgagtccatcgacgccctgtccaacaagcacatcaagggcgagtgctccaacctgcccggcaagtccttcaacatcgagcactgccaccagaactcctcctgcaccgtgtccctggagaacgaggacgtgggcctgctgtcccggcaggagtcctgccagccctacctgtgcgaggtgatcaccggccaggccctggtgtgccccgtgtgcaacgtggagcagaagacctccgacctgaccctgttcaacgtgcacgtggacgtgtgcctgaacaagtccttcatccaggagctgcggaacgacaaggtgaaccccgtgaaccagcccaaggagtcctcccggtccaccggctcctcctccggcgtgcagaaggccgtgaccaagaccaagcggatcgacgacaaggtgctgatcaaggagaacaagaccaagcagtcccagacctacccc

SEQ ID NO: 1261 - protein, 863 aa, synthetic construct
  REGION 1..863: note = Synthetic
MDSIKEKCDSYKDDLLLRMGLNDNKAGMEGLDKEKINKIIMEATKGSRFYGNELKKEKQVNQRIENMMQQKAEITSQQLRKAQLQVDRFAMELEQSRNLSNTIVHIDMDAFYAAVEMRDNPELKDKPIAVGSMSMLSTSNYHARRFGVRAAMPGFIAKRLCPQLIIVPPNFDKYRAVSKEVKEILADYDPNFMAMSLDEAYLNITKHLEERQNWPEDKRKYFIKMGNSVENDNPGKEVNKLSDHERSISPLLFEASPSDLLPPGDPFQVNFEEQNSPQILQNSIVFGTSAEEVVKEIRFRIEQKTTLTASAGIAPNTMLAKVCSDKNKPNGQYQILPNRQAVMDFIKDLPIRKVSGIGKVTEKMLKALGIITCTELYQQRALLSLLFSETSWHYFLHISLGLGSTYLTRDGERKSMSVERTFSEINKAEEQYSLCEELCSELARDLQKEGLKGRTVTIKLKNVNFEVKTRASTVSSVVSTAEEIFAIAKELLKTEIEADFPHPLRLRLMGVRISSFPNEEDRKHQQRSIIGFLQAGNQALSATGCILEKTDKDQFVKPLEMSHKKSFFDKKRSERKWSHQDTFKCETVNKQSFQTSQPFQVLKKKMSENLEISENSDNCQIFTCPVCFRAQGCISLEAFNKHVDACLDGSSISENSKVFSCSHVSATRVNKKENVPASSLCEKQDYEAHPKIKEVSSVDCVALVDTIDNSSKAESIDALSNKHIKGECSNLPGKSFNIEHCHQNSSCTVSLENEDVGLLSRQESCQPYLCEVITGQALVCPVCNVEQKTSDLTLFNVHVDVCLNKSFIQELRNDKVNPVNQPKESSRSTGSSSGVQKAVTKTKRIDDKVLIKENKTKQSQTYP

SEQ ID NO: 1262 - DNA, 2556 bp, synthetic construct
  misc_feature 1..2556: note = Synthetic
  source 1..2556: mol_type = other DNA
atggacaacaccaaggagaaggacaacttcaaggacgacctgctgctgcggatgggcctgaacgacaacaaggccggcatggagggcctggacaaggagaagatcaacaagatcatcatggaggccaccaagggctcccggttctacggcaacgagctgaagaaggagaagcaggtgaaccagcggatcgagaacatgatgcagcagaaggcccagatcacctcccagcagctgcggaaggcccagctgcaggtggacaagttcgccatggagctggagcggaaccggaacctgaacaacaccatcgtgcacgtggacatggacgccttctacgccgccgtggagatgcgggacaaccccgagctgaaggacaagcccatcgccgtgggctccatgtccatgctggccacctccaactaccacgcccggcggttcggcgtgcgggccgccatgcccggcttcatcgccaagcggctgtgcccccagctgatcatcgtgccccccaacttcgacaagtaccgggccgtgtccaaggaggtgaaggagatcctggccgagtacgaccccaacttcatggccatgtccctggacgaggcctacctgaacatcacccagcacctgcaggagcggcaggactggcccgaggacaagcggcggtacttcatcaagatgggcaactacctgaagatcgacaccccccggcaggaggccaacgagctgaccgagtacgagcggtccatctcccccctgctgttcgaggactccccccccgacctgcagccccagggctcccccttccagctgaactccgaggagcagaacaacccccagatcgcccagaactccgtggtgttcggcacctccgccgaggaggtggtgaaggagatccggttccggatcgagcagaagaccaccctgaccgcctccgccggcatcgcccccaacaccatgctggccaaggtgtgctccgacaagaacaagcccaacggccagtaccagatcctgccctcccggtccgccgtgatggacttcatcaaggacctgcccatccggaaggtgtccggcatcggcaaggtgaccgagaagatgctgatggccctgggcatcgtgacctgcaccgagctgtaccagcagcgggccctgctgtccctgctgttctccgagacctcctggcactacttcctgcacatcgccctgggcctgggctccaccgacctggcccgggacggcgagcggaagtccatgtccgtggagcggaccttctccgagatctccaagaccgaggagcagtactccctgtgccaggagctgtgcgccgagctggcccacgacctgcagaaggagggcctgaagggccggaccgtgaccatcaagctgaagaacgtgaacttcgaggtgaagacccgggcctccaccgtgcccgccgccatctccaccgccgaggagatcttcgccatcgccaaggagctgctgcggaccgaggtgaacgtgggctccccccaccccctgcggctgcggctgatgggcgtgcggatgtccaccttctcctccgaggacgaccggaagcaccagcagcggtccatcatcggcttcctgcaggccggcaaccaggccctgtcctccaccggcgactccctggacaagaccgacaagaccgagctggccaagcccctggagatgtcccacaagaagtccttcttcgacaagaagcggtccgagcggatctccaactgccaggacacctcccggtgcaagaccgccggccagcaggccctgcagatcctggagccctcccaggccctgaagaagctgtccgagtccttcgagacctccgagaactccaacgactgccagaccttcatctgccccgtgtgcttccgggagcaggagggcgtgtccctggaggccttcaacgagcacgtggacgagtgcctggacggcccctccacctccgagaactccaagatctcctgctactcccacgcctcctccgccgacatcggccagaaggaggacgtgcacccctccatccccctgtgcgagaagcggggccacgagaacggcgagatcaccctggtggacggcgtggacctgaccggcaccgaggaccggtccctgaaggccgcccggatggacaccctggagaacaaccggtccaaggaggagtgccccgacatccccgacaagtcctgccccatctccctggagaacgagaccatctccaccctgtcccggcaggactccgtgcagccctgcaccgacgaggtggtgaccggccgggccctggtgtgccccgtgtgcaacctggagcaggagacctccgacctgaccctgttcaacatccacgtggacatctgcctgaacaagggcatcatccaggagctgcggaactccgagggcaactccgtgaagcagcccaaggagtcctcccggtccaccgaccggctgcagaaggcctccggccggaccaagcggcccggcaccaagaccaagtcctccaccctgaagaagaccaagccccgggacccccggcacaccctggacggcttcttcaag

SEQ ID NO: 1263 - protein, 852 aa, synthetic construct
  REGION 1..852: note = Synthetic
MDNTKEKDNFKDDLLLRMGLNDNKAGMEGLDKEKINKIIMEATKGSRFYGNELKKEKQVNQRIENMMQQKAQITSQQLRKAQLQVDKFAMELERNRNLNNTIVHVDMDAFYAAVEMRDNPELKDKPIAVGSMSMLATSNYHARRFGVRAAMPGFIAKRLCPQLIIVPPNFDKYRAVSKEVKEILAEYDPNFMAMSLDEAYLNITQHLQERQDWPEDKRRYFIKMGNYLKIDTPRQEANELTEYERSISPLLFEDSPPDLQPQGSPFQLNSEEQNNPQIAQNSVVFGTSAEEVVKEIRFRIEQKTTLTASAGIAPNTMLAKVCSDKNKPNGQYQILPSRSAVMDFIKDLPIRKVSGIGKVTEKMLMALGIVTCTELYQQRALLSLLFSETSWHYFLHIALGLGSTDLARDGERKSMSVERTFSEISKTEEQYSLCQELCAELAHDLQKEGLKGRTVTIKLKNVNFEVKTRASTVPAAISTAEEIFAIAKELLRTEVNVGSPHPLRLRLMGVRMSTFSSEDDRKHQQRSIIGFLQAGNQALSSTGDSLDKTDKTELAKPLEMSHKKSFFDKKRSERISNCQDTSRCKTAGQQALQILEPSQALKKLSESFETSENSNDCQTFICPVCFREQEGVSLEAFNEHVDECLDGPSTSENSKISCYSHASSADIGQKEDVHPSIPLCEKRGHENGEITLVDGVDLTGTEDRSLKAARMDTLENNRSKEECPDIPDKSCPISLENETISTLSRQDSVQPCTDEVVTGRALVCPVCNLEQETSDLTLFNIHVDICLNKGIIQELRNSEGNSVKQPKESSRSTDRLQKASGRTKRPGTKTKSSTLKKTKPRDPRHTLDGFFK

SEQ ID NO: 1264 - DNA, 2610 bp, synthetic construct
  misc_feature 1..2610: note = Synthetic
  source 1..2610: mol_type = other DNA
atggactccaccaaggagaagtgcgactcctacaaggacgacctgctgctgcggatgggcctgaacgacaacaaggccggcatggagggcctggacaaggagaagatcaacaagatcatcatggaggccaccaagggctcccggttctacggcaacgagctgaagaaggagaagcaggtgaaccagcggatcgagaacatgatgcagcagaaggcccagatcacctcccagcagctgcggaaggcccagctgcaggtggaccggttcgccatggagctggagcagtcccggaacctgtccaacaccatcgtgcacatcgacatggacgccttctacgccgccgtggagatgcgggacaaccccgagctgaaggacaagcccatcgccgtgggctccatgtccatgctgtccacctccaactaccacgcccggcggttcggcgtgcgggccgccatgcccggcttcatcgccaagcggctgtgcccccagctgatcatcgtgccccccaacttcgacaagtaccgggccgtgtccaaggaggtgaaggagatcctggccgactacgaccccaacttcatggccatgtccctggacgaggcctacctgaacatcaccaagcacctggaggagcggcagaactggcccgaggacaagcggcggtacttcatcaagatgggctcctccgtggagaacgacaaccccggcaaggaggtgaacaagctgtccgagcacgagcggtccatctcccccctgctgttcgaggagtccccctccgacgtgcagccccccggcgaccccttccaggtgaacttcgaggagcagaacaacccccagatcctgcagaactccgtggtgttcggcacctccgcccaggaggtggtgaaggagatccggttccggatcgagcagaagaccaccctgaccgcctccgccggcatcgcccccaacaccatgctggccaaggtgtgctccgacaagaacaagcccaacggccagtaccagatcctgcccaaccggcaggccgtgatggacttcatcaaggacctgcccatccggaaggtgtccggcatcggcaaggtgaccgagaagatgctgaaggccctgggcatcatcacctgcaccgagctgtaccagcagcgggccctgctgtccctgctgttctccgagacctcctggcactacttcctgcacatctccctgggcctgggctccacccacctgacccgggaccgggtgcggaagtccatgtccgtggagcggaccttctccgagatcaacaaggccgaggagcagtactccctgtgccaggagctgtgctccgagctggcccaggacctgcagaaggagcggctgaagggccggaccgtgaccatcaagctgaagaacgtgaacttcgaggtgaagacccgggcctccaccgtgtcctccgtggtgtccaccgccgaggagatcttcgccatcgccaaggagctgctgaagaccgagatcgacgccgacttcccccaccccctgcggctgcggctgatgggcgtgcggatctcctccttccccaacgaggaggaccggaagcaccagcagcggtccatcatcggcttcctgcaggccggcaaccaggccctgtccgccaccgagtgcaccctggagaagaccgacaaggacaagttcgtgaagcccctggagatgtcccacaagaagtccttcttcgacaagaagcggtccgagcggaagtggtcccaccaggacaccttcaagtgcgaggccgtgaacaagcagtccttccagacctcccagcccttccaggtgctgaagaagaagatgaacgagaacctggagatctccgagaactccgacgactgccagatcctgacctgccccgtgtgcttccgggcccagggctgcatctccctggaggccctgaacaagcacgtggacgagtgcctggacggcccctccatctccgagaacttcaagatgttctcctgctcccacgtgtccgccaccaaggtgaacaagaaggagaacgtgcccgcctcctccctgtgcgagaagcaggactacgaggcccaccccaagatcaaggagatctcctccgtggactgcatcgccctggtggacaccatcgacaactcctccaaggccgagtccatcgacgccctgtccaacaagcactccaaggaggagtgctcctccctgccctccaagtccttcaacatcgagcactgccaccagaactcctcctccaccgtgtccctggagaacgaggacgtgggctccttccggcaggagtaccggcagccctacctgtgcgaggtgaagaccggccaggccctggtgtgccccgtgtgcaacgtggagcagaagacctccgacctgaccctgttcaacgtgcacgtggacgtgtgcctgaacaagtccttcatccaggagctgcggaaggacaagttcaaccccgtgaaccagcccaaggagtcctcccggtccaccggctcctcctccggcgtgcagaaggccgtgacccggaccaagcggcccggcctgatgaccaagtactccacctccaagaagatcaagcccaacaaccccaagcacaccctggacatcttcttcaag

SEQ ID NO: 1265 - protein, 870 aa, synthetic construct
  REGION 1..870: note = Synthetic
MDSTKEKCDSYKDDLLLRMGLNDNKAGMEGLDKEKINKIIMEATKGSRFYGNELKKEKQVNQRIENMMQQKAQITSQQLRKAQLQVDRFAMELEQSRNLSNTIVHIDMDAFYAAVEMRDNPELKDKPIAVGSMSMLSTSNYHARRFGVRAAMPGFIAKRLCPQLIIVPPNFDKYRAVSKEVKEILADYDPNFMAMSLDEAYLNITKHLEERQNWPEDKRRYFIKMGSSVENDNPGKEVNKLSEHERSISPLLFEESPSDVQPPGDPFQVNFEEQNNPQILQNSVVFGTSAQEVVKEIRFRIEQKTTLTASAGIAPNTMLAKVCSDKNKPNGQYQILPNRQAVMDFIKDLPIRKVSGIGKVTEKMLKALGIITCTELYQQRALLSLLFSETSWHYFLHISLGLGSTHLTRDRVRKSMSVERTFSEINKAEEQYSLCQELCSELAQDLQKERLKGRTVTIKLKNVNFEVKTRASTVSSVVSTAEEIFAIAKELLKTEIDADFPHPLRLRLMGVRISSFPNEEDRKHQQRSIIGFLQAGNQALSATECTLEKTDKDKFVKPLEMSHKKSFFDKKRSERKWSHQDTFKCEAVNKQSFQTSQPFQVLKKKMNENLEISENSDDCQILTCPVCFRAQGCISLEALNKHVDECLDGPSISENFKMFSCSHVSATKVNKKENVPASSLCEKQDYEAHPKIKEISSVDCIALVDTIDNSSKAESIDALSNKHSKEECSSLPSKSFNIEHCHQNSSSTVSLENEDVGSFRQEYRQPYLCEVKTGQALVCPVCNVEQKTSDLTLFNVHVDVCLNKSFIQELRKDKFNPVNQPKESSRSTGSSSGVQKAVTRTKRPGLMTKYSTSKKIKPNNPKHTLDIFFK

SEQ ID NO: 1266 - RNA, 6396 nt, synthetic construct
  misc_feature 1..6396: note = Synthetic
  source 1..6396: mol_type = other RNA
gggaagctcagaataaacgctcaactttggccggatctgccaccatgaagcggaccgccgacggctccgagttcgagtcccccaagaagaagcggaaggtggacaagaagtactccatcggcctggacatcggcaccaactccgtgggctgggccgtgatcaccgacgagtacaaggtgccctccaagaagttcaaggtgctgggcaacaccgaccggcactccatcaagaagaacctgatcggcgccctgctgttcgactccggcgagaccgccgaggccacccggctgaagcggaccgcccggcggcggtacacccggcggaagaaccggatctgctacctgcaggagatcttctccaacgagatggccaaggtggacgactccttcttccaccggctggaggagtccttcctggtggaggaggacaagaagcacgagcggcaccccatcttcggcaacatcgtggacgaggtggcctaccacgagaagtaccccaccatctaccacctgcggaagaagctggtggactccaccgacaaggccgacctgcggctgatctacctggccctggcccacatgatcaagttccggggccacttcctgatcgagggcgacctgaaccccgacaactccgacgtggacaagctgttcatccagctggtgcagacctacaaccagctgttcgaggagaaccccatcaacgcctccggcgtggacgccaaggccatcctgtccgcccggctgtccaagtcccggcggctggagaacctgatcgcccagctgcccggcgagaagaagaacggcctgttcggcaacctgatcgccctgtccctgggcctgacccccaacttcaagtccaacttcgacctggccgaggacgccaagctgcagctgtccaaggacacctacgacgacgacctggacaacctgctggcccagatcggcgaccagtacgccgacctgttcctggccgccaagaacctgtccgacgccatcctgctgtccgacatcctgcgggtgaacaccgagatcaccaaggcccccctgtccgcctccatgatcaagcggtacgacgagcaccaccaggacctgaccctgctgaaggccctggtgcggcagcagctgcccgagaagtacaaggagatcttcttcgaccagtccaagaacggctacgccggctacatcgacggcggcgcctcccaggaggagttctacaagttcatcaagcccatcctggagaagatggacggcaccgaggagctgctggtgaagctgaaccgggaggacctgctgcggaagcagcggaccttcgacaacggctccatcccccaccagatccacctgggcgagctgcacgccatcctgcggcggcaggaggacttctaccccttcctgaaggacaaccgggagaagatcgagaagatcctgaccttccggatcccctactacgtgggccccctggcccggggcaactcccggttcgcctggatgacccggaagtccgaggagaccatcaccccctggaacttcgaggaggtggtggacaagggcgcctccgcccagtccttcatcgagcggatgaccaacttcgacaagaacctgcccaacgagaaggtgctgcccaagcactccctgctgtacgagtacttcaccgtgtacaacgagctgaccaaggtgaagtacgtgaccgagggcatgcggaagcccgccttcctgtccggcgagcagaagaaggccatcgtggacctgctgttcaagaccaaccggaaggtgaccgtgaagcagctgaaggaggactacttcaagaagatcgagtgcttcgactccgtggagatctccggcgtggaggaccggttcaacgcctccctgggcacctaccacgacctgctgaagatcatcaaggacaaggacttcctggacaacgaggagaacgaggacatcctggaggacatcgtgctgaccctgaccctgttcgaggaccgggagatgatcgaggagcggctgaagacctacgcccacctgttcgacgacaaggtgatgaagcagctgaagcggcggcggtacaccggctggggccggctgtcccggaagctgatcaacggcatccgggacaagcagtccggcaagaccatcctggacttcctgaagtccgacggcttcgccaaccggaacttcatgcagctgatccacgacgactccctgaccttcaaggaggacatccagaaggcccaggtgtccggccagggcgactccctgcacgagcacatcgccaacctggccggctcccccgccatcaagaagggcatcctgcagaccgtgaaggtggtggacgagctggtgaaggtgatgggccggcacaagcccgagaacatcgtgatcgagatggcccgggagaaccagaccacccagaagggccagaagaactcccgggagcggatgaagcggatcgaggagggcatcaaggagctgggctcccagatcctgaaggagcaccccgtggagaacacccagctgcagaacgagaagctgtacctgtactacctgcagaacggccgggacatgtacgtggaccaggagctggacatcaaccggctgtccgactacgacgtggacgccatcgtgccccagtccttcctgaaggacgactccatcgacaacaaggtgctgacccggtccgacaagaaccggggcaagtccgacaacgtgccctccgaggaggtggtgaagaagatgaagaactactggcggcagctgctgaacgccaagctgatcacccagcggaagttcgacaacctgaccaaggccgagcggggcggcctgtccgagctggacaaggccggcttcatcaagcggcagctggtggagacccggcagatcaccaagcacgtggcccagatcctggactcccggatgaacaccaagtacgacgagaacgacaagctgatccgggaggtgaaggtgatcaccctgaagtccaagctggtgtccgacttccggaaggacttccagttctacaaggtgcgggagatcaacaactaccaccacgcccacgacgcctacctgaacgccgtggtgggcaccgccctgatcaagaagtaccccaagctggagtccgagttcgtgtacggcgactacaaggtgtacgacgtgcggaagatgatcgccaagtccgagcaggagatcggcaaggccaccgccaagtacttcttctactccaacatcatgaacttcttcaagaccgagatcaccctggccaacggcgagatccggaagcggcccctgatcgagaccaacggcgagaccggcgagatcgtgtgggacaagggccgggacttcgccaccgtgcggaaggtgctgtccatgccccaggtgaacatcgtgaagaagaccgaggtgcagaccggcggcttctccaaggagtccatcctgcccaagcggaactccgacaagctgatcgcccggaagaaggactgggaccccaagaagtacggcggcttcgactcccccaccgtggcctactccgtgctggtggtggccaaggtggagaagggcaagtccaagaagctgaagtccgtgaaggagctgctgggcatcaccatcatggagcggtcctccttcgagaagaaccccatcgacttcctggaggccaagggctacaaggaggtgaagaaggacctgatcatcaagctgcccaagtactccctgttcgagctggagaacggccggaagcggatgctggcctccgccggcgagctgcagaagggcaacgagctggccctgccctccaagtacgtgaacttcctgtacctggcctcccactacgagaagctgaagggctcccccgaggacaacgagcagaagcagctgttcgtggagcagcacaagcactacctggacgagatcatcgagcagatctccgagttctccaagcgggtgatcctggccgacgccaacctggacaaggtgctgtccgcctacaacaagcaccgggacaagcccatccgggagcaggccgagaacatcatccacctgttcaccctgaccaacctgggcgcccccgccgccttcaagtacttcgacaccaccatcgaccggaagcggtacacctccaccaaggaggtgctggacgccaccctgatccaccagtccatcaccggcctgtacgagacccggatcgacctgtcccagctgggcggcgactccggcggctcctccggcggctccaagcggaccgccgacggctccgagttcgagtcccccaagaagaagcggaaggtgtccggcggctcctccggcggctccatggactccaccaaggagaagtgcgactcctacaaggacgacctgctgctgcggatgggcctgaacgacaacaaggccggcatggagggcctggacaaggagaagatcaacaagatcatcatggaggccaccaagggctcccggttctacggcaacgagctgaagaaggagaagcaggtgaaccagcggatcgagaacatgatgcagcagaaggcccagatcacctcccagcagctgcggaaggcccagctgcaggtggaccggttcgccatggagctggagcagtcccggaacctgtccaacaccatcgtgcacatcgacatggacgccttctacgccgccgtggagatgcgggacaaccccgagctgaaggacaagcccatcgccgtgggctccatgtccatgctgtccacctccaactaccacgcccggcggttcggcgtgcgggccgccatgcccggcttcatcgccaagcggctgtgcccccagctgatcatcgtgccccccaacttcgacaagtaccgggccgtgtccaaggaggtgaaggagatcctggccgactacgaccccaacttcatggccatgtccctggacgaggcctacctgaacatcaccaagcacctggaggagcggcagaactggcccgaggacaagcggcggtacttcatcaagatgggctcctccgtggagaacgacaaccccggcaaggaggtgaacaagctgtccgagcacgagcggtccatctcccccctgctgttcgaggagtccccctccgacgtgcagccccccggcgaccccttccaggtgaacttcgaggagcagaacaacccccagatcctgcagaactccgtggtgttcggcacctccgcccaggaggtggtgaaggagatccggttccggatcgagcagaagaccaccctgaccgcctccgccggcatcgcccccaacaccatgctggccaaggtgtgctccgacaagaacaagcccaacggccagtaccagatcctgcccaaccggcaggccgtgatggacttcatcaaggacctgcccatccggaaggtgtccggcatcggcaaggtgaccgagaagatgctgaaggccctgggcatcatcacctgcaccgagctgtaccagcagcgggccctgctgtccctgctgttctccgagacctcctggcactacttcctgcacatctccctgggcctgggctccacccacctgacccgggaccgggtgcggaagtccatgtccgtggagcggaccttctccgagatcaacaaggccgaggagcagtactccctgtgccaggagctgtgctccgagctggcccaggacctgcagaaggagcggctgaagggccggaccgtgaccatcaagctgaagaacgtgaacttcgaggtgaagacccgggcctccaccgtgtcctccgtggtgtccaccgccgaggagatcttcgccatcgccaaggagctgctgaagaccgagatcgacgccgacttcccccaccccctgcggctgcggctgatgggcgtgcggatctcctccttccccaacgaggaggaccggaagcaccagcagtagctagcaccagcctcaagaacacccgaatggagtctctaagctacataataccaacttacactttacaaaatgttgtcccccaaaatgtagccattcgtatctgctcctaataaaaagaaagtttcttcacattctctcgagaaaaaaaaaaaatggaaaaaaaaaaaacggaaaaaaaaaaaaggtaaaaaaaaaaaatataaaaaaaaaaaacataaaaaaaaaaaacgaaaaaaaaaaaacgtaaaaaaaaaaaactcaaaaaaaaaaaagataaaaaaaaaaaacctaaaaaaaaaaaatgtaaaaaaaaaaaagggaaaaaaaaaaaacgcaaaaaaaaaaaacacaaaaaaaaaaaatgcaaaaaaaaaaaatcgaaaaaaaaaaaatctaaaaaaaaaaaacgaaaaaaaaaaaacccaaaaaaaaaaaagacaaaaaaaaaaaatagaaaaaaaaaaagttaaaaaaaaaaaactgaaaaaaaaaaaatttaaaaaaaaaaaat

SEQ ID NO: 1267 - DNA, 5841 bp, synthetic construct
  misc_feature 1..5841: note = Synthetic
  source 1..5841: mol_type = other DNA
atgaagcggaccgccgacggctccgagttcgagtcccccaagaagaagcggaaggtggacaagaagtactccatcggcctggacatcggcaccaactccgtgggctgggccgtgatcaccgacgagtacaaggtgccctccaagaagttcaaggtgctgggcaacaccgaccggcactccatcaagaagaacctgatcggcgccctgctgttcgactccggcgagaccgccgaggccacccggctgaagcggaccgcccggcggcggtacacccggcggaagaaccggatctgctacctgcaggagatcttctccaacgagatggccaaggtggacgactccttcttccaccggctggaggagtccttcctggtggaggaggacaagaagcacgagcggcaccccatcttcggcaacatcgtggacgaggtggcctaccacgagaagtaccccaccatctaccacctgcggaagaagctggtggactccaccgacaaggccgacctgcggctgatctacctggccctggcccacatgatcaagttccggggccacttcctgatcgagggcgacctgaaccccgacaactccgacgtggacaagctgttcatccagctggtgcagacctacaaccagctgttcgaggagaaccccatcaacgcctccggcgtggacgccaaggccatcctgtccgcccggctgtccaagtcccggcggctggagaacctgatcgcccagctgcccggcgagaagaagaacggcctgttcggcaacctgatcgccctgtccctgggcctgacccccaacttcaagtccaacttcgacctggccgaggacgccaagctgcagctgtccaaggacacctacgacgacgacctggacaacctgctggcccagatcggcgaccagtacgccgacctgttcctggccgccaagaacctgtccgacgccatcctgctgtccgacatcctgcgggtgaacaccgagatcaccaaggcccccctgtccgcctccatgatcaagcggtacgacgagcaccaccaggacctgaccctgctgaaggccctggtgcggcagcagctgcccgagaagtacaaggagatcttcttcgaccagtccaagaacggctacgccggctacatcgacggcggcgcctcccaggaggagttctacaagttcatcaagcccatcctggagaagatggacggcaccgaggagctgctggtgaagctgaaccgggaggacctgctgcggaagcagcggaccttcgacaacggctccatcccccaccagatccacctgggcgagctgcacgccatcctgcggcggcaggaggacttctaccccttcctgaaggacaaccgggagaagatcgagaagatcctgaccttccggatcccctactacgtgggccccctggcccggggcaactcccggttcgcctggatgacccggaagtccgaggagaccatcaccccctggaacttcgaggaggtggtggacaagggcgcctccgcccagtccttcatcgagcggatgaccaacttcgacaagaacctgcccaacgagaaggtgctgcccaagcactccctgctgtacgagtacttcaccgtgtacaacgagctgaccaaggtgaagtacgtgaccgagggcatgcggaagcccgccttcctgtccggcgagcagaagaaggccatcgtggacctgctgttcaagaccaaccggaaggtgaccgtgaagcagctgaaggaggactacttcaagaagatcgagtgcttcgactccgtggagatctccggcgtggaggaccggttcaacgcctccctgggcacctaccacgacctgctgaagatcatcaaggacaaggacttcctggacaacgaggagaacgaggacatcctggaggacatcgtgctgaccctgaccctgttcgaggaccgggagatgatcgaggagcggctgaagacctacgcccacctgttcgacgacaaggtgatgaagcagctgaagcggcggcggtacaccggctggggccggctgtcccggaagctgatcaacggcatccgggacaagcagtccggcaagaccatcctggacttcctgaagtccgacggcttcgccaaccggaacttcatgcagctgatccacgacgactccctgaccttcaaggaggacatccagaaggcccaggtgtccggccagggcgactccctgcacgagcacatcgccaacctggccggctcccccgccatcaagaagggcatcctgcagaccgtgaaggtggtggacgagctggtgaaggtgatgggccggcacaagcccgagaacatcgtgatcgagatggcccgggagaaccagaccacccagaagggccagaagaactcccgggagcggatgaagcggatcgaggagggcatcaaggagctgggctcccagatcctgaaggagcaccccgtggagaacacccagctgcagaacgagaagctgtacctgtactacctgcagaacggccgggacatgtacgtggaccaggagctggacatcaaccggctgtccgactacgacgtggacgccatcgtgccccagtccttcctgaaggacgactccatcgacaacaaggtgctgacccggtccgacaagaaccggggcaagtccgacaacgtgccctccgaggaggtggtgaagaagatgaagaactactggcggcagctgctgaacgccaagctgatcacccagcggaagttcgacaacctgaccaaggccgagcggggcggcctgtccgagctggacaaggccggcttcatcaagcggcagctggtggagacccggcagatcaccaagcacgtggcccagatcctggactcccggatgaacaccaagtacgacgagaacgacaagctgatccgggaggtgaaggtgatcaccctgaagtccaagctggtgtccgacttccggaaggacttccagttctacaaggtgcgggagatcaacaactaccaccacgcccacgacgcctacctgaacgccgtggtgggcaccgccctgatcaagaagtaccccaagctggagtccgagttcgtgtacggcgactacaaggtgtacgacgtgcggaagatgatcgccaagtccgagcaggagatcggcaaggccaccgccaagtacttcttctactccaacatcatgaacttcttcaagaccgagatcaccctggccaacggcgagatccggaagcggcccctgatcgagaccaacggcgagaccggcgagatcgtgtgggacaagggccgggacttcgccaccgtgcggaaggtgctgtccatgccccaggtgaacatcgtgaagaagaccgaggtgcagaccggcggcttctccaaggagtccatcctgcccaagcggaactccgacaagctgatcgcccggaagaaggactgggaccccaagaagtacggcggcttcgactcccccaccgtggcctactccgtgctggtggtggccaaggtggagaagggcaagtccaagaagctgaagtccgtgaaggagctgctgggcatcaccatcatggagcggtcctccttcgagaagaaccccatcgacttcctggaggccaagggctacaaggaggtgaagaaggacctgatcatcaagctgcccaagtactccctgttcgagctggagaacggccggaagcggatgctggcctccgccggcgagctgcagaagggcaacgagctggccctgccctccaagtacgtgaacttcctgtacctggcctcccactacgagaagctgaagggctcccccgaggacaacgagcagaagcagctgttcgtggagcagcacaagcactacctggacgagatcatcgagcagatctccgagttctccaagcgggtgatcctggccgacgccaacctggacaaggtgctgtccgcctacaacaagcaccgggacaagcccatccgggagcaggccgagaacatcatccacctgttcaccctgaccaacctgggcgcccccgccgccttcaagtacttcgacaccaccatcgaccggaagcggtacacctccaccaaggaggtgctggacgccaccctgatccaccagtccatcaccggcctgtacgagacccggatcgacctgtcccagctgggcggcgactccggcggctcctccggcggctccaagcggaccgccgacggctccgagttcgagtcccccaagaagaagcggaaggtgtccggcggctcctccggcggctccatggactccaccaaggagaagtgcgactcctacaaggacgacctgctgctgcggatgggcctgaacgacaacaaggccggcatggagggcctggacaaggagaagatcaacaagatcatcatggaggccaccaagggctcccggttctacggcaacgagctgaagaaggagaagcaggtgaaccagcggatcgagaacatgatgcagcagaaggcccagatcacctcccagcagctgcggaaggcccagctgcaggtggaccggttcgccatggagctggagcagtcccggaacctgtccaacaccatcgtgcacatcgacatggacgccttctacgccgccgtggagatgcgggacaaccccgagctgaaggacaagcccatcgccgtgggctccatgtccatgctgtccacctccaactaccacgcccggcggttcggcgtgcgggccgccatgcccggcttcatcgccaagcggctgtgcccccagctgatcatcgtgccccccaacttcgacaagtaccgggccgtgtccaaggaggtgaaggagatcctggccgactacgaccccaacttcatggccatgtccctggacgaggcctacctgaacatcaccaagcacctggaggagcggcagaactggcccgaggacaagcggcggtacttcatcaagatgggctcctccgtggagaacgacaaccccggcaaggaggtgaacaagctgtccgagcacgagcggtccatctcccccctgctgttcgaggagtccccctccgacgtgcagccccccggcgaccccttccaggtgaacttcgaggagcagaacaacccccagatcctgcagaactccgtggtgttcggcacctccgcccaggaggtggtgaaggagatccggttccggatcgagcagaagaccaccctgaccgcctccgccggcatcgcccccaacaccatgctggccaaggtgtgctccgacaagaacaagcccaacggccagtaccagatcctgcccaaccggcaggccgtgatggacttcatcaaggacctgcccatccggaaggtgtccggcatcggcaaggtgaccgagaagatgctgaaggccctgggcatcatcacctgcaccgagctgtaccagcagcgggccctgctgtccctgctgttctccgagacctcctggcactacttcctgcacatctccctgggcctgggctccacccacctgacccgggaccgggtgcggaagtccatgtccgtggagcggaccttctccgagatcaacaaggccgaggagcagtactccctgtgccaggagctgtgctccgagctggcccaggacctgcagaaggagcggctgaagggccggaccgtgaccatcaagctgaagaacgtgaacttcgaggtgaagacccgggcctccaccgtgtcctccgtggtgtccaccgccgaggagatcttcgccatcgccaaggagctgctgaagaccgagatcgacgccgacttcccccaccccctgcggctgcggctgatgggcgtgcggatctcctccttccccaacgaggaggaccggaagcaccagcagtag

SEQ ID NO: 1268 - protein, 1946 aa, synthetic construct
  REGION 1..1946: note = Synthetic
MKRTADGSEFESPKKKRKVDKKYSIGLDIGTNSVGWAVITDEYKVPSKKFKVLGNTDRHSIKKNLIGALLFDSGETAEATRLKRTARRRYTRRKNRICYLQEIFSNEMAKVDDSFFHRLEESFLVEEDKKHERHPIFGNIVDEVAYHEKYPTIYHLRKKLVDSTDKADLRLIYLALAHMIKFRGHFLIEGDLNPDNSDVDKLFIQLVQTYNQLFEENPINASGVDAKAILSARLSKSRRLENLIAQLPGEKKNGLFGNLIALSLGLTPNFKSNFDLAEDAKLQLSKDTYDDDLDNLLAQIGDQYADLFLAAKNLSDAILLSDILRVNTEITKAPLSASMIKRYDEHHQDLTLLKALVRQQLPEKYKEIFFDQSKNGYAGYIDGGASQEEFYKFIKPILEKMDGTEELLVKLNREDLLRKQRTFDNGSIPHQIHLGELHAILRRQEDFYPFLKDNREKIEKILTFRIPYYVGPLARGNSRFAWMTRKSEETITPWNFEEVVDKGASAQSFIERMTNFDKNLPNEKVLPKHSLLYEYFTVYNELTKVKYVTEGMRKPAFLSGEQKKAIVDLLFKTNRKVTVKQLKEDYFKKIECFDSVEISGVEDRFNASLGTYHDLLKIIKDKDFLDNEENEDILEDIVLTLTLFEDREMIEERLKTYAHLFDDKVMKQLKRRRYTGWGRLSRKLINGIRDKQSGKTILDFLKSDGFANRNFMQLIHDDSLTFKEDIQKAQVSGQGDSLHEHIANLAGSPAIKKGILQTVKVVDELVKVMGRHKPENIVIEMARENQTTQKGQKNSRERMKRIEEGIKELGSQILKEHPVENTQLQNEKLYLYYLQNGRDMYVDQELDINRLSDYDVDAIVPQSFLKDDSIDNKVLTRSDKNRGKSDNVPSEEVVKKMKNYWRQLLNAKLITQRKFDNLTKAERGGLSELDKAGFIKRQLVETRQITKHVAQILDSRMNTKYDENDKLIREVKVITLKSKLVSDFRKDFQFYKVREINNYHHAHDAYLNAVVGTALIKKYPKLESEFVYGDYKVYDVRKMIAKSEQEIGKATAKYFFYSNIMNFFKTEITLANGEIRKRPLIETNGETGEIVWDKGRDFATVRKVLSMPQVNIVKKTEVQTGGFSKESILPKRNSDKLIARKKDWDPKKYGGFDSPTVAYSVLVVAKVEKGKSKKLKSVKELLGITIMERSSFEKNPIDFLEAKGYKEVKKDLIIKLPKYSLFELENGRKRMLASAGELQKGNELALPSKYVNFLYLASHYEKLKGSPEDNEQKQLFVEQHKHYLDEIIEQISEFSKRVILADANLDKVLSAYNKHRDKPIREQAENIIHLFTLTNLGAPAAFKYFDTTIDRKRYTSTKEVLDATLIHQSITGLYETRIDLSQLGGDSGGSSGGSKRTADGSEFESPKKKRKVSGGSSGGSMDSTKEKCDSYKDDLLLRMGLNDNKAGMEGLDKEKINKIIMEATKGSRFYGNELKKEKQVNQRIENMMQQKAQITSQQLRKAQLQVDRFAMELEQSRNLSNTIVHIDMDAFYAAVEMRDNPELKDKPIAVGSMSMLSTSNYHARRFGVRAAMPGFIAKRLCPQLIIVPPNFDKYRAVSKEVKEILADYDPNFMAMSLDEAYLNITKHLEERQNWPEDKRRYFIKMGSSVENDNPGKEVNKLSEHERSISPLLFEESPSDVQPPGDPFQVNFEEQNNPQILQNSVVFGTSAQEVVKEIRFRIEQKTTLTASAGIAPNTMLAKVCSDKNKPNGQYQILPNRQAVMDFIKDLPIRKVSGIGKVTEKMLKALGIITCTELYQQRALLSLLFSETSWHYFLHISLGLGSTHLTRDRVRKSMSVERTFSEINKAEEQYSLCQELCSELAQDLQKERLKGRTVTIKLKNVNFEVKTRASTVSSVVSTAEEIFAIAKELLKTEIDADFPHPLRLRLMGVRISSFPNEEDRKHQQ

SEQ ID NO: 1269 - DNA, 6084 bp, synthetic construct
  misc_feature 1..6084: note = Synthetic
  source 1..6084: mol_type = other DNA
atggacaagaagtactccatcggcctggacatcggcaccaactccgtgggctgggccgtgatcaccgacgagtacaaggtgccctccaagaagttcaaggtgctgggcaacaccgaccggcactccatcaagaagaacctgatcggcgccctgctgttcgactccggcgagaccgccgaggccacccggctgaagcggaccgcccggcggcggtacacccggcggaagaaccggatctgctacctgcaggagatcttctccaacgagatggccaaggtggacgactccttcttccaccggctggaggagtccttcctggtggaggaggacaagaagcacgagcggcaccccatcttcggcaacatcgtggacgaggtggcctaccacgagaagtaccccaccatctaccacctgcggaagaagctggtggactccaccgacaaggccgacctgcggctgatctacctggccctggcccacatgatcaagttccggggccacttcctgatcgagggcgacctgaaccccgacaactccgacgtggacaagctgttcatccagctggtgcagacctacaaccagctgttcgaggagaaccccatcaacgcctccggcgtggacgccaaggccatcctgtccgcccggctgtccaagtcccggcggctggagaacctgatcgcccagctgcccggcgagaagaagaacggcctgttcggcaacctgatcgccctgtccctgggcctgacccccaacttcaagtccaacttcgacctggccgaggacgccaagctgcagctgtccaaggacacctacgacgacgacctggacaacctgctggcccagatcggcgaccagtacgccgacctgttcctggccgccaagaacctgtccgacgccatcctgctgtccgacatcctgcgggtgaacaccgagatcaccaaggcccccctgtccgcctccatgatcaagcggtacgacgagcaccaccaggacctgaccctgctgaaggccctggtgcggcagcagctgcccgagaagtacaaggagatcttcttcgaccagtccaagaacggctacgccggctacatcgacggcggcgcctcccaggaggagttctacaagttcatcaagcccatcctggagaagatggacggcaccgaggagctgctggtgaagctgaaccgggaggacctgctgcggaagcagcggaccttcgacaacggctccatcccccaccagatccacctgggcgagctgcacgccatcctgcggcggcaggaggacttctaccccttcctgaaggacaaccgggagaagatcgagaagatcctgaccttccggatcccctactacgtgggccccctggcccggggcaactcccggttcgcctggatgacccggaagtccgaggagaccatcaccccctggaacttcgaggaggtggtggacaagggcgcctccgcccagtccttcatcgagcggatgaccaacttcgacaagaacctgcccaacgagaaggtgctgcccaagcactccctgctgtacgagtacttcaccgtgtacaacgagctgaccaaggtgaagtacgtgaccgagggcatgcggaagcccgccttcctgtccggcgagcagaagaaggccatcgtggacctgctgttcaagaccaaccggaaggtgaccgtgaagcagctgaaggaggactacttcaagaagatcgagtgcttcgactccgtggagatctccggcgtggaggaccggttcaacgcctccctgggcacctaccacgacctgctgaagatcatcaaggacaaggacttcctggacaacgaggagaacgaggacatcctggaggacatcgtgctgaccctgaccctgttcgaggaccgggagatgatcgaggagcggctgaagacctacgcccacctgttcgacgacaaggtgatgaagcagctgaagcggcggcggtacaccggctggggccggctgtcccggaagctgatcaacggcatccgggacaagcagtccggcaagaccatcctggacttcctgaagtccgacggcttcgccaaccggaacttcatgcagctgatccacgacgactccctgaccttcaaggaggacatccagaaggcccaggtgtccggccagggcgactccctgcacgagcacatcgccaacctggccggctcccccgccatcaagaagggcatcctgcagaccgtgaaggtggtggacgagctggtgaaggtgatgggccggcacaagcccgagaacatcgtgatcgagatggcccgggagaaccagaccacccagaagggccagaagaactcccgggagcggatgaagcggatcgaggagggcatcaaggagctgggctcccagatcctgaaggagcaccccgtggagaacacccagctgcagaacgagaagctgtacctgtactacctgcagaacggccgggacatgtacgtggaccaggagctggacatcaaccggctgtccgactacgacgtggacgccatcgtgccccagtccttcctgaaggacgactccatcgacaacaaggtgctgacccggtccgacaagaaccggggcaagtccgacaacgtgccctccgaggaggtggtgaagaagatgaagaactactggcggcagctgctgaacgccaagctgatcacccagcggaagttcgacaacctgaccaaggccgagcggggcggcctgtccgagctggacaaggccggcttcatcaagcggcagctggtggagacccggcagatcaccaagcacgtggcccagatcctggactcccggatgaacaccaagtacgacgagaacgacaagctgatccgggaggtgaaggtgatcaccctgaagtccaagctggtgtccgacttccggaaggacttccagttctacaaggtgcgggagatcaacaactaccaccacgcccacgacgcctacctgaacgccgtggtgggcaccgccctgatcaagaagtaccccaagctggagtccgagttcgtgtacggcgactacaaggtgtacgacgtgcggaagatgatcgccaagtccgagcaggagatcggcaaggccaccgccaagtacttcttctactccaacatcatgaacttcttcaagaccgagatcaccctggccaacggcgagatccggaagcggcccctgatcgagaccaacggcgagaccggcgagatcgtgtgggacaagggccgggacttcgccaccgtgcggaaggtgctgtccatgccccaggtgaacatcgtgaagaagaccgaggtgcagaccggcggcttctccaaggagtccatcctgcccaagcggaactccgacaagctgatcgcccggaagaaggactgggaccccaagaagtacggcggcttcgactcccccaccgtggcctactccgtgctggtggtggccaaggtggagaagggcaagtccaagaagctgaagtccgtgaaggagctgctgggcatcaccatcatggagcggtcctccttcgagaagaaccccatcgacttcctggaggccaagggctacaaggaggtgaagaaggacctgatcatcaagctgcccaagtactccctgttcgagctggagaacggccggaagcggatgctggcctccgccggcgagctgcagaagggcaacgagctggccctgccctccaagtacgtgaacttcctgtacctggcctcccactacgagaagctgaagggctcccccgaggacaacgagcagaagcagctgttcgtggagcagcacaagcactacctggacgagatcatcgagcagatctccgagttctccaagcgggtgatcctggccgacgccaacctggacaaggtgctgtccgcctacaacaagcaccgggacaagcccatccgggagcaggccgagaacatcatccacctgttcaccctgaccaacctgggcgcccccgccgccttcaagtacttcgacaccaccatcgaccggaagcggtacacctccaccaaggaggtgctggacgccaccctgatccaccagtccatcaccggcctgtacgagacccggatcgacctgtcccagctgggcggcgacggcgcccccgagtccgccaccgagtccggcggcacctccaccgagtccgagggctccgccggcacctccaccgagtccgagggctccgccggctccgccggctccacctccggctcctcctccggcatgaagcacatgccccggaagcggtactcctgcgccttcgccaccaccaccaaggtggaggactgccgggtgtgggcctacggctacatgaacatcgaggaccactccgagtacaagatcggcaactccctggacgagttcatggcctgggccctgaaggtgcaggccgacctgtacttccacaacctgaagttcgacggcgccttcatcatcaactggctggagcggaacggcttcaagtggtccgccgacggcctgcccaacacctacaacaccatcatctcccggaccggccagtggtacatgatcgacatctgcctgggctacaagggcaagcggaagatccacaccgtgatctacgactccctgaagaagctgcccttccccgtgaagaagatcgccaaggacttcaagctgaccgtgctgaagggcgacatcgactaccacaaggagcggcccgtgggctacaagatcacccccgaggagtacgcctacatcaagaacgacatccagatcatcgccgaggccctgctgatccagttcaagcagggcctggaccggatgaccgccggctccgactccctgaaggacttcaaggacatcatcaccaccaagaagttcaagaaggtgttccccaccctgtccctgggcctggacaagaaggtgcggtacgcctaccggggcggcttcacctggctgaacgaccggttcaaggagaaggagatcggcgagggcatggtgttcgacgtgaactccctgtaccccgcccagatgtactcccggctgctgccctacggcgagcccatcgtgttcgagggcaagtacgtgtgggacgaggactaccccctgcacatccagcacatccggtgcgagttcgagctgaaggagggctacatccccaccatccagatcaagcggtcccggttctacaagggcaacgagtacctgaagtcctccggcggcgagatcgccgacctgtggctgtccaacgtggacctggagctgatgaaggagcactacgacctgtacaacgtggagtacatctccggcctgaagttcaaggccaccaccggcctgttcaaggacttcatcgacaagtggacctacatcaagaccacctccgagggcgccatcaagcagctggccaagctgatgctgaactccctgtacggcaagttcgcctccaaccccgacgtgaccggcaaggtgccctacctgaaggagaacggcgccctgggcttccggctgggcgaggaggagaccaaggaccccgtgtacacccccatgggcgtgttcatcaccgcctgggcccggtacaccaccatcaccgccgcccaggcctgctacgaccggatcatctactgcgacaccgactccatccacctgaccggcaccgagatccccgacgtgatcaaggacatcgtggaccccaagaagctgggctactgggcccacgagtccaccttcaagcgggccaagtacctgcggcccaagacctacatccaggacatctacatgaaggaggtggacggcgagctggtggccggctcccccgacgactacaccgacatcaagctgtccgtgaagtgcgccggcatgaccgacaagatcaagaaggaggtgaccttcgagaacttcaaggtgggcttctcccggaagatgaagcccaagcccgtgcaggtgcccggcggcgtggtgctggtggacgacaccttcaccatcaagggcggcggctccggcaagcggaccgccgacggctccggcggcggctcccccaagaagaagcggaaggtgtccgagtccgccacccccgagtccgtgtccggctggcggctgttcaagaagatctcctag

SEQ ID NO: 1270 - protein, 2027 aa, synthetic construct
  REGION 1..2027: note = Synthetic
MDKKYSIGLDIGTNSVGWAVITDEYKVPSKKFKVLGNTDRHSIKKNLIGALLFDSGETAEATRLKRTARRRYTRRKNRICYLQEIFSNEMAKVDDSFFHRLEESFLVEEDKKHERHPIFGNIVDEVAYHEKYPTIYHLRKKLVDSTDKADLRLIYLALAHMIKFRGHFLIEGDLNPDNSDVDKLFIQLVQTYNQLFEENPINASGVDAKAILSARLSKSRRLENLIAQLPGEKKNGLFGNLIALSLGLTPNFKSNFDLAEDAKLQLSKDTYDDDLDNLLAQIGDQYADLFLAAKNLSDAILLSDILRVNTEITKAPLSASMIKRYDEHHQDLTLLKALVRQQLPEKYKEIFFDQSKNGYAGYIDGGASQEEFYKFIKPILEKMDGTEELLVKLNREDLLRKQRTFDNGSIPHQIHLGELHAILRRQEDFYPFLKDNREKIEKILTFRIPYYVGPLARGNSRFAWMTRKSEETITPWNFEEVVDKGASAQSFIERMTNFDKNLPNEKVLPKHSLLYEYFTVYNELTKVKYVTEGMRKPAFLSGEQKKAIVDLLFKTNRKVTVKQLKEDYFKKIECFDSVEISGVEDRFNASLGTYHDLLKIIKDKDFLDNEENEDILEDIVLTLTLFEDREMIEERLKTYAHLFDDKVMKQLKRRRYTGWGRLSRKLINGIRDKQSGKTILDFLKSDGFANRNFMQLIHDDSLTFKEDIQKAQVSGQGDSLHEHIANLAGSPAIKKGILQTVKVVDELVKVMGRHKPENIVIEMARENQTTQKGQKNSRERMKRIEEGIKELGSQILKEHPVENTQLQNEKLYLYYLQNGRDMYVDQELDINRLSDYDVDAIVPQSFLKDDSIDNKVLTRSDKNRGKSDNVPSEEVVKKMKNYWRQLLNAKLITQRKFDNLTKAERGGLSELDKAGFIKRQLVETRQITKHVAQILDSRMNTKYDENDKLIREVKVITLKSKLVSDFRKDFQFYKVREINNYHHAHDAYLNAVVGTALIKKYPKLESEFVYGDYKVYDVRKMIAKSEQEIGKATAKYFFYSNIMNFFKTEITLANGEIRKRPLIETNGETGEIVWDKGRDFATVRKVLSMPQVNIVKKTEVQTGGFSKESILPKRNSDKLIARKKDWDPKKYGGFDSPTVAYSVLVVAKVEKGKSKKLKSVKELLGITIMERSSFEKNPIDFLEAKGYKEVKKDLIIKLPKYSLFELENGRKRMLASAGELQKGNELALPSKYVNFLYLASHYEKLKGSPEDNEQKQLFVEQHKHYLDEIIEQISEFSKRVILADANLDKVLSAYNKHRDKPIREQAENIIHLFTLTNLGAPAAFKYFDTTIDRKRYTSTKEVLDATLIHQSITGLYETRIDLSQLGGDGAPESATESGGTSTESEGSAGTSTESEGSAGSAGSTSGSSSGMKHMPRKRYSCAFATTTKVEDCRVWAYGYMNIEDHSEYKIGNSLDEFMAWALKVQADLYFHNLKFDGAFIINWLERNGFKWSADGLPNTYNTIISRTGQWYMIDICLGYKGKRKIHTVIYDSLKKLPFPVKKIAKDFKLTVLKGDIDYHKERPVGYKITPEEYAYIKNDIQIIAEALLIQFKQGLDRMTAGSDSLKDFKDIITTKKFKKVFPTLSLGLDKKVRYAYRGGFTWLNDRFKEKEIGEGMVFDVNSLYPAQMYSRLLPYGEPIVFEGKYVWDEDYPLHIQHIRCEFELKEGYIPTIQIKRSRFYKGNEYLKSSGGEIADLWLSNVDLELMKEHYDLYNVEYISGLKFKATTGLFKDFIDKWTYIKTTSEGAIKQLAKLMLNSLYGKFASNPDVTGKVPYLKENGALGFRLGEEETKDPVYTPMGVFITAWARYTTITAAQACYDRIIYCDTDSIHLTGTEIPDVIKDIVDPKKLGYWAHESTFKRAKYLRPKTYIQDIYMKEVDGELVAGSPDDYTDIKLSVKCAGMTDKIKKEVTFENFKVGFSRKMKPKPVQVPGGVVLVDDTFTIKGGGSGKRTADGSGGGSPKKKRKVSESATPESVSGWRLFKKIS

SEQ ID NO: 1271 - RNA, 6643 nt, synthetic construct; identical to SEQ ID NO: 1237
  misc_feature 1..6643: note = Synthetic
  source 1..6643: mol_type = other RNA

SEQ ID NO: 1272 - DNA, 6024 bp, synthetic construct
  misc_feature 1..6024: note = Synthetic
  source 1..6024: mol_type = other DNA
atggacaagaagtactccatcggcctggacatcggcaccaactccgtgggctgggccgtgatcaccgacgagtacaaggtgccctccaagaagttcaaggtgctgggcaacaccgaccggcactccatcaagaagaacctgatcggcgccctgctgttcgactccggcgagaccgccgaggccacccggctgaagcggaccgcccggcggcggtacacccggcggaagaaccggatctgctacctgcaggagatcttctccaacgagatggccaaggtggacgactccttcttccaccggctggaggagtccttcctggtggaggaggacaagaagcacgagcggcaccccatcttcggcaacatcgtggacgaggtggcctaccacgagaagtaccccaccatctaccacctgcggaagaagctggtggactccaccgacaaggccgacctgcggctgatctacctggccctggcccacatgatcaagttccggggccacttcctgatcgagggcgacctgaaccccgacaactccgacgtggacaagctgttcatccagctggtgcagacctacaaccagctgttcgaggagaaccccatcaacgcctccggcgtggacgccaaggccatcctgtccgcccggctgtccaagtcccggcggctggagaacctgatcgcccagctgcccggcgagaagaagaacggcctgttcggcaacctgatcgccctgtccctgggcctgacccccaacttcaagtccaacttcgacctggccgaggacgccaagctgcagctgtccaaggacacctacgacgacgacctggacaacctgctggcccagatcggcgaccagtacgccgacctgttcctggccgccaagaacctgtccgacgccatcctgctgtccgacatcctgcgggtgaacaccgagatcaccaaggcccccctgtccgcctccatgatcaagcggtacgacgagcaccaccaggacctgaccctgctgaaggccctggtgcggcagcagctgcccgagaagtacaaggagatcttcttcgaccagtccaagaacggctacgccggctacatcgacggcggcgcctcccaggaggagttctacaagttcatcaagcccatcctggagaagatggacggcaccgaggagctgctggtgaagctgaaccgggaggacctgctgcggaagcagcggaccttcgacaacggctccatcccccaccagatccacctgggcgagctgcacgccatcctgcggcggcaggaggacttctaccccttcctgaaggacaaccgggagaagatcgagaagatcctgaccttccggatcccctactacgtgggccccctggcccggggcaactcccggttcgcctggatgacccggaagtccgaggagaccatcaccccctggaacttcgaggaggtggtggacaagggcgcctccgcccagtccttcatcgagcggatgaccaacttcgacaagaacctgcccaacgagaaggtgctgcccaagcactccctgctgtacgagtacttcaccgtgtacaacgagctgaccaaggtgaagtacgtgaccgagggcatgcggaagcccgccttcctgtccggcgagcagaagaaggccatcgtggacctgctgttcaagaccaaccggaaggtgaccgtgaagcagctgaaggaggactacttcaagaagatcgagtgcttcgactccgtggagatctccggcgtggaggaccggttcaacgcctccctgggcacctaccacgacctgctgaagatcatcaaggacaaggacttcctggacaacgaggagaacgaggacatcctggaggacatcgtgctgaccctgaccctgttcgaggaccgggagatgatcgaggagcggctgaagacctacgcccacctgttcgacgacaaggtgatgaagcagctgaagcggcggcggtacaccggctggggccggctgtcccggaagctgatcaacggcatccgggacaagcagtccggcaagaccatcctggacttcctgaagtccgacggcttcgccaaccggaacttcatgcagctgatccacgacgactccctgaccttcaaggaggacatccagaaggcccaggtgtccggccagggcgactccctgcacgagcacatcgccaacctggccggctcccccgccatcaagaagggcatcctgcagaccgtgaaggtggtggacgagctggtgaaggtgatgggccggcacaagcccgagaacatcgtgatcgagatggcccgggagaaccagaccacccagaagggccagaagaactcccgggagcggatgaagcggatcgaggagggcatcaaggagctgggctcccagatcctgaaggagcaccccgtggagaacacccagctgcagaacgagaagctgtacctgtactacctgcagaacggccgggacatgtacgtggaccaggagctggacatcaaccggctgtccgactacgacgtggacgccatcgtgccccagtccttcctgaaggacgactccatcgacaacaaggtgctgacccggtccgacaagaaccggggcaagtccgacaacgtgccctccgaggaggtggtgaagaagatgaagaactactggcggcagctgctgaacgccaagctgatcacccagcggaagttcgacaacctgaccaaggccgagcggggcggcctgtccgagctggacaaggccggcttcatcaagcggcagctggtggagacccggcagatcaccaagcacgtggcccagatcctggactcccggatgaacaccaagtacgacgagaacgacaagctgatccgggaggtgaaggtgatcaccctgaagtccaagctggtgtccgacttccggaaggacttccagttctacaaggtgcgggagatcaacaactaccaccacgcccacgacgcctacctgaacgccgtggtgggcaccgccctgatcaagaagtaccccaagctggagtccgagttcgtgtacggcgactacaaggtgtacgacgtgcggaagatgatcgccaagtccgagcaggagatcggcaaggccaccgccaagtacttcttctactccaacatcatgaacttcttcaagaccgagatcaccctggccaacggcgagatccggaagcggcccctgatcgagaccaacggcgagaccggcgagatcgtgtgggacaagggccgggacttcgccaccgtgcggaaggtgctgtccatgccccaggtgaacatcgtgaagaagaccgaggtgcagaccggcggcttctccaaggagtccatcctgcccaagcggaactccgacaagctgatcgcccggaagaaggactgggaccccaagaagtacggcggcttcgactcccccaccgtggcctactccgtgctggtggtggccaaggtggagaagggcaagtccaagaagctgaagtccgtgaaggagctgctgggcatcaccatcatggagcggtcctccttcgagaagaaccccatcgacttcctggaggccaagggctacaaggaggtgaagaaggacctgatcatcaagctgcccaagtactccctgttcgagctggagaacggccggaagcggatgctggcctccgccggcgagctgcagaagggcaacgagctggccctgccctccaagtacgtgaacttcctgtacctggcctcccactacgagaagctgaagggctcccccgaggacaacgagcagaagcagctgttcgtggagcagcacaagcactacctggacgagatcatcgagcagatctccgagttctccaagcgggtgatcctggccgacgccaacctggacaaggtgctgtccgcctacaacaagcaccgggacaagcccatccgggagcaggccgagaacatcatccacctgttcaccctgaccaacctgggcgcccccgccgccttcaagtacttcgacaccaccatcgaccggaagcggtacacctccaccaaggaggtgctggacgccaccctgatccaccagtccatcaccggcctgtacgagacccggatcgacctgtcccagctgggcggcgacggcgcccccgagtccgccaccgagtccggcggcacctccaccgagtccgagggctccgccggcacctccaccgagtccgagggctccgccggctccgccggctccacctccggctcctcctccggcatgaagcacatgccccggaagcggtactcctgcgccttcgccaccaccaccaaggtggaggactgccgggtgtgggcctacggctacatgaacatcgaggaccactccgagtacaagatcggcaactccctggacgagttcatggcctgggccctgaaggtgcaggccgacctgtacttccacaacctgaagttcgacggcgccttcatcatcaactggctggagcggaacggcttcaagtggtccgccgacggcctgcccaacacctacaacaccatcatctcccggaccggccagtggtacatgatcgacatctgcctgggctacaagggcaagcggaagatccacaccgtgatctacgactccctgaagaagctgcccttccccgtgaagaagatcgccaaggacttcaagctgaccgtgctgaagggcgacatcgactaccacaaggagcggcccgtgggctacaagatcacccccgaggagtacgcctacatcaagaacgacatccagatcatcgccgaggccctgctgatccagttcaagcagggcctggaccggatgaccgccggctccgactccctgaaggacttcaaggacatcatcaccaccaagaagttcaagaaggtgttccccaccctgtccctgggcctggacaagaaggtgcggtacgcctaccggggcggcttcacctggctgaacgaccggttcaaggagaaggagatcggcgagggcatggtgttcgacgtgaactccctgtaccccgcccagatgtactcccggctgctgccctacggcgagcccatcgtgttcgagggcaagtacgtgtgggacgaggactaccccctgcacatccagcacatccggtgcgagttcgagctgaaggagggctacatccccaccatccagatcaagcggtcccggttctacaagggcaacgagtacctgaagtcctccggcggcgagatcgccgacctgtggctgtccaacgtggacctggagctgatgaaggagcactacgacctgtacaacgtggagtacatctccggcctgaagttcaaggccaccaccggcctgttcaaggacttcatcgacaagtggacctacatcaagaccacctccgagggcgccatcaagcagctggccaagctgatgctgaactccctgtacggcaagttcgcctccaaccccgacgtgaccggcaaggtgccctacctgaaggagaacggcgccctgggcttccggctgggcgaggaggagaccaaggaccccgtgtacacccccatgggcgtgttcatcaccgcctgggcccggtacaccaccatcaccgccgcccaggcctgctacgaccggatcatctactgcgacaccgactccatccacctgaccggcaccgagatccccgacgtgatcaaggacatcgtggaccccaagaagctgggctactgggcccacgagtccaccttcaagcgggccaagtacctgcggcccaagacctacatccaggacatctacatgaaggaggtggacggcgagctggtggccggctcccccgacgactacaccgacatcaagctgtccgtgaagtgcgccggcatgaccgacaagatcaagaaggaggtgaccttcgagaacttcaaggtgggcttctcccggaagatgaagcccaagcccgtgcaggtgcccggcggcgtggtgctggtggacgacaccttcaccatcaagggcggcggctccggcaagcggaccgccgacggctccggcggcggctcccccaagaagaagcggaaggtg

SEQ ID NO: 1273 - protein, 2008 aa, synthetic construct
  REGION 1..2008: note = Synthetic
MDKKYSIGLDIGTNSVGWAVITDEYKVPSKKFKVLGNTDRHSIKKNLIGALLFDSGETAEATRLKRTARRRYTRRKNRICYLQEIFSNEMAKVDDSFFHRLEESFLVEEDKKHERHPIFGNIVDEVAYHEKYPTIYHLRKKLVDSTDKADLRLIYLALAHMIKFRGHFLIEGDLNPDNSDVDKLFIQLVQTYNQLFEENPINASGVDAKAILSARLSKSRRLENLIAQLPGEKKNGLFGNLIALSLGLTPNFKSNFDLAEDAKLQLSKDTYDDDLDNLLAQIGDQYADLFLAAKNLSDAILLSDILRVNTEITKAPLSASMIKRYDEHHQDLTLLKALVRQQLPEKYKEIFFDQSKNGYAGYIDGGASQEEFYKFIKPILEKMDGTEELLVKLNREDLLRKQRTFDNGSIPHQIHLGELHAILRRQEDFYPFLKDNREKIEKILTFRIPYYVGPLARGNSRFAWMTRKSEETITPWNFEEVVDKGASAQSFIERMTNFDKNLPNEKVLPKHSLLYEYFTVYNELTKVKYVTEGMRKPAFLSGEQKKAIVDLLFKTNRKVTVKQLKEDYFKKIECFDSVEISGVEDRFNASLGTYHDLLKIIKDKDFLDNEENEDILEDIVLTLTLFEDREMIEERLKTYAHLFDDKVMKQLKRRRYTGWGRLSRKLINGIRDKQSGKTILDFLKSDGFANRNFMQLIHDDSLTFKEDIQKAQVSGQGDSLHEHIANLAGSPAIKKGILQTVKVVDELVKVMGRHKPENIVIEMARENQTTQKGQKNSRERMKRIEEGIKELGSQILKEHPVENTQLQNEKLYLYYLQNGRDMYVDQELDINRLSDYDVDAIVPQSFLKDDSIDNKVLTRSDKNRGKSDNVPSEEVVKKMKNYWRQLLNAKLITQRKFDNLTKAERGGLSELDKAGFIKRQLVETRQITKHVAQILDSRMNTKYDENDKLIREVKVITLKSKLVSDFRKDFQFYKVREINNYHHAHDAYLNAVVGTALIKKYPKLESEFVYGDYKVYDVRKMIAKSEQEIGKATAKYFFYSNIMNFFKTEITLANGEIRKRPLIETNGETGEIVWDKGRDFATVRKVLSMPQVNIVKKTEVQTGGFSKESILPKRNSDKLIARKKDWDPKKYGGFDSPTVAYSVLVVAKVEKGKSKKLKSVKELLGITIMERSSFEKNPIDFLEAKGYKEVKKDLIIKLPKYSLFELENGRKRMLASAGELQKGNELALPSKYVNFLYLASHYEKLKGSPEDNEQKQLFVEQHKHYLDEIIEQISEFSKRVILADANLDKVLSAYNKHRDKPIREQAENIIHLFTLTNLGAPAAFKYFDTTIDRKRYTSTKEVLDATLIHQSITGLYETRIDLSQLGGDGAPESATESGGTSTESEGSAGTSTESEGSAGSAGSTSGSSSGMKHMPRKRYSCAFATTTKVEDCRVWAYGYMNIEDHSEYKIGNSLDEFMAWALKVQADLYFHNLKFDGAFIINWLERNGFKWSADGLPNTYNTIISRTGQWYMIDICLGYKGKRKIHTVIYDSLKKLPFPVKKIAKDFKLTVLKGDIDYHKERPVGYKITPEEYAYIKNDIQIIAEALLIQFKQGLDRMTAGSDSLKDFKDIITTKKFKKVFPTLSLGLDKKVRYAYRGGFTWLNDRFKEKEIGEGMVFDVNSLYPAQMYSRLLPYGEPIVFEGKYVWDEDYPLHIQHIRCEFELKEGYIPTIQIKRSRFYKGNEYLKSSGGEIADLWLSNVDLELMKEHYDLYNVEYISGLKFKATTGLFKDFIDKWTYIKTTSEGAIKQLAKLMLNSLYGKFASNPDVTGKVPYLKENGALGFRLGEEETKDPVYTPMGVFITAWARYTTITAAQACYDRIIYCDTDSIHLTGTEIPDVIKDIVDPKKLGYWAHESTFKRAKYLRPKTYIQDIYMKEVDGELVAGSPDDYTDIKLSVKCAGMTDKIKKEVTFENFKVGFSRKMKPKPVQVPGGVVLVDDTFTIKGGGSGKRTADGSGGGSPKKKRKV

SEQ ID NO: 1274 - RNA, 8390 nt, synthetic construct
  misc_feature 1..8390: note = Synthetic
  source 1..8390: mol_type = other RNA
aggactcactatttgttttcgcgcccagttgcaaaaagtgtcgaagctcagaataaacgctcaactttggccggatctgccaccatgggcaagcggcccgccgccaccaagaaggccggccaggccaagaagaagaagtccggctccgagacccccggcacctccgagtccgccacccccgagtccggcaagggcgaccccaagaagccccggggcaagatgtcctcctacgccttcttcgtgcagacctgccgggaggagcacaagaagaagcaccccgacgcctccgtgaacttctccgagttctccaagaagtgctccgagcggtggaagaccatgtccgccaaggagaagggcaagttcgaggacatggccaaggccgacaaggcccggtacgagcgggagatgaagacctacatcccccccaagggcgagaccaagaagaagttcaaggaccccaacgcccccaagcggcccccctccgccttcttcctgttctgctccgagtaccggcccaagatcaagggcgagcaccccggcctgtccatcggcgacgtggccaagaagctgggcgagatgtggaacaacaccgccgccgacgacaagcagccctacgagaagaaggccgccaagctgaaggagaagtacgagaaggacatcgccgcctaccgggccaagggcaagcccgacgccgccaagaagggcgtggtgaaggccgagaagtccaagaagaagaagggcaccaaggactccaccaaggacatccccgagaccccctccaaggacggcaccaaggactccaccaaggacatccccgagaccccctccaaggacgacaagaagtactccatcggcctggacatcggcaccaactccgtgggctgggccgtgatcaccgacgagtacaaggtgccctccaagaagttcaaggtgctgggcaacaccgaccggcactccatcaagaagaacctgatcggcgccctgctgttcgactccggcgagaccgccgaggccacccggctgaagcggaccgcccggcggcggtacacccggcggaagaaccggatctgctacctgcaggagatcttctccaacgagatggccaaggtggacgactccttcttccaccggctggaggagtccttcctggtggaggaggacaagaagcacgagcggcaccccatcttcggcaacatcgtggacgaggtggcctaccacgagaagtaccccaccatctaccacctgcggaagaagctggtggactccaccgacaaggccgacctgcggctgatctacctggccctggcccacatgatcaagttccggggccacttcctgatcgagggcgacctgaaccccgacaactccgacgtggacaagctgttcatccagctggtgcagacctacaaccagctgttcgaggagaaccccatcaacgcctccggcgtggacgccaaggccatcctgtccgcccggctgtccaagtcccggcggctggagaacctgatcgcccagctgcccggcgagaagaagaacggcctgttcggcaacctgatcgccctgtccctgggcctgacccccaacttcaagtccaacttcgacctggccgaggacgccaagctgcagctgtccaaggacacctacgacgacgacctggacaacctgctggcccagatcggcgaccagtacgccgacctgttcctggccgccaagaacctgtccgacgccatcctgctgtccgacatcctgcgggtgaacaccgagatcaccaaggcccccctgtccgcctccatgatcaagcggtacgacgagcaccaccaggacctgaccctgctgaaggccctggtgcggcagcagctgcccgagaagtacaaggagatcttcttcgaccagtccaagaacggctacgccggctacatcgacggcggcgcctcccaggaggagttctacaagttcatcaagcccatcctggagaagatggacggcaccgaggagctgctggtgaagctgaaccgggaggacctgctgcggaagcagcggaccttcgacaacggctccatcccccaccagatccacctgggcgagctgcacgccatcctgcggcggcaggaggacttctaccccttcctgaaggacaaccgggagaagatcgagaagatcctgaccttccggatcccctactacgtgggccccctggcccggggcaactcccggttcgcctggatgacccggaagtccgaggagaccatcaccccctggaacttcgaggaggtggtggacaagggcgcctccgcccagtccttcatcgagcggatgaccaacttcgacaagaacctgcccaacgagaaggtgctgcccaagcactccctgctgtacgagtacttcaccgtgtacaacgagctgaccaaggtgaagtacgtgaccgagggcatgcggaagcccgccttcctgtccggcgagcagaagaaggccatcgtggacctgctgttcaagaccaaccggaaggtgaccgtgaagcagctgaaggaggactacttcaagaagatcgagtgcttcgactccgtggagatctccggcgtggaggaccggttcaacgcctccctgggcacctaccacgacctgctgaagatcatcaaggacaaggacttcctggacaacgaggagaacgaggacatcctggaggacatcgtgctgaccctgaccctgttcgaggaccgggagatgatcgaggagcggctgaagacctacgcccacctgttcgacgacaaggtgatgaagcagctgaagcggcggcggtacaccggctggggccggctgtcccggaagctgatcaacggcatccgggacaagcagtccggcaagaccatcctggacttcctgaagtccgacggcttcgccaaccggaacttcatgcagctgatccacgacgactccctgaccttcaaggaggacatccagaaggcccaggtgtccggccagggcgactccctgcacgagcacatcgccaacctggccggctcccccgccatcaagaagggcatcctgcagaccgtgaaggtggtggacgagctggtgaaggtgatgggccggcacaagcccgagaacatcgtgatcgagatggcccgggagaaccagaccacccagaagggccagaagaactcccgggagcggatgaagcggatcgaggagggcatcaaggagctgggctcccagatcctgaaggagcaccccgtggagaacacccagctgcagaacgagaagctgtacctgtactacctgcagaacggccgggacatgtacgtggaccaggagctggacatcaaccggctgtccgactacgacgtggacgccatcgtgccccagtccttcctgaaggacgactccatcgacaacaaggtgctgacccggtccgacaagaaccggggcaagtccgacaacgtgccctccgaggaggtggtgaagaagatgaagaactactggcggcagctgctgaacgccaagctgatcacccagcggaagttcgacaacctgaccaaggccgagcggggcggcctgtccgagctggacaaggccggcttcatcaagcggcagctggtggagacccggcagatcaccaagcacgtggcccagatcctggactcccggatgaacaccaagtacgacgagaacgacaagctgatccgggaggtgaaggtgatcaccctgaagtccaagctggtgtccgacttccggaaggacttccagttctacaaggtgcgggagatcaacaactaccaccacgcccacgacgcctacctgaacgccgtggtgggcaccgccctgatcaagaagtaccccaagctggagtccgagttcgtgtacggcgactacaaggtgtacgacgtgcggaagatgatcgccaagtccgagcaggagatcggcaaggccaccgccaagtacttcttctactccaacatcatgaacttcttcaagaccgagatcaccctggccaacggcgagatccggaagcggcccctgatcgagaccaacggcgagaccggcgagatcgtgtgggacaagggccgggacttcgccaccgtgcggaaggtgctgtccatgccccaggtgaacatcgtgaagaagaccgaggtgcagaccggcggcttctccaaggagtccatcctgcccaagcggaactccgacaagctgatcgcccggaagaaggactgggaccccaagaagtacggcggcttcgactcccccaccgtggcctactccgtgctggtggtggccaaggtggagaagggcaagtccaagaagctgaagtccgtgaaggagctgctgggcatcaccatcatggagcggtcctccttcgagaagaaccccatcgacttcctggaggccaagggctacaaggaggtgaagaaggacctgatcatcaagctgcccaagtactccctgttcgagctggagaacggccggaagcggatgctggcctccgccggcgagctgcagaagggcaacgagctggccctgccctccaagtacgtgaacttcctgtacctggcctcccactacgagaagctgaagggctcccccgaggacaacgagcagaagcagctgttcgtggagcagcacaagcactacctggacgagatcatcgagcagatctccgagttctccaagcgggtgatcctggccgacgccaacctggacaaggtgctgtccgcctacaacaagcaccgggacaagcccatccgggagcaggccgagaacatcatccacctgttcaccctgaccaacctgggcgcccccgccgccttcaagtacttcgacaccaccatcgaccggaagcggtacacctccaccaaggaggtgctggacgccaccctgatccaccagtccatcaccggcctgtacgagacccggatcgacctgtcccagctgggcggcgacggcgcccccgagtccgccaccgagtccggcggcacctccaccgagtccgagggctccgccggccccaagaagaagcggaaggtgacctccaccgagtccgagggctccgccggctccgccggctccacctccggctcctcctccggcatgaagatcgccgtggtggacaaggccctgaacaacacccggtacgacaagcacttccagctgtacggcgaggaggtggacgtgttccacatgtgcaacgagaagctgtccggccggctgctgaagaagcacatcaccatcggcacccccgagaaccccttcgaccccaacgactacgacttcgtgatcctggtgggcgccgagcccttcctgtacttcgccggcaagaagggcatcggcgactacaccggcaagcgggtggagtacaacggctacgccaactggatcgcctccatctcccccgcccagctgcacttcaagcccgagatgaagcccgtgttcgacgccaccgtggagaacatccacgacatcatcaacggccgggagaagatcgccaaggccggcgactaccggcccatcaccgaccccgacgaggccgaggagtacatcaagatggtgtacaacatggtgatcggccccgtggccttcgcctccgccacctccgccctgtactgccgggacggctacctgctgggcgtgtccatctcccaccaggagtaccagggcgtgtacatcgactccgactgcctgaccgaggtggccgtgtactacctgcagaagatcctggactccgagaaccacaccatcgtgttccacaacctgaagttcgacatgcacttctacaagtaccacctgggcctgaccttcgacaaggcccacaaggagcggcggctgcacgacaccatgctgcagcactacgtgctggacgagcggcggggcacccacggcctgaagtccctggccatgaagtacaccgacatgggcgactacgacttcgagctggacaagttcaaggacgactactgcaaggcccacaagatcaagaaggaggacttcacctacgacctgatccccttcgacatcatgtggccctacgccgccaaggacaccgacgccaccatccggctgcacaacttcttcctgcccaagatcgagaagaacgagaagctgtgctccctgtactacgacgtgctgatgcccggctgcgtgttcctgcagcgggtggaggaccggggcgtgcccatctccatcgaccggctgaaggaggcccagtaccagctgacccacaacctgaacaaggcccgggagaagctgtacacctaccccgaggtgaagcagctggagcaggaccagaacgaggccttcaaccccaactccgtgaagcagctgcgggtgctgctgttcgactacgtgggcctgacccccaccggcaagctgaccgacaccggcgccgactccaccgacgccgaggccctgaacgagctggccacccagcaccccatcgccaagaccctgctggagatccggaagctgaccaagctgatctccacctacgtggagaagatcctgctgtccatcgacgccgacggctgcatccggaccggcttccacgagcacatgaccacctccggccggctgtcctcctccggcaagctgaacctgcagcagctgccccgggacgagtccatcatcaagggctgcgtggtggccccccccggctaccgggtgatcgcctgggacctgaccaccgccgaggtgtactacgccgccgtgctgtccggcgaccggaacatgcagcaggtgttcatcaacatgcggaacgagcccgacaagtaccccgacttccactccaacatcgcccacatggtgttcaagctgcagtgcgagccccgggacgtgaagaagctgttccccgccctgcggcaggccgccaaggccatcaccttcggcatcctgtacggctccggccccgccaaggtggcccactccgtgaacgaggccctgctggagcaggccgccaagaccggcgagcccttcgtggagtgcaccgtggccgacgccaaggagtacatcgagacctacttcggccagttcccccagctgaagcggtggatcgacaagtgccacgaccagatcaagaaccacggcttcatctactcccacttcggccggaagcggcggctgcacaacatccactccgaggaccggggcgtgcagggcgaggagatccggtccggcttcaacgccatcatccagtccgcctcctccgactccctgctgctgggcgccgtggacgccgacaacgagatcatctccctgggcctggagcaggagatgaagatcgtgatgctggtgcacgactccgtggtggccatcgtgcgggaggacctgatcgaccagtacaacgagatcctgatccggaacatccagaaggaccggggcatctccatccccggctgccccatcggcatcgactccgactccgaggccggcggctcccgggactactcctgcggcaagatgaagaagcagcacccctccatcgcctgcatcgacgacgacgagtacacccggtacgtgaagggcgtgctgctggacgccgagttcgagtacaagaagctggccgccatggacaaggagcaccccgaccactccaagtacaaggacgacaagttcatcgccgtgtgcaaggacctggacaacgtgaagcggatcctgggcgcctccggctccgagacccccggcacctccgagtccgccacccccgagtcccccaagaagaagcggaaggtgcctgccgctaagagagtgaagctggactccggctccgagacccccggcacctccgagtccgccacccccgagtccatcgccgccctggagaaggagatcgccgccctggagaaggagaacgccgccctggagtgggagatcgccgccctggagaagtagctagcaccagcctcaagaacacccgaatggagtctctaagctacataataccaacttacactttacaaaatgttgtcccccaaaatgtagccattcgtatctgctcctaataaaaagaaagtttcttcacattctctcgagaaaaaaaaaaaatggaaaaaaaaaaaacggaaaaaaaaaaaaggtaaaaaaaaaaaatataaaaaaaaaaaacataaaaaaaaaaaacgaaaaaaaaaaaacgtaaaaaaaaaaaactcaaaaaaaaaaaagataaaaaaaaaaaacctaaaaaaaaaaaatgtaaaaaaaaaaaagggaaaaaaaaaaaacgcaaaaaaaaaaaacacaaaaaaaaaaaatgcaaaaaaaaaaaatcgaaaaaaaaaaaatctaaaaaaaaaaaacgaaaaaaaaaaaacccaaaaaaaaaaaagacaaaaaaaaaaaatagaaaaaaaaaaagttaaaaaaaaaaaactgaaaaaaaaaaaatttaaaaaaaaaaaatctag

SEQ ID NO: 1275 - DNA, 7791 bp, synthetic construct
  misc_feature 1..7791: note = Synthetic
  source 1..7791: mol_type = other DNA
atgggcaagcggcccgccgccaccaagaaggccggccaggccaagaagaagaagtccggctccgagacccccggcacctccgagtccgccacccccgagtccggcaagggcgaccccaagaagccccggggcaagatgtcctcctacgccttcttcgtgcagacctgccgggaggagcacaagaagaagcaccccgacgcctccgtgaacttctccgagttctccaagaagtgctccgagcggtggaagaccatgtccgccaaggagaagggcaagttcgaggacatggccaaggccgacaaggcccggtacgagcgggagatgaagacctacatcccccccaagggcgagaccaagaagaagttcaaggaccccaacgcccccaagcggcccccctccgccttcttcctgttctgctccgagtaccggcccaagatcaagggcgagcaccccggcctgtccatcggcgacgtggccaagaagctgggcgagatgtggaacaacaccgccgccgacgacaagcagccctacgagaagaaggccgccaagctgaaggagaagtacgagaaggacatcgccgcctaccgggccaagggcaagcccgacgccgccaagaagggcgtggtgaaggccgagaagtccaagaagaagaagggcaccaaggactccaccaaggacatccccgagaccccctccaaggacggcaccaaggactccaccaaggacatccccgagaccccctccaaggacgacaagaagtactccatcggcctggacatcggcaccaactccgtgggctgggccgtgatcaccgacgagtacaaggtgccctccaagaagttcaaggtgctgggcaacaccgaccggcactccatcaagaagaacctgatcggcgccctgctgttcgactccggcgagaccgccgaggccacccggctgaagcggaccgcccggcggcggtacacccggcggaagaaccggatctgctacctgcaggagatcttctccaacgagatggccaaggtggacgactccttcttccaccggctggaggagtccttcctggtggaggaggacaagaagcacgagcggcaccccatcttcggcaacatcgtggacgaggtggcctaccacgagaagtaccccaccatctaccacctgcggaagaagctggtggactccaccgacaaggccgacctgcggctgatctacctggccctggcccacatgatcaagttccggggccacttcctgatcgagggcgacctgaaccccgacaactccgacgtggacaagctgttcatccagctggtgcagacctacaaccagctgttcgaggagaaccccatcaacgcctccggcgtggacgccaaggccatcctgtccgcccggctgtccaagtcccggcggctggagaacctgatcgcccagctgcccggcgagaagaagaacggcctgttcggcaacctgatcgccctgtccctgggcctgacccccaacttcaagtccaacttcgacctggccgaggacgccaagctgcagctgtccaaggacacctacgacgacgacctggacaacctgctggcccagatcggcgaccagtacgccgacctgttcctggccgccaagaacctgtccgacgccatcctgctgtccgacatcctgcgggtgaacaccgagatcaccaaggcccccctgtccgcctccatgatcaagcggtacgacgagcaccaccaggacctgaccctgctgaaggccctggtgcggcagcagctgcccgagaagtacaaggagatcttcttcgaccagtccaagaacggctacgccggctacatcgacggcggcgcctcccaggaggagttctacaagttcatcaagcccatcctggagaagatggacggcaccgaggagctgctggtgaagctgaaccgggaggacctgctgcggaagcagcggaccttcgacaacggctccatcccccaccagatccacctgggcgagctgcacgccatcctgcggcggcaggaggacttctaccccttcctgaaggacaaccgggagaagatcgagaagatcctgaccttccggatcccctactacgtgggccccctggcccggggcaactcccggttcgcctggatgacccggaagtccgaggagaccatcaccccctggaacttcgaggaggtggtggacaagggcgcctccgcccagtccttcatcgagcggatgaccaacttcgacaagaacctgcccaacgagaaggtgctgcccaagcactccctgctgtacgagtacttcaccgtgtacaacgagctgaccaaggtgaagtacgtgaccgagggcatgcggaagcccgccttcctgtccggcgagcagaagaaggccatcgtggacctgctgttcaagaccaaccggaaggtgaccgtgaagcagctgaaggaggactacttcaagaagatcgagtgcttcgactccgtggagatctccggcgtggaggaccggttcaacgcctccctgggcacctaccacgacctgctgaagatcatcaaggacaaggacttcctggacaacgaggagaacgaggacatcctggaggacatcgtgctgaccctgaccctgttcgaggaccgggagatgatcgaggagcggctgaagacctacgcccacctgttcgacgacaaggtgatgaagcagctgaagcggcggcggtacaccggctggggccggctgtcccggaagctgatcaacggcatccgggacaagcagtccggcaagaccatcctggacttcctgaagtccgacggcttcgccaaccggaacttcatgcagctgatccacgacgactccctgaccttcaaggaggacatccagaaggcccaggtgtccggccagggcgactccctgcacgagcacatcgccaacctggccggctcccccgccatcaagaagggcatcctgcagaccgtgaaggtggtggacgagctggtgaaggtgatgggccggcacaagcccgagaacatcgtgatcgagatggcccgggagaaccagaccacccagaagggccagaagaactcccgggagcggatgaagcggatcgaggagggcatcaaggagctgggctcccagatcctgaaggagcaccccgtggagaacacccagctgcagaacgagaagctgtacctgtactacctgcagaacggccgggacatgtacgtggaccaggagctggacatcaaccggctgtccgactacgacgtggacgccatcgtgccccagtccttcctgaaggacgactccatcgacaacaaggtgctgacccggtccgacaagaaccggggcaagtccgacaacgtgccctccgaggaggtggtgaagaagatgaagaactactggcggcagctgctgaacgccaagctgatcacccagcggaagttcgacaacctgaccaaggccgagcggggcggcctgtccgagctggacaaggccggcttcatcaagcggcagctggtggagacccggcagatcaccaagcacgtggcccagatcctggactcccggatgaacaccaagtacgacgagaacgacaagctgatccgggaggtgaaggtgatcaccctgaagtccaagctggtgtccgacttccggaaggacttccagttctacaaggtgcgggagatcaacaactaccaccacgcccacgacgcctacctgaacgccgtggtgggcaccgccctgatcaagaagtaccccaagctggagtccgagttcgtgtacggcgactacaaggtgtacgacgtgcggaagatgatcgccaagtccgagcaggagatcggcaaggccaccgccaagtacttcttctactccaacatcatgaacttcttcaagaccgagatcaccctggccaacggcgagatccggaagcggcccctgatcgagaccaacggcgagaccggcgagatcgtgtgggacaagggccgggacttcgccaccgtgcggaaggtgctgtccatgccccaggtgaacatcgtgaagaagaccgaggtgcagaccggcggcttctccaaggagtccatcctgcccaagcggaactccgacaagctgatcgcccggaagaaggactgggaccccaagaagtacggcggcttcgactcccccaccgtggcctactccgtgctggtggtggccaaggtggagaagggcaagtccaagaagctgaagtccgtgaaggagctgctgggcatcaccatcatggagcggtcctccttcgagaagaaccccatcgacttcctggaggccaagggctacaaggaggtgaagaaggacctgatcatcaagctgcccaagtactccctgttcgagctggagaacggccggaagcggatgctggcctccgccggcgagctgcagaagggcaacgagctggccctgccctccaagtacgtgaacttcctgtacctggcctcccactacgagaagctgaagggctcccccgaggacaacgagcagaagcagctgttcgtggagcagcacaagcactacctggacgagatcatcgagcagatctccgagttctccaagcgggtgatcctggccgacgccaacctggacaaggtgctgtccgcctacaacaagcaccgggacaagcccatccgggagcaggccgagaacatcatccacctgttcaccctgaccaacctgggcgcccccgccgccttcaagtacttcgacaccaccatcgaccggaagcggtacacctccaccaaggaggtgctggacgccaccctgatccaccagtccatcaccggcctgtacgagacccggatcgacctgtcccagctgggcggcgacggcgcccccgagtccgccaccgagtccggcggcacctccaccgagtccgagggctccgccggccccaagaagaagcggaaggtgacctccaccgagtccgagggctccgccggctccgccggctccacctccggctcctcctccggcatgaagatcgccgtggtggacaaggccctgaacaacacccggtacgacaagcacttccagctgtacggcgaggaggtggacgtgttccacatgtgcaacgagaagctgtccggccggctgctgaagaagcacatcaccatcggcacccccgagaaccccttcgaccccaacgactacgacttcgtgatcctggtgggcgccgagcccttcctgtacttcgccggcaagaagggcatcggcgactacaccggcaagcgggtggagtacaacggctacgccaactggatcgcctccatctcccccgcccagctgcacttcaagcccgagatgaagcccgtgttcgacgccaccgtggagaacatccacgacatcatcaacggccgggagaagatcgccaaggccggcgactaccggcccatcaccgaccccgacgaggccgaggagtacatcaagatggtgtacaacatggtgatcggccccgtggccttcgcctccgccacctccgccctgtactgccgggacggctacctgctgggcgtgtccatctcccaccaggagtaccagggcgtgtacatcgactccgactgcctgaccgaggtggccgtgtactacctgcagaagatcctggactccgagaaccacaccatcgtgttccacaacctgaagttcgacatgcacttctacaagtaccacctgggcctgaccttcgacaaggcccacaaggagcggcggctgcacgacaccatgctgcagcactacgtgctggacgagcggcggggcacccacggcctgaagtccctggccatgaagtacaccgacatgggcgactacgacttcgagctggacaagttcaaggacgactactgcaaggcccacaagatcaagaaggaggacttcacctacgacctgatccccttcgacatcatgtggccctacgccgccaaggacaccgacgccaccatccggctgcacaacttcttcctgcccaagatcgagaagaacgagaagctgtgctccctgtactacgacgtgctgatgcccggctgcgtgttcctgcagcgggtggaggaccggggcgtgcccatctccatcgaccggctgaaggaggcccagtaccagctgacccacaacctgaacaaggcccgggagaagctgtacacctaccccgaggtgaagcagctggagcaggaccagaacgaggccttcaaccccaactccgtgaagcagctgcgggtgctgctgttcgactacgtgggcctgacccccaccggcaagctgaccgacaccggcgccgactccaccgacgccgaggccctgaacgagctggccacccagcaccccatcgccaagaccctgctggagatccggaagctgaccaagctgatctccacctacgtggagaagatcctgctgtccatcgacgccgacggctgcatccggaccggcttccacgagcacatgaccacctccggccggctgtcctcctccggcaagctgaacctgcagcagctgccccgggacgagtccatcatcaagggctgcgtggtggccccccccggctaccgggtgatcgcctgggacctgaccaccgccgaggtgtactacgccgccgtgctgtccggcgaccggaacatgcagcaggtgttcatcaacatgcggaacgagcccgacaagtaccccgacttccactccaacatcgcccacatggtgttcaagctgcagtgcgagccccgggacgtgaagaagctgttccccgccctgcggcaggccgccaaggccatcaccttcggcatcctgtacggctccggccccgccaaggtggcccactccgtgaacgaggccctgctggagcaggccgccaagaccggcgagcccttcgtggagtgcaccgtggccgacgccaaggagtacatcgagacctacttcggccagttcccccagctgaagcggtggatcgacaagtgccacgaccagatcaagaaccacggcttcatctactcccacttcggccggaagcggcggctgcacaacatccactccgaggaccggggcgtgcagggcgaggagatccggtccggcttcaacgccatcatccagtccgcctcctccgactccctgctgctgggcgccgtggacgccgacaacgagatcatctccctgggcctggagcaggagatgaagatcgtgatgctggtgcacgactccgtggtggccatcgtgcgggaggacctgatcgaccagtacaacgagatcctgatccggaacatccagaaggaccggggcatctccatccccggctgccccatcggcatcgactccgactccgaggccggcggctcccgggactactcctgcggcaagatgaagaagcagcacccctccatcgcctgcatcgacgacgacgagtacacccggtacgtgaagggcgtgctgctggacgccgagttcgagtacaagaagctggccgccatggacaaggagcaccccgaccactccaagtacaaggacgacaagttcatcgccgtgtgcaaggacctggacaacgtgaagcggatcctgggcgcctccggctccgagacccccggcacctccgagtccgccacccccgagtcccccaagaagaagcggaaggtgcctgccgctaagagagtgaagctggactccggctccgagacccccggcacctccgagtccgccacccccgagtccatcgccgccctggagaaggagatcgccgccctggagaaggagaacgccgccctggagtgggagatcgccgccctggagaagtag

SEQ ID NO: 1276 - protein, 2596 aa, synthetic construct
  REGION 1..2596: note = Synthetic
MGKRPAATKKAGQAKKKKSGSETPGTSESATPESGKGDPKKPRGKMSSYAFFVQTCREEHKKKHPDASVNFSEFSKKCSERWKTMSAKEKGKFEDMAKADKARYEREMKTYIPPKGETKKKFKDPNAPKRPPSAFFLFCSEYRPKIKGEHPGLSIGDVAKKLGEMWNNTAADDKQPYEKKAAKLKEKYEKDIAAYRAKGKPDAAKKGVVKAEKSKKKKGTKDSTKDIPETPSKDGTKDSTKDIPETPSKDDKKYSIGLDIGTNSVGWAVITDEYKVPSKKFKVLGNTDRHSIKKNLIGALLFDSGETAEATRLKRTARRRYTRRKNRICYLQEIFSNEMAKVDDSFFHRLEESFLVEEDKKHERHPIFGNIVDEVAYHEKYPTIYHLRKKLVDSTDKADLRLIYLALAHMIKFRGHFLIEGDLNPDNSDVDKLFIQLVQTYNQLFEENPINASGVDAKAILSARLSKSRRLENLIAQLPGEKKNGLFGNLIALSLGLTPNFKSNFDLAEDAKLQLSKDTYDDDLDNLLAQIGDQYADLFLAAKNLSDAILLSDILRVNTEITKAPLSASMIKRYDEHHQDLTLLKALVRQQLPEKYKEIFFDQSKNGYAGYIDGGASQEEFYKFIKPILEKMDGTEELLVKLNREDLLRKQRTFDNGSIPHQIHLGELHAILRRQEDFYPFLKDNREKIEKILTFRIPYYVGPLARGNSRFAWMTRKSEETITPWNFEEVVDKGASAQSFIERMTNFDKNLPNEKVLPKHSLLYEYFTVYNELTKVKYVTEGMRKPAFLSGEQKKAIVDLLFKTNRKVTVKQLKEDYFKKIECFDSVEISGVEDRFNASLGTYHDLLKIIKDKDFLDNEENEDILEDIVLTLTLFEDREMIEERLKTYAHLFDDKVMKQLKRRRYTGWGRLSRKLINGIRDKQSGKTILDFLKSDGFANRNFMQLIHDDSLTFKEDIQKAQVSGQGDSLHEHIANLAGSPAIKKGILQTVKVVDELVKVMGRHKPENIVIEMARENQTTQKGQKNSRERMKRIEEGIKELGSQILKEHPVENTQLQNEKLYLYYLQNGRDMYVDQELDINRLSDYDVDAIVPQSFLKDDSIDNKVLTRSDKNRGKSDNVPSEEVVKKMKNYWRQLLNAKLITQRKFDNLTKAERGGLSELDKAGFIKRQLVETRQITKHVAQILDSRMNTKYDENDKLIREVKVITLKSKLVSDFRKDFQFYKVREINNYHHAHDAYLNAVVGTALIKKYPKLESEFVYGDYKVYDVRKMIAKSEQEIGKATAKYFFYSNIMNFFKTEITLANGEIRKRPLIETNGETGEIVWDKGRDFATVRKVLSMPQVNIVKKTEVQTGGFSKESILPKRNSDKLIARKKDWDPKKYGGFDSPTVAYSVLVVAKVEKGKSKKLKSVKELLGITIMERSSFEKNPIDFLEAKGYKEVKKDLIIKLPKYSLFELENGRKRMLASAGELQKGNELALPSKYVNFLYLASHYEKLKGSPEDNEQKQLFVEQHKHYLDEIIEQISEFSKRVILADANLDKVLSAYNKHRDKPIREQAENIIHLFTLTNLGAPAAFKYFDTTIDRKRYTSTKEVLDATLIHQSITGLYETRIDLSQLGGDGAPESATESGGTSTESEGSAGPKKKRKVTSTESEGSAGSAGSTSGSSSGMKIAVVDKALNNTRYDKHFQLYGEEVDVFHMCNEKLSGRLLKKHITIGTPENPFDPNDYDFVILVGAEPFLYFAGKKGIGDYTGKRVEYNGYANWIASISPAQLHFKPEMKPVFDATVENIHDIINGREKIAKAGDYRPITDPDEAEEYIKMVYNMVIGPVAFASATSALYCRDGYLLGVSISHQEYQGVYIDSDCLTEVAVYYLQKILDSENHTIVFHNLKFDMHFYKYHLGLTFDKAHKERRLHDTMLQHYVLDERRGTHGLKSLAMKYTDMGDYDFELDKFKDDYCKAHKIKKEDFTYDLIPFDIMWPYAAKDTDATIRLHNFFLPKIEKNEKLCSLYYDVLMPGCVFLQRVEDRGVPISIDRLKEAQYQLTHNLNKAREKLYTYPEVKQLEQDQNEAFNPNSVKQLRVLLFDYVGLTPTGKLTDTGADSTDAEALNELATQHPIAKTLLEIRKLTKLISTYVEKILLSIDADGCIRTGFHEHMTTSGRLSSSGKLNLQQLPRDESIIKGCVVAPPGYRVIAWDLTTAEVYYAAVLSGDRNMQQVFINMRNEPDKYPDFHSNIAHMVFKLQCEPRDVKKLFPALRQAAKAITFGILYGSGPAKVAHSVNEALLEQAAKTGEPFVECTVADAKEYIETYFGQFPQLKRWIDKCHDQIKNHGFIYSHFGRKRRLHNIHSEDRGVQGEEIRSGFNAIIQSASSDSLLLGAVDADNEIISLGLEQEMKIVMLVHDSVVAIVREDLIDQYNEILIRNIQKDRGISIPGCPIGIDSDSEAGGSRDYSCGKMKKQHPSIACIDDDEYTRYVKGVLLDAEFEYKKLAAMDKEHPDHSKYKDDKFIAVCKDLDNVKRILGASGSETPGTSESATPESPKKKRKVPAAKRVKLDSGSETPGTSESATPESIAALEKEIAALEKENAALEWEIAALEK

SEQ ID NO: 1277 - RNA, 5492 nt, synthetic construct
  misc_feature 1..5492: note = Synthetic
  source 1..5492: mol_type = other RNA
aggactcactatttgttttcgcgcccagttgcaaaaagtgtcgaagctcagaataaacgctcaactttggccggatctgccaccatgggcaagcggcccgccgccaccaagaaggccggccaggccaagaagaagaaggacaagaagtactccatcggcctggacatcggcaccaactccgtgggctgggccgtgatcaccgacgagtacaaggtgccctccaagaagttcaaggtgctgggcaacaccgaccggcactccatcaagaagaacctgatcggcgccctgctgttcgactccggcgagaccgccgaggccacccggctgaagcggaccgcccggcggcggtacacccggcggaagaaccggatctgctacctgcaggagatcttctccaacgagatggccaaggtggacgactccttcttccaccggctggaggagtccttcctggtggaggaggacaagaagcacgagcggcaccccatcttcggcaacatcgtggacgaggtggcctaccacgagaagtaccccaccatctaccacctgcggaagaagctggtggactccaccgacaaggccgacctgcggctgatctacctggccctggcccacatgatcaagttccggggccacttcctgatcgagggcgacctgaaccccgacaactccgacgtggacaagctgttcatccagctggtgcagacctacaaccagctgttcgaggagaaccccatcaacgcctccggcgtggacgccaaggccatcctgtccgcccggctgtccaagtcccggcggctggagaacctgatcgcccagctgcccggcgagaagaagaacggcctgttcggcaacctgatcgccctgtccctgggcctgacccccaacttcaagtccaacttcgacctggccgaggacgccaagctgcagctgtccaaggacacctacgacgacgacctggacaacctgctggcccagatcggcgaccagtacgccgacctgttcctggccgccaagaacctgtccgacgccatcctgctgtccgacatcctgcgggtgaacaccgagatcaccaaggcccccctgtccgcctccatgatcaagcggtacgacgagcaccaccaggacctgaccctgctgaaggccctggtgcggcagcagctgcccgagaagtacaaggagatcttcttcgaccagtccaagaacggctacgccggctacatcgacggcggcgcctcccaggaggagttctacaagttcatcaagcccatcctggagaagatggacggcaccgaggagctgctggtgaagctgaaccgggaggacctgctgcggaagcagcggaccttcgacaacggctccatcccccaccagatccacctgggcgagctgcacgccatcctgcggcggcaggaggacttctaccccttcctgaaggacaaccgggagaagatcgagaagatcctgaccttccggatcccctactacgtgggccccctggcccggggcaactcccggttcgcctggatgacccggaagtccgaggagaccatcaccccctggaacttcgaggaggtggtggacaagggcgcctccgcccagtccttcatcgagcggatgaccaacttcgacaagaacctgcccaacgagaaggtgctgcccaagcactccctgctgtacgagtacttcaccgtgtacaacgagctgaccaaggtgaagtacgtgaccgagggcatgcggaagcccgccttcctgtccggcgagcagaagaaggccatcgtggacctgctgttcaagaccaaccggaaggtgaccgtgaagcagctgaaggaggactacttcaagaagatcgagtgcttcgactccgtggagatctccggcgtggaggaccggttcaacgcctccctgggcacctaccacgacctgctgaagatcatcaaggacaaggacttcctggacaacgaggagaacgaggacatcctggaggacatcgtgctgaccctgaccctgttcgaggaccgggagatgatcgaggagcggctgaagacctacgcccacctgttcgacgacaaggtgatgaagcagctgaagcggcggcggtacaccggctggggccggctgtcccggaagctgatcaacggcatccgggacaagcagtccggcaagaccatcctggacttcctgaagtccgacggcttcgccaaccggaacttcatgcagctgatccacgacgactccctgaccttcaaggaggacatccagaaggcccaggtgtccggccagggcgactccctgcacgagcacatcgccaacctggccggctcccccgccatcaagaagggcatcctgcagaccgtgaaggtggtggacgagctggtgaaggtgatgggccggcacaagcccgagaacatcgtgatcgagatggcccgggagaaccagaccacccagaagggccagaagaactcccgggagcggatgaagcggatcgaggagggcatcaaggagctgggctcccagatcctgaaggagcaccccgtggagaacacccagctgcagaacgagaagctgtacctgtactacctgcagaacggccgggacatgtacgtggaccaggagctggacatcaaccggctgtccgactacgacgtggacgccatcgtgccccagtccttcctgaaggacgactccatcgacaacaaggtgctgacccggtccgacaagaaccggggcaagtccgacaacgtgccctccgaggaggtggtgaagaagatgaagaactactggcggcagctgctgaacgccaagctgatcacccagcggaagttcgacaacctgaccaaggccgagcggggcggcctgtccgagctggacaaggccggcttcatcaagcggcagctggtggagacccggcagatcaccaagcacgtggcccagatcctggactcccggatgaacaccaagtacgacgagaacgacaagctgatccgggaggtgaaggtgatcaccctgaagtccaagctggtgtccgacttccggaaggacttccagttctacaaggtgcgggagatcaacaactaccaccacgcccacgacgcctacctgaacgccgtggtgggcaccgccctgatcaagaagtaccccaagctggagtccgagttcgtgtacggcgactacaaggtgtacgacgtgcggaagatgatcgccaagtccgagcaggagatcggcaaggccaccgccaagtacttcttctactccaacatcatgaacttcttcaagaccgagatcaccctggccaacggcgagatccggaagcggcccctgatcgagaccaacggcgagaccggcgagatcgtgtgggacaagggccgggacttcgccaccgtgcggaaggtgctgtccatgccccaggtgaacatcgtgaagaagaccgaggtgcagaccggcggcttctccaaggagtccatcctgcccaagcggaactccgacaagctgatcgcccggaagaaggactgggaccccaagaagtacggcggcttcgactcccccaccgtggcctactccgtgctggtggtggccaaggtggagaagggcaagtccaagaagctgaagtccgtgaaggagctgctgggcatcaccatcatggagcggtcctccttcgagaagaaccccatcgacttcctggaggccaagggctacaaggaggtgaagaaggacctgatcatcaagctgcccaagtactccctgttcgagctggagaacggccggaagcggatgctggcctccgccggcgagctgcagaagggcaacgagctggccctgccctccaagtacgtgaacttcctgtacctggcctcccactacgagaagctgaagggctcccccgaggacaacgagcagaagcagctgttcgtggagcagcacaagcactacctggacgagatcatcgagcagatctccgagttctccaagcgggtgatcctggccgacgccaacctggacaaggtgctgtccgcctacaacaagcaccgggacaagcccatccgggagcaggccgagaacatcatccacctgttcaccctgaccaacctgggcgcccccgccgccttcaagtacttcgacaccaccatcgaccggaagcggtacacctccaccaaggaggtgctggacgccaccctgatccaccagtccatcaccggcctgtacgagacccggatcgacctgtcccagctgggcggcgactccggcggctcccggggcaagtgcctgtcctacgacaccgagatcctgaccgtggagtacggcttcctgcccatcggcaagatcgtggaggagcggatcgagtgcaccgtgtacaccgtggacaagaacggcttcgtgtacacccagcccatcgcccagtggcacaaccgcggcgagcaggaggtgttcgagtactgcctggaggacggctccatcatccgcgccaccaaggaccacaagttcatgaccaccgacggccagatgctgcccatcgacgagatcttcgagcgcggcctggacctgaagcaggtggacggcctgcccggctccggcgagggccggggctccctgctgacctgcggcgacgtggaggagaaccccggccccatggccgccgccatgaccgacccccgggagaccgtgccccccggcaactccggcgaggagaccatcggcgaggccttcgcctggctgaaccggaccgtggaggccatcaaccgggaggccgtgaaccacctgccccgggagctgatcttccaggtgtggcagcggtcctggcggtactggcacgacgagcagggcatgtccgagtcctacaccaagtaccggtacctgtgcatcatccagaaggccgtgtacatgcacgtgcggaagggctgcacctgcctgggccggggccacggccccggcggctggcggcccggccccccccctccccccccacccggcctggtgtagctagcaccagcctcaagaacacccgaatggagtctctaagctacataataccaacttacactttacaaaatgttgtcccccaaaatgtagccattcgtatctgctcctaataaaaagaaagtttcttcacattctctcgagaaaaaaaaaaaatggaaaaaaaaaaaacggaaaaaaaaaaaaggtaaaaaaaaaaaatataaaaaaaaaaaacataaaaaaaaaaaacgaaaaaaaaaaaacgtaaaaaaaaaaaactcaaaaaaaaaaaagataaaaaaaaaaaacctaaaaaaaaaaaatgtaaaaaaaaaaaagggaaaaaaaaaaaacgcaaaaaaaaaaaacacaaaaaaaaaaaatgcaaaaaaaaaaaatcgaaaaaaaaaaaatctaaaaaaaaaaaacgaaaaaaaaaaaacccaaaaaaaaaaaagacaaaaaaaaaaaatagaaaaaaaaaaagttaaaaaaaaaaaactgaaaaaaaaaaaatttaaaaaaaaaaaatctag

SEQ ID NO: 1278 - DNA, 4893 bp, synthetic construct
  misc_feature 1..4893: note = Synthetic
  source 1..4893: mol_type = other DNA
atgggcaagcggcccgccgccaccaagaaggccggccaggccaagaagaagaaggacaagaagtactccatcggcctggacatcggcaccaactccgtgggctgggccgtgatcaccgacgagtacaaggtgccctccaagaagttcaaggtgctgggcaacaccgaccggcactccatcaagaagaacctgatcggcgccctgctgttcgactccggcgagaccgccgaggccacccggctgaagcggaccgcccggcggcggtacacccggcggaagaaccggatctgctacctgcaggagatcttctccaacgagatggccaaggtggacgactccttcttccaccggctggaggagtccttcctggtggaggaggacaagaagcacgagcggcaccccatcttcggcaacatcgtggacgaggtggcctaccacgagaagtaccccaccatctaccacctgcggaagaagctggtggactccaccgacaaggccgacctgcggctgatctacctggccctggcccacatgatcaagttccggggccacttcctgatcgagggcgacctgaaccccgacaactccgacgtggacaagctgttcatccagctggtgcagacctacaaccagctgttcgaggagaaccccatcaacgcctccggcgtggacgccaaggccatcctgtccgcccggctgtccaagtcccggcggctggagaacctgatcgcccagctgcccggcgagaagaagaacggcctgttcggcaacctgatcgccctgtccctgggcctgacccccaacttcaagtccaacttcgacctggccgaggacgccaagctgcagctgtccaaggacacctacgacgacgacctggacaacctgctggcccagatcggcgaccagtacgccgacctgttcctggccgccaagaacctgtccgacgccatcctgctgtccgacatcctgcgggtgaacaccgagatcaccaaggcccccctgtccgcctccatgatcaagcggtacgacgagcaccaccaggacctgaccctgctgaaggccctggtgcggcagcagctgcccgagaagtacaaggagatcttcttcgaccagtccaagaacggctacgccggctacatcgacggcggcgcctcccaggaggagttctacaagttcatcaagcccatcctggagaagatggacggcaccgaggagctgctggtgaagctgaaccgggaggacctgctgcggaagcagcggaccttcgacaacggctccatcccccaccagatccacctgggcgagctgcacgccatcctgcggcggcaggaggacttctaccccttcctgaaggacaaccgggagaagatcgagaagatcctgaccttccggatcccctactacgtgggccccctggcccggggcaactcccggttcgcctggatgacccggaagtccgaggagaccatcaccccctggaacttcgaggaggtggtggacaagggcgcctccgcccagtccttcatcgagcggatgaccaacttcgacaagaacctgcccaacgagaaggtgctgcccaagcactccctgctgtacgagtacttcaccgtgtacaacgagctgaccaaggtgaagtacgtgaccgagggcatgcggaagcccgccttcctgtccggcgagcagaagaaggccatcgtggacctgctgttcaagaccaaccggaaggtgaccgtgaagcagctgaaggaggactacttcaagaagatcgagtgcttcgactccgtggagatctccggcgtggaggaccggttcaacgcctccctgggcacctaccacgacctgctgaagatcatcaaggacaaggacttcctggacaacgaggagaacgaggacatcctggaggacatcgtgctgaccctgaccctgttcgaggaccgggagatgatcgaggagcggctgaagacctacgcccacctgttcgacgacaaggtgatgaagcagctgaagcggcggcggtacaccggctggggccggctgtcccggaagctgatcaacggcatccgggacaagcagtccggcaagaccatcctggacttcctgaagtccgacggcttcgccaaccggaacttcatgcagctgatccacgacgactccctgaccttcaaggaggacatccagaaggcccaggtgtccggccagggcgactccctgcacgagcacatcgccaacctggccggctcccccgccatcaagaagggcatcctgcagaccgtgaaggtggtggacgagctggtgaaggtgatgggccggcacaagcccgagaacatcgtgatcgagatggcccgggagaaccagaccacccagaagggccagaagaactcccgggagcggatgaagcggatcgaggagggcatcaaggagctgggctcccagatcctgaaggagcaccccgtggagaacacccagctgcagaacgagaagctgtacctgtactacctgcagaacggccgggacatgtacgtggaccaggagctggacatcaaccggctgtccgactacgacgtggacgccatcgtgccccagtccttcctgaaggacgactccatcgacaacaaggtgctgacccggtccgacaagaaccggggcaagtccgacaacgtgccctccgaggaggtggtgaagaagatgaagaactactggcggcagctgctgaacgccaagctgatcacccagcggaagttcgacaacctgaccaaggccgagcggggcggcctgtccgagctggacaaggccggcttcatcaagcggcagctggtggagacccggcagatcaccaagcacgtggcccagatcctggactcccggatgaacaccaagtacgacgagaacgacaagctgatccgggaggtgaaggtgatcaccctgaagtccaagctggtgtccgacttccggaaggacttccagttctacaaggtgcgggagatcaacaactaccaccacgcccacgacgcctacctgaacgccgtggtgggcaccgccctgatcaagaagtaccccaagctggagtccgagttcgtgtacggcgactacaaggtgtacgacgtgcggaagatgatcgccaagtccgagcaggagatcggcaaggccaccgccaagtacttcttctactccaacatcatgaacttcttcaagaccgagatcaccctggccaacggcgagatccggaagcggcccctgatcgagaccaacggcgagaccggcgagatcgtgtgggacaagggccgggacttcgccaccgtgcggaaggtgctgtccatgccccaggtgaacatcgtgaagaagaccgaggtgcagaccggcggcttctccaaggagtccatcctgcccaagcggaactccgacaagctgatcgcccggaagaaggactgggaccccaagaagtacggcggcttcgactcccccaccgtggcctactccgtgctggtggtggccaaggtggagaagggcaagtccaagaagctgaagtccgtgaaggagctgctgggcatcaccatcatggagcggtcctccttcgagaagaaccccatcgacttcctggaggccaagggctacaaggaggtgaagaaggacctgatcatcaagctgcccaagtactccctgttcgagctggagaacggccggaagcggatgctggcctccgccggcgagctgcagaagggcaacgagctggccctgccctccaagtacgtgaacttcctgtacctggcctcccactacgagaagctgaagggctcccccgaggacaacgagcagaagcagctgttcgtggagcagcacaagcactacctggacgagatcatcgagcagatctccgagttctccaagcgggtgatcctggccgacgccaacctggacaaggtgctgtccgcctacaacaagcaccgggacaagcccatccgggagcaggccgagaacatcatccacctgttcaccctgaccaacctgggcgcccccgccgccttcaagtacttcgacaccaccatcgaccggaagcggtacacctccaccaaggaggtgctggacgccaccctgatccaccagtccatcaccggcctgtacgagacccggatcgacctgtcccagctgggcggcgactccggcggctcccggggcaagtgcctgtcctacgacaccgagatcctgaccgtggagtacggcttcctgcccatcggcaagatcgtggaggagcggatcgagtgcaccgtgtacaccgtggacaagaacggcttcgtgtacacccagcccatcgcccagtggcacaaccgcggcgagcaggaggtgttcgagtactgcctggaggacggctccatcatccgcgccaccaaggaccacaagttcatgaccaccgacggccagatgctgcccatcgacgagatcttcgagcgcggcctggacctgaagcaggtggacggcctgcccggctccggcgagggccggggctccctgctgacctgcggcgacgtggaggagaaccccggccccatggccgccgccatgaccgacccccgggagaccgtgccccccggcaactccggcgaggagaccatcggcgaggccttcgcctggctgaaccggaccgtggaggccatcaaccgggaggccgtgaaccacctgccccgggagctgatcttccaggtgtggcagcggtcctggcggtactggcacgacgagcagggcatgtccgagtcctacaccaagtaccggtacctgtgcatcatccagaaggccgtgtacatgcacgtgcggaagggctgcacctgcctgggccggggccacggccccggcggctggcggcccggccccccccctccccccccacccggcctggtgtag

SEQ ID NO: 1279 - protein, 1630 aa, synthetic construct
  REGION 1..1630: note = Synthetic
MGKRPAATKKAGQAKKKKDKKYSIGLDIGTNSVGWAVITDEYKVPSKKFKVLGNTDRHSIKKNLIGALLFDSGETAEATRLKRTARRRYTRRKNRICYLQEIFSNEMAKVDDSFFHRLEESFLVEEDKKHERHPIFGNIVDEVAYHEKYPTIYHLRKKLVDSTDKADLRLIYLALAHMIKFRGHFLIEGDLNPDNSDVDKLFIQLVQTYNQLFEENPINASGVDAKAILSARLSKSRRLENLIAQLPGEKKNGLFGNLIALSLGLTPNFKSNFDLAEDAKLQLSKDTYDDDLDNLLAQIGDQYADLFLAAKNLSDAILLSDILRVNTEITKAPLSASMIKRYDEHHQDLTLLKALVRQQLPEKYKEIFFDQSKNGYAGYIDGGASQEEFYKFIKPILEKMDGTEELLVKLNREDLLRKQRTFDNGSIPHQIHLGELHAILRRQEDFYPFLKDNREKIEKILTFRIPYYVGPLARGNSRFAWMTRKSEETITPWNFEEVVDKGASAQSFIERMTNFDKNLPNEKVLPKHSLLYEYFTVYNELTKVKYVTEGMRKPAFLSGEQKKAIVDLLFKTNRKVTVKQLKEDYFKKIECFDSVEISGVEDRFNASLGTYHDLLKIIKDKDFLDNEENEDILEDIVLTLTLFEDREMIEERLKTYAHLFDDKVMKQLKRRRYTGWGRLSRKLINGIRDKQSGKTILDFLKSDGFANRNFMQLIHDDSLTFKEDIQKAQVSGQGDSLHEHIANLAGSPAIKKGILQTVKVVDELVKVMGRHKPENIVIEMARENQTTQKGQKNSRERMKRIEEGIKELGSQILKEHPVENTQLQNEKLYLYYLQNGRDMYVDQELDINRLSDYDVDAIVPQSFLKDDSIDNKVLTRSDKNRGKSDNVPSEEVVKKMKNYWRQLLNAKLITQRKFDNLTKAERGGLSELDKAGFIKRQLVETRQITKHVAQILDSRMNTKYDENDKLIREVKVITLKSKLVSDFRKDFQFYKVREINNYHHAHDAYLNAVVGTALIKKYPKLESEFVYGDYKVYDVRKMIAKSEQEIGKATAKYFFYSNIMNFFKTEITLANGEIRKRPLIETNGETGEIVWDKGRDFATVRKVLSMPQVNIVKKTEVQTGGFSKESILPKRNSDKLIARKKDWDPKKYGGFDSPTVAYSVLVVAKVEKGKSKKLKSVKELLGITIMERSSFEKNPIDFLEAKGYKEVKKDLIIKLPKYSLFELENGRKRMLASAGELQKGNELALPSKYVNFLYLASHYEKLKGSPEDNEQKQLFVEQHKHYLDEIIEQISEFSKRVILADANLDKVLSAYNKHRDKPIREQAENIIHLFTLTNLGAPAAFKYFDTTIDRKRYTSTKEVLDATLIHQSITGLYETRIDLSQLGGDSGGSRGKCLSYDTEILTVEYGFLPIGKIVEERIECTVYTVDKNGFVYTQPIAQWHNRGEQEVFEYCLEDGSIIRATKDHKFMTTDGQMLPIDEIFERGLDLKQVDGLPGSGEGRGSLLTCGDVEENPGPMAAAMTDPRETVPPGNSGEETIGEAFAWLNRTVEAINREAVNHLPRELIFQVWQRSWRYWHDEQGMSESYTKYRYLCIIQKAVYMHVRKGCTCLGRGHGPGGWRPGPPPPPPPGLV

SEQ ID NO: 1280 - RNA, 6188 nt, synthetic construct
  misc_feature 1..6188: note = Synthetic
  source 1..6188: mol_type = other RNA
aggactcactatttgttttcgcgcccagttgcaaaaagtgtcgaagctcagaataaacgctcaactttggccggatctgccaccatgggcaagcggcccgccgccaccaagaaggccggccaggccaagaagaagaagtccggctccgagacccccggcacctccgagtccgccacccccgagtccggcaagggcgaccccaagaagccccggggcaagatgtcctcctacgccttcttcgtgcagacctgccgggaggagcacaagaagaagcaccccgacgcctccgtgaacttctccgagttctccaagaagtgctccgagcggtggaagaccatgtccgccaaggagaagggcaagttcgaggacatggccaaggccgacaaggcccggtacgagcgggagatgaagacctacatcccccccaagggcgagaccaagaagaagttcaaggaccccaacgcccccaagcggcccccctccgccttcttcctgttctgctccgagtaccggcccaagatcaagggcgagcaccccggcctgtccatcggcgacgtggccaagaagctgggcgagatgtggaacaacaccgccgccgacgacaagcagccctacgagaagaaggccgccaagctgaaggagaagtacgagaaggacatcgccgcctaccgggccaagggcaagcccgacgccgccaagaagggcgtggtgaaggccgagaagtccaagaagaagaagggcaccaaggactccaccaaggacatccccgagaccccctccaaggacggcaccaaggactccaccaaggacatccccgagaccccctccaaggacgacaagaagtactccatcggcctggacatcggcaccaactccgtgggctgggccgtgatcaccgacgagtacaaggtgccctccaagaagttcaaggtgctgggcaacaccgaccggcactccatcaagaagaacctgatcggcgccctgctgttcgactccggcgagaccgccgaggccacccggctgaagcggaccgcccggcggcggtacacccggcggaagaaccggatctgctacctgcaggagatcttctccaacgagatggccaaggtggacgactccttcttccaccggctggaggagtccttcctggtggaggaggacaagaagcacgagcggcaccccatcttcggcaacatcgtggacgaggtggcctaccacgagaagtaccccaccatctaccacctgcggaagaagctggtggactccaccgacaaggccgacctgcggctgatctacctggccctggcccacatgatcaagttccggggccacttcctgatcgagggcgacctgaaccccgacaactccgacgtggacaagctgttcatccagctggtgcagacctacaaccagctgttcgaggagaaccccatcaacgcctccggcgtggacgccaaggccatcctgtccgcccggctgtccaagtcccggcggctggagaacctgatcgcccagctgcccggcgagaagaagaacggcctgttcggcaacctgatcgccctgtccctgggcctgacccccaacttcaagtccaacttcgacctggccgaggacgccaagctgcagctgtccaaggacacctacgacgacgacctggacaacctgctggcccagatcggcgaccagtacgccgacctgttcctggccgccaagaacctgtccgacgccatcctgctgtccgacatcctgcgggtgaacaccgagatcaccaaggcccccctgtccgcctccatgatcaagcggtacgacgagcaccaccaggacctgaccctgctgaaggccctggtgcggcagcagctgcccgagaagtacaaggagatcttcttcgaccagtccaagaacggctacgccggctacatcgacggcggcgcctcccaggaggagttctacaagttcatcaagcccatcctggagaagatggacggcaccgaggagctgctggtgaagctgaaccgggaggacctgctgcggaagcagcggaccttcgacaacggctccatcccccaccagatccacctgggcgagctgcacgccatcctgcggcggcaggaggacttctaccccttcctgaaggacaaccgggagaagatcgagaagatcctgaccttccggatcccctactacgtgggccccctggcccggggcaactcccggttcgcctggatgacccggaagtccgaggagaccatcaccccctggaacttcgaggaggtggtggacaagggcgcctccgcccagtccttcatcgagcggatgaccaacttcgacaagaacctgcccaacgagaaggtgctgcccaagcactccctgctgtacgagtacttcaccgtgtacaacgagctgaccaaggtgaagtacgtgaccgagggcatgcggaagcccgccttcctgtccggcgagcagaagaaggccatcgtggacctgctgttcaagaccaaccggaaggtgaccgtgaagcagctgaaggaggactacttcaagaagatcgagtgcttcgactccgtggagatctccggcgtggaggaccggttcaacgcctccctgggcacctaccacgacctgctgaagatcatcaaggacaaggacttcctggacaacgaggagaacgaggacatcctggaggacatcgtgctgaccctgaccctgttcgaggaccgggagatgatcgaggagcggctgaagacctacgcccacctgttcgacgacaaggtgatgaagcagctgaagcggcggcggtacaccggctggggccggctgtcccggaagctgatcaacggcatccgggacaagcagtccggcaagaccatcctggacttcctgaagtccgacggcttcgccaaccggaacttcatgcagctgatccacgacgactccctgaccttcaaggaggacatccagaaggcccaggtgtccggccagggcgactccctgcacgagcacatcgccaacctggccggctcccccgccatcaagaagggcatcctgcagaccgtgaaggtggtggacgagctggtgaaggtgatgggccggcacaagcccgagaacatcgtgatcgagatggcccgggagaaccagaccacccagaagggccagaagaactcccgggagcggatgaagcggatcgaggagggcatcaaggagctgggctcccagatcctgaaggagcaccccgtggagaacacccagctgcagaacgagaagctgtacctgtactacctgcagaacggccgggacatgtacgtggaccaggagctggacatcaaccggctgtccgactacgacgtggacgccatcgtgccccagtccttcctgaaggacgactccatcgacaacaaggtgctgacccggtccgacaagaaccggggcaagtccgacaacgtgccctccgaggaggtggtgaagaagatgaagaactactggcggcagctgctgaacgccaagctgatcacccagcggaagttcgacaacctgaccaaggccgagcggggcggcctgtccgagctggacaaggccggcttcatcaagcggcagctggtggagacccggcagatcaccaagcacgtggcccagatcctggactcccggatgaacaccaagtacgacgagaacgacaagctgatccgggaggtgaaggtgatcaccctgaagtccaagctggtgtccgacttccggaaggacttccagttctacaaggtgcgggagatcaacaactaccaccacgcccacgacgcctacctgaacgccgtggtgggcaccgccctgatcaagaagtaccccaagctggagtccgagttcgtgtacggcgactacaaggtgtacgacgtgcggaagatgatcgccaagtccgagcaggagatcggcaaggccaccgccaagtacttcttctactccaacatcatgaacttcttcaagaccgagatcaccctggccaacggcgagatccggaagcggcccctgatcgagaccaacggcgagaccggcgagatcgtgtgggacaagggccgggacttcgccaccgtgcggaaggtgctgtccatgccccaggtgaacatcgtgaagaagaccgaggtgcagaccggcggcttctccaaggagtccatcctgcccaagcggaactccgacaagctgatcgcccggaagaaggactgggaccccaagaagtacggcggcttcgactcccccaccgtggcctactccgtgctggtggtggccaaggtggagaagggcaagtccaagaagctgaagtccgtgaaggagctgctgggcatcaccatcatggagcggtcctccttcgagaagaaccccatcgacttcctggaggccaagggctacaaggaggtgaagaaggacctgatcatcaagctgcccaagtactccctgttcgagctggagaacggccggaagcggatgctggcctccgccggcgagctgcagaagggcaacgagctggccctgccctccaagtacgtgaacttcctgtacctggcctcccactacgagaagctgaagggctcccccgaggacaacgagcagaagcagctgttcgtggagcagcacaagcactacctggacgagatcatcgagcagatctccgagttctccaagcgggtgatcctggccgacgccaacctggacaaggtgctgtccgcctacaacaagcaccgggacaagcccatccgggagcaggccgagaacatcatccacctgttcaccctgaccaacctgggcgcccccgccgccttcaagtacttcgacaccaccatcgaccggaagcggtacacctccaccaaggaggtgctggacgccaccctgatccaccagtccatcaccggcctgtacgagacccggatcgacctgtcccagctgggcggcgactccggcggctcccggggcaagtgcctgtcctacgacaccgagatcctgaccgtggagtacggcttcctgcccatcggcaagatcgtggaggagcggatcgagtgcaccgtgtacaccgtggacaagaacggcttcgtgtacacccagcccatcgcccagtggcacaaccgcggcgagcaggaggtgttcgagtactgcctggaggacggctccatcatccgcgccaccaaggaccacaagttcatgaccaccgacggccagatgctgcccatcgacgagatcttcgagcgcggcctggacctgaagcaggtggacggcctgcccggctccggcgagggccggggctccctgctgacctgcggcgacgtggaggagaaccccggccccatggccgccgccatgaccgacccccgggagaccgtgccccccggcaactccggcgaggagaccatcggcgaggccttcgcctggctgaaccggaccgtggaggccatcaaccgggaggccgtgaaccacctgccccgggagctgatcttccaggtgtggcagcggtcctggcggtactggcacgacgagcagggcatgtccgagtcctacaccaagtaccggtacctgtgcatcatccagaaggccgtgtacatgcacgtgcggaagggctgcacctgcctgggccggggccacggccccggcggctggcggcccggccccccccctccccccccacccggcctggtgtagctagcaccagcctcaagaacacccgaatggagtctctaagctacataataccaacttacactttacaaaatgttgtcccccaaaatgtagccattcgtatctgctcctaataaaaagaaagtttcttcacattctctcgagaaaaaaaaaaaatggaaaaaaaaaaaacggaaaaaaaaaaaaggtaaaaaaaaaaaatataaaaaaaaaaaacataaaaaaaaaaaacgaaaaaaaaaaaacgtaaaaaaaaaaaactcaaaaaaaaaaaagataaaaaaaaaaaacctaaaaaaaaaaaatgtaaaaaaaaaaaagggaaaaaaaaaaaacgcaaaaaaaaaaaacacaaaaaaaaaaaatgcaaaaaaaaaaaatcgaaaaaaaaaaaatctaaaaaaaaaaaacgaaaaaaaaaaaacccaaaaaaaaaaaagacaaaaaaaaaaaatagaaaaaaaaaaagttaaaaaaaaaaaactgaaaaaaaaaaaatttaaaaaaaaaaaatctag

SEQ ID NO: 1281 - DNA, 5589 bp, synthetic construct
  misc_feature 1..5589: note = Synthetic
  source 1..5589: mol_type = other DNA
atgggcaagcggcccgccgccaccaagaaggccggccaggccaagaagaagaagtccggctccgagacccccggcacctccgagtccgccacccccgagtccggcaagggcgaccccaagaagccccggggcaagatgtcctcctacgccttcttcgtgcagacctgccgggaggagcacaagaagaagcaccccgacgcctccgtgaacttctccgagttctccaagaagtgctccgagcggtggaagaccatgtccgccaaggagaagggcaagttcgaggacatggccaaggccgacaaggcccggtacgagcgggagatgaagacctacatcccccccaagggcgagaccaagaagaagttcaaggaccccaacgcccccaagcggcccccctccgccttcttcctgttctgctccgagtaccggcccaagatcaagggcgagcaccccggcctgtccatcggcgacgtggccaagaagctgggcgagatgtggaacaacaccgccgccgacgacaagcagccctacgagaagaaggccgccaagctgaaggagaagtacgagaaggacatcgccgcctaccgggccaagggcaagcccgacgccgccaagaagggcgtggtgaaggccgagaagtccaagaagaagaagggcaccaaggactccaccaaggacatccccgagaccccctccaaggacggcaccaaggactccaccaaggacatccccgagaccccctccaaggacgacaagaagtactccatcggcctggacatcggcaccaactccgtgggctgggccgtgatcaccgacgagtacaaggtgccctccaagaagttcaaggtgctgggcaacaccgaccggcactccatcaagaagaacctgatcggcgccctgctgttcgactccggcgagaccgccgaggccacccggctgaagcggaccgcccggcggcggtacacccggcggaagaaccggatctgctacctgcaggagatcttctccaacgagatggccaaggtggacgactccttcttccaccggctggaggagtccttcctggtggaggaggacaagaagcacgagcggcaccccatcttcggcaacatcgtggacgaggtggcctaccacgagaagtaccccaccatctaccacctgcggaagaagctggtggactccaccgacaaggccgacctgcggctgatctacctggccctggcccacatgatcaagttccggggccacttcctgatcgagggcgacctgaaccccgacaactccgacgtggacaagctgttcatccagctggtgcagacctacaaccagctgttcgaggagaaccccatcaacgcctccggcgtggacgccaaggccatcctgtccgcccggctgtccaagtcccggcggctggagaacctgatcgcccagctgcccggcgagaagaagaacggcctgttcggcaacctgatcgccctgtccctgggcctgacccccaacttcaagtccaacttcgacctggccgaggacgccaagctgcagctgtccaaggacacctacgacgacgacctggacaacctgctggcccagatcggcgaccagtacgccgacctgttcctggccgccaagaacctgtccgacgccatcctgctgtccgacatcctgcgggtgaacaccgagatcaccaaggcccccctgtccgcctccatgatcaagcggtacgacgagcaccaccaggacctgaccctgctgaaggccctggtgcggcagcagctgcccgagaagtacaaggagatcttcttcgaccagtccaagaacggctacgccggctacatcgacggcggcgcctcccaggaggagttctacaagttcatcaagcccatcctggagaagatggacggcaccgaggagctgctggtgaagctgaaccgggaggacctgctgcggaagcagcggaccttcgacaacggctccatcccccaccagatccacctgggcgagctgcacgccatcctgcggcggcaggaggacttctaccccttcctgaaggacaaccgggagaagatcgagaagatcctgaccttccggatcccctactacgtgggccccctggcccggggcaactcccggttcgcctggatgacccggaagtccgaggagaccatcaccccctggaacttcgaggaggtggtggacaagggcgcctccgcccagtccttcatcgagcggatgaccaacttcgacaagaacctgcccaacgagaaggtgctgcccaagcactccctgctgtacgagtacttcaccgtgtacaacgagctgaccaaggtgaagtacgtgaccgagggcatgcggaagcccgccttcctgtccggcgagcagaagaaggccatcgtggacctgctgttcaagaccaaccggaaggtgaccgtgaagcagctgaaggaggactacttcaagaagatcgagtgcttcgactccgtggagatctccggcgtggaggaccggttcaacgcctccctgggcacctaccacgacctgctgaagatcatcaaggacaaggacttcctggacaacgaggagaacgaggacatcctggaggacatcgtgctgaccctgaccctgttcgaggaccgggagatgatcgaggagcggctgaagacctacgcccacctgttcgacgacaaggtgatgaagcagctgaagcggcggcggtacaccggctggggccggctgtcccggaagctgatcaacggcatccgggacaagcagtccggcaagaccatcctggacttcctgaagtccgacggcttcgccaaccggaacttcatgcagctgatccacgacgactccctgaccttcaaggaggacatccagaaggcccaggtgtccggccagggcgactccctgcacgagcacatcgccaacctggccggctcccccgccatcaagaagggcatcctgcagaccgtgaaggtggtggacgagctggtgaaggtgatgggccggcacaagcccgagaacatcgtgatcgagatggcccgggagaaccagaccacccagaagggccagaagaactcccgggagcggatgaagcggatcgaggagggcatcaaggagctgggctcccagatcctgaaggagcaccccgtggagaacacccagctgcagaacgagaagctgtacctgtactacctgcagaacggccgggacatgtacgtggaccaggagctggacatcaaccggctgtccgactacgacgtggacgccatcgtgccccagtccttcctgaaggacgactccatcgacaacaaggtgctgacccggtccgacaagaaccggggcaagtccgacaacgtgccctccgaggaggtggtgaagaagatgaagaactactggcggcagctgctgaacgccaagctgatcacccagcggaagttcgacaacctgaccaaggccgagcggggcggcctgtccgagctggacaaggccggcttcatcaagcggcagctggtggagacccggcagatcaccaagcacgtggcccagatcctggactcccggatgaacaccaagtacgacgagaacgacaagctgatccgggaggtgaaggtgatcaccctgaagtccaagctggtgtccgacttccggaaggacttccagttctacaaggtgcgggagatcaacaactaccaccacgcccacgacgcctacctgaacgccgtggtgggcaccgccctgatcaagaagtaccccaagctggagtccgagttcgtgtacggcgactacaaggtgtacgacgtgcggaagatgatcgccaagtccgagcaggagatcggcaaggccaccgccaagtacttcttctactccaacatcatgaacttcttcaagaccgagatcaccctggccaacggcgagatccggaagcggcccctgatcgagaccaacggcgagaccggcgagatcgtgtgggacaagggccgggacttcgccaccgtgcggaaggtgctgtccatgccccaggtgaacatcgtgaagaagaccgaggtgcagaccggcggcttctccaaggagtccatcctgcccaagcggaactccgacaagctgatcgcccggaagaaggactgggaccccaagaagtacggcggcttcgactcccccaccgtggcctactccgtgctggtggtggccaaggtggagaagggcaagtccaagaagctgaagtccgtgaaggagctgctgggcatcaccatcatggagcggtcctccttcgagaagaaccccatcgacttcctggaggccaagggctacaaggaggtgaagaaggacctgatcatcaagctgcccaagtactccctgttcgagctggagaacggccggaagcggatgctggcctccgccggcgagctgcagaagggcaacgagctggccctgccctccaagtacgtgaacttcctgtacctggcctcccactacgagaagctgaagggctcccccgaggacaacgagcagaagcagctgttcgtggagcagcacaagcactacctggacgagatcatcgagcagatctccgagttctccaagcgggtgatcctggccgacgccaacctggacaaggtgctgtccgcctacaacaagcaccgggacaagcccatccgggagcaggccgagaacatcatccacctgttcaccctgaccaacctgggcgcccccgccgccttcaagtacttcgacaccaccatcgaccggaagcggtacacctccaccaaggaggtgctggacgccaccctgatccaccagtccatcaccggcctgtacgagacccggatcgacctgtcccagctgggcggcgactccggcggctcccggggcaagtgcctgtcctacgacaccgagatcctgaccgtggagtacggcttcctgcccatcggcaagatcgtggaggagcggatcgagtgcaccgtgtacaccgtggacaagaacggcttcgtgtacacccagcccatcgcccagtggcacaaccgcggcgagcaggaggtgttcgagtactgcctggaggacggctccatcatccgcgccaccaaggaccacaagttcatgaccaccgacggccagatgctgcccatcgacgagatcttcgagcgcggcctggacctgaagcaggtggacggcctgcccggctccggcgagggccggggctccctgctgacctgcggcgacgtggaggagaaccccggccccatggccgccgccatgaccgacccccgggagaccgtgccccccggcaactccggcgaggagaccatcggcgaggccttcgcctggctgaaccggaccgtggaggccatcaaccgggaggccgtgaaccacctgccccgggagctgatcttccaggtgtggcagcggtcctggcggtactggcacgacgagcagggcatgtccgagtcctacaccaagtaccggtacctgtgcatcatccagaaggccgtgtacatgcacgtgcggaagggctgcacctgcctgggccggggccacggccccggcggctggcggcccggccccccccctccccccccacccggcctggtgtag

SEQ ID NO: 1282 - protein, 1862 aa, synthetic construct
  REGION 1..1862: note = Synthetic
MGKRPAATKKAGQAKKKKSGSETPGTSESATPESGKGDPKKPRGKMSSYAFFVQTCREEHKKKHPDASVNFSEFSKKCSERWKTMSAKEKGKFEDMAKADKARYEREMKTYIPPKGETKKKFKDPNAPKRPPSAFFLFCSEYRPKIKGEHPGLSIGDVAKKLGEMWNNTAADDKQPYEKKAAKLKEKYEKDIAAYRAKGKPDAAKKGVVKAEKSKKKKGTKDSTKDIPETPSKDGTKDSTKDIPETPSKDDKKYSIGLDIGTNSVGWAVITDEYKVPSKKFKVLGNTDRHSIKKNLIGALLFDSGETAEATRLKRTARRRYTRRKNRICYLQEIFSNEMAKVDDSFFHRLEESFLVEEDKKHERHPIFGNIVDEVAYHEKYPTIYHLRKKLVDSTDKADLRLIYLALAHMIKFRGHFLIEGDLNPDNSDVDKLFIQLVQTYNQLFEENPINASGVDAKAILSARLSKSRRLENLIAQLPGEKKNGLFGNLIALSLGLTPNFKSNFDLAEDAKLQLSKDTYDDDLDNLLAQIGDQYADLFLAAKNLSDAILLSDILRVNTEITKAPLSASMIKRYDEHHQDLTLLKALVRQQLPEKYKEIFFDQSKNGYAGYIDGGASQEEFYKFIKPILEKMDGTEELLVKLNREDLLRKQRTFDNGSIPHQIHLGELHAILRRQEDFYPFLKDNREKIEKILTFRIPYYVGPLARGNSRFAWMTRKSEETITPWNFEEVVDKGASAQSFIERMTNFDKNLPNEKVLPKHSLLYEYFTVYNELTKVKYVTEGMRKPAFLSGEQKKAIVDLLFKTNRKVTVKQLKEDYFKKIECFDSVEISGVEDRFNASLGTYHDLLKIIKDKDFLDNEENEDILEDIVLTLTLFEDREMIEERLKTYAHLFDDKVMKQLKRRRYTGWGRLSRKLINGIRDKQSGKTILDFLKSDGFANRNFMQLIHDDSLTFKEDIQKAQVSGQGDSLHEHIANLAGSPAIKKGILQTVKVVDELVKVMGRHKPENIVIEMARENQTTQKGQKNSRERMKRIEEGIKELGSQILKEHPVENTQLQNEKLYLYYLQNGRDMYVDQELDINRLSDYDVDAIVPQSFLKDDSIDNKVLTRSDKNRGKSDNVPSEEVVKKMKNYWRQLLNAKLITQRKFDNLTKAERGGLSELDKAGFIKRQLVETRQITKHVAQILDSRMNTKYDENDKLIREVKVITLKSKLVSDFRKDFQFYKVREINNYHHAHDAYLNAVVGTALIKKYPKLESEFVYGDYKVYDVRKMIAKSEQEIGKATAKYFFYSNIMNFFKTEITLANGEIRKRPLIETNGETGEIVWDKGRDFATVRKVLSMPQVNIVKKTEVQTGGFSKESILPKRNSDKLIARKKDWDPKKYGGFDSPTVAYSVLVVAKVEKGKSKKLKSVKELLGITIMERSSFEKNPIDFLEAKGYKEVKKDLIIKLPKYSLFELENGRKRMLASAGELQKGNELALPSKYVNFLYLASHYEKLKGSPEDNEQKQLFVEQHKHYLDEIIEQISEFSKRVILADANLDKVLSAYNKHRDKPIREQAENIIHLFTLTNLGAPAAFKYFDTTIDRKRYTSTKEVLDATLIHQSITGLYETRIDLSQLGGDSGGSRGKCLSYDTEILTVEYGFLPIGKIVEERIECTVYTVDKNGFVYTQPIAQWHNRGEQEVFEYCLEDGSIIRATKDHKFMTTDGQMLPIDEIFERGLDLKQVDGLPGSGEGRGSLLTCGDVEENPGPMAAAMTDPRETVPPGNSGEETIGEAFAWLNRTVEAINREAVNHLPRELIFQVWQRSWRYWHDEQGMSESYTKYRYLCIIQKAVYMHVRKGCTCLGRGHGPGGWRPGPPPPPPPGLV

SEQ ID NO: 1283 - RNA, 3674 nt, synthetic construct
  misc_feature 1..3674: note = Synthetic
  source 1..3674: mol_type = other RNA
aggactcactatttgttttcgcgcccagttgcaaaaagtgtcgaagctcagaataaacgctcaactttggccggatctgccaccatgggcgtgaagatcatctcccgcaagtccctgggcacccagaacgtgtacgacatcggcgtggagaaggaccacaacttcctgctgaagaacggcctggtggcctccaactgcttcaactccggcggctccaagcggaccgccgacggctccgagttcgagtcccccaagaagaagcggaaggtgtccggcggctcctccggcggctccatggactccaccaaggagaagtgcgactcctacaaggacgacctgctgctgcggatgggcctgaacgacaacaaggccggcatggagggcctggacaaggagaagatcaacaagatcatcatggaggccaccaagggctcccggttctacggcaacgagctgaagaaggagaagcaggtgaaccagcggatcgagaacatgatgcagcagaaggcccagatcacctcccagcagctgcggaaggcccagctgcaggtggaccggttcgccatggagctggagcagtcccggaacctgtccaacaccatcgtgcacatcgacatggacgccttctacgccgccgtggagatgcgggacaaccccgagctgaaggacaagcccatcgccgtgggctccatgtccatgctgtccacctccaactaccacgcccggcggttcggcgtgcgggccgccatgcccggcttcatcgccaagcggctgtgcccccagctgatcatcgtgccccccaacttcgacaagtaccgggccgtgtccaaggaggtgaaggagatcctggccgactacgaccccaacttcatggccatgtccctggacgaggcctacctgaacatcaccaagcacctggaggagcggcagaactggcccgaggacaagcggcggtacttcatcaagatgggctcctccgtggagaacgacaaccccggcaaggaggtgaacaagctgtccgagcacgagcggtccatctcccccctgctgttcgaggagtccccctccgacgtgcagccccccggcgaccccttccaggtgaacttcgaggagcagaacaacccccagatcctgcagaactccgtggtgttcggcacctccgcccaggaggtggtgaaggagatccggttccggatcgagcagaagaccaccctgaccgcctccgccggcatcgcccccaacaccatgctggccaaggtgtgctccgacaagaacaagcccaacggccagtaccagatcctgcccaaccggcaggccgtgatggacttcatcaaggacctgcccatccggaaggtgtccggcatcggcaaggtgaccgagaagatgctgaaggccctgggcatcatcacctgcaccgagctgtaccagcagcgggccctgctgtccctgctgttctccgagacctcctggcactacttcctgcacatctccctgggcctgggctccacccacctgacccgggaccgggtgcggaagtccatgtccgtggagcggaccttctccgagatcaacaaggccgaggagcagtactccctgtgccaggagctgtgctccgagctggcccaggacctgcagaaggagcggctgaagggccggaccgtgaccatcaagctgaagaacgtgaacttcgaggtgaagacccgggcctccaccgtgtcctccgtggtgtccaccgccgaggagatcttcgccatcgccaaggagctgctgaagaccgagatcgacgccgacttcccccaccccctgcggctgcggctgatgggcgtgcggatctcctccttccccaacgaggaggaccggaagcaccagcagggcggcggctccggcaagcggaccgccgacggctccggcggcggctcccccaagaagaagcggaaggtgcccgccgccaagcgcgtgaagctggactccggctccgagacccccggcacctccgagtccgccacccccgagtccatgggcatccagggcctggccaagctgatcgccgacgtggccccctccgccatccgggagaacgacatcaagtcctacttcggccggaaggtggccatcgacgcctccatgtccatctaccagttcctgatcgccgtgcggcagggcggcgacgtgctgcagaacgaggagggcgagaccacctcccacctgatgggcatgttctaccggaccatccggatgatggagaacggcatcaagcccgtgtacgtgttcgacggcaagcccccccagctgaagtccggcgagctggccaagcggtccgagcggcgggccgaggccgagaagcagctgcagcaggcccaggccgccggcgccgagcaggaggtggagaagttcaccaagcggctggtgaaggtgaccaagcagcacaacgacgagtgcaagcacctgctgtccctgatgggcatcccctacctggacgccccctccgaggccgaggcctcctgcgccgccctggtgaaggccggcaaggtgtacgccgccgccaccgaggacatggactgcctgaccttcggctcccccgtgctgatgcggcacctgaccgcctccgaggccaagaagctgcccatccaggagttccacctgtcccggatcctgcaggagctgggcctgaaccaggagcagttcgtggacctgtgcatcctgctgggctccgactactgcgagtccatccggggcatcggccccaagcgggccgtggacctgatccagaagcacaagtccatcgaggagatcgtgcggcggctggaccccaacaagtaccccgtgcccgagaactggctgcacaaggaggcccaccagctgttcctggagcccgaggtgctggaccccgagtccgtggagctgaagtggtccgagcccaacgaggaggagctgatcaagttcatgtgcggcgagaagcagttctccgaggagcggatccggtccggcgtgaagcggctgtccaagtcccggcagggctccacccagggccggctggacgacttcttcaaggtgaccggctccctgtcctccgccaagcggaaggagcccgagcccaagggctccaccaagaagaaggccaagaccggcgccgccggcaagttcaagcggggcaagtagctagcaccagcctcaagaacacccgaatggagtctctaagctacataataccaacttacactttacaaaatgttgtcccccaaaatgtagccattcgtatctgctcctaataaaaagaaagtttcttcacattctctcgagaaaaaaaaaaaatggaaaaaaaaaaaacggaaaaaaaaaaaaggtaaaaaaaaaaaatataaaaaaaaaaaacataaaaaaaaaaaacgaaaaaaaaaaaacgtaaaaaaaaaaaactcaaaaaaaaaaaagataaaaaaaaaaaacctaaaaaaaaaaaatgtaaaaaaaaaaaagggaaaaaaaaaaaacgcaaaaaaaaaaaacacaaaaaaaaaaaatgcaaaaaaaaaaaatcgaaaaaaaaaaaatctaaaaaaaaaaaacgaaaaaaaaaaaacccaaaaaaaaaaaagacaaaaaaaaaaaatagaaaaaaaaaaagttaaaaaaaaaaaactgaaaaaaaaaaaatttaaaaaaaaaaaatctag

SEQ ID NO: 1284 - DNA, 3075 bp, synthetic construct
  misc_feature 1..3075: note = Synthetic
  source 1..3075: mol_type = other DNA
atgggcgtgaagatcatctcccgcaagtccctgggcacccagaacgtgtacgacatcggcgtggagaaggaccacaacttcctgctgaagaacggcctggtggcctccaactgcttcaactccggcggctccaagcggaccgccgacggctccgagttcgagtcccccaagaagaagcggaaggtgtccggcggctcctccggcggctccatggactccaccaaggagaagtgcgactcctacaaggacgacctgctgctgcggatgggcctgaacgacaacaaggccggcatggagggcctggacaaggagaagatcaacaagatcatcatggaggccaccaagggctcccggttctacggcaacgagctgaagaaggagaagcaggtgaaccagcggatcgagaacatgatgcagcagaaggcccagatcacctcccagcagctgcggaaggcccagctgcaggtggaccggttcgccatggagctggagcagtcccggaacctgtccaacaccatcgtgcacatcgacatggacgccttctacgccgccgtggagatgcgggacaaccccgagctgaaggacaagcccatcgccgtgggctccatgtccatgctgtccacctccaactaccacgcccggcggttcggcgtgcgggccgccatgcccggcttcatcgccaagcggctgtgcccccagctgatcatcgtgccccccaacttcgacaagtaccgggccgtgtccaaggaggtgaaggagatcctggccgactacgaccccaacttcatggccatgtccctggacgaggcctacctgaacatcaccaagcacctggaggagcggcagaactggcccgaggacaagcggcggtacttcatcaagatgggctcctccgtggagaacgacaaccccggcaaggaggtgaacaagctgtccgagcacgagcggtccatctcccccctgctgttcgaggagtccccctccgacgtgcagccccccggcgaccccttccaggtgaacttcgaggagcagaacaacccccagatcctgcagaactccgtggtgttcggcacctccgcccaggaggtggtgaaggagatccggttccggatcgagcagaagaccaccctgaccgcctccgccggcatcgcccccaacaccatgctggccaaggtgtgctccgacaagaacaagcccaacggccagtaccagatcctgcccaaccggcaggccgtgatggacttcatcaaggacctgcccatccggaaggtgtccggcatcggcaaggtgaccgagaagatgctgaaggccctgggcatcatcacctgcaccgagctgtaccagcagcgggccctgctgtccctgctgttctccgagacctcctggcactacttcctgcacatctccctgggcctgggctccacccacctgacccgggaccgggtgcggaagtccatgtccgtggagcggaccttctccgagatcaacaaggccgaggagcagtactccctgtgccaggagctgtgctccgagctggcccaggacctgcagaaggagcggctgaagggccggaccgtgaccatcaagctgaagaacgtgaacttcgaggtgaagacccgggcctccaccgtgtcctccgtggtgtccaccgccgaggagatcttcgccatcgccaaggagctgctgaagaccgagatcgacgccgacttcccccaccccctgcggctgcggctgatgggcgtgcggatctcctccttccccaacgaggaggaccggaagcaccagcagggcggcggctccggcaagcggaccgccgacggctccggcggcggctcccccaagaagaagcggaaggtgcccgccgccaagcgcgtgaagctggactccggctccgagacccccggcacctccgagtccgccacccccgagtccatgggcatccagggcctggccaagctgatcgccgacgtggccccctccgccatccgggagaacgacatcaagtcctacttcggccggaaggtggccatcgacgcctccatgtccatctaccagttcctgatcgccgtgcggcagggcggcgacgtgctgcagaacgaggagggcgagaccacctcccacctgatgggcatgttctaccggaccatccggatgatggagaacggcatcaagcccgtgtacgtgttcgacggcaagcccccccagctgaagtccggcgagctggccaagcggtccgagcggcgggccgaggccgagaagcagctgcagcaggcccaggccgccggcgccgagcaggaggtggagaagttcaccaagcggctggtgaaggtgaccaagcagcacaacgacgagtgcaagcacctgctgtccctgatgggcatcccctacctggacgccccctccgaggccgaggcctcctgcgccgccctggtgaaggccggcaaggtgtacgccgccgccaccgaggacatggactgcctgaccttcggctcccccgtgctgatgcggcacctgaccgcctccgaggccaagaagctgcccatccaggagttccacctgtcccggatcctgcaggagctgggcctgaaccaggagcagttcgtggacctgtgcatcctgctgggctccgactactgcgagtccatccggggcatcggccccaagcgggccgtggacctgatccagaagcacaagtccatcgaggagatcgtgcggcggctggaccccaacaagtaccccgtgcccgagaactggctgcacaaggaggcccaccagctgttcctggagcccgaggtgctggaccccgagtccgtggagctgaagtggtccgagcccaacgaggaggagctgatcaagttcatgtgcggcgagaagcagttctccgaggagcggatccggtccggcgtgaagcggctgtccaagtcccggcagggctccacccagggccggctggacgacttcttcaaggtgaccggctccctgtcctccgccaagcggaaggagcccgagcccaagggctccaccaagaagaaggccaagaccggcgccgccggcaagttcaagcggggcaagtag

SEQ ID NO: 1285 - protein, 1024 aa, synthetic construct
  REGION 1..1024: note = Synthetic
MGVKIISRKSLGTQNVYDIGVEKDHNFLLKNGLVASNCFNSGGSKRTADGSEFESPKKKRKVSGGSSGGSMDSTKEKCDSYKDDLLLRMGLNDNKAGMEGLDKEKINKIIMEATKGSRFYGNELKKEKQVNQRIENMMQQKAQITSQQLRKAQLQVDRFAMELEQSRNLSNTIVHIDMDAFYAAVEMRDNPELKDKPIAVGSMSMLSTSNYHARRFGVRAAMPGFIAKRLCPQLIIVPPNFDKYRAVSKEVKEILADYDPNFMAMSLDEAYLNITKHLEERQNWPEDKRRYFIKMGSSVENDNPGKEVNKLSEHERSISPLLFEESPSDVQPPGDPFQVNFEEQNNPQILQNSVVFGTSAQEVVKEIRFRIEQKTTLTASAGIAPNTMLAKVCSDKNKPNGQYQILPNRQAVMDFIKDLPIRKVSGIGKVTEKMLKALGIITCTELYQQRALLSLLFSETSWHYFLHISLGLGSTHLTRDRVRKSMSVERTFSEINKAEEQYSLCQELCSELAQDLQKERLKGRTVTIKLKNVNFEVKTRASTVSSVVSTAEEIFAIAKELLKTEIDADFPHPLRLRLMGVRISSFPNEEDRKHQQGGGSGKRTADGSGGGSPKKKRKVPAAKRVKLDSGSETPGTSESATPESMGIQGLAKLIADVAPSAIRENDIKSYFGRKVAIDASMSIYQFLIAVRQGGDVLQNEEGETTSHLMGMFYRTIRMMENGIKPVYVFDGKPPQLKSGELAKRSERRAEAEKQLQQAQAAGAEQEVEKFTKRLVKVTKQHNDECKHLLSLMGIPYLDAPSEAEASCAALVKAGKVYAAATEDMDCLTFGSPVLMRHLTASEAKKLPIQEFHLSRILQELGLNQEQFVDLCILLGSDYCESIRGIGPKRAVDLIQKHKSIEEIVRRLDPNKYPVPENWLHKEAHQLFLEPEVLDPESVELKWSEPNEEELIKFMCGEKQFSEERIRSGVKRLSKSRQGSTQGRLDDFFKVTGSLSSAKRKEPEPKGSTKKKAKTGAAGKFKRGK

SEQ ID NO: 1286 - RNA, 4088 nt, synthetic construct
  misc_feature 1..4088: note = Synthetic
  source 1..4088: mol_type = other RNA
aggactcactatttgttttcgcgcccagttgcaaaaagtgtcgaagctcagaataaacgctcaactttggccggatctgccaccatgggcgtgaagatcatctcccgcaagtccctgggcacccagaacgtgtacgacatcggcgtggagaaggaccacaacttcctgctgaagaacggcctggtggcctccaactgcttcaactccggcggctccaagcggaccgccgacggctccgagttcgagtcccccaagaagaagcggaaggtgtccggcggctcctccggcggctccatggactccaccaaggagaagtgcgactcctacaaggacgacctgctgctgcggatgggcctgaacgacaacaaggccggcatggagggcctggacaaggagaagatcaacaagatcatcatggaggccaccaagggctcccggttctacggcaacgagctgaagaaggagaagcaggtgaaccagcggatcgagaacatgatgcagcagaaggcccagatcacctcccagcagctgcggaaggcccagctgcaggtggaccggttcgccatggagctggagcagtcccggaacctgtccaacaccatcgtgcacatcgacatggacgccttctacgccgccgtggagatgcgggacaaccccgagctgaaggacaagcccatcgccgtgggctccatgtccatgctgtccacctccaactaccacgcccggcggttcggcgtgcgggccgccatgcccggcttcatcgccaagcggctgtgcccccagctgatcatcgtgccccccaacttcgacaagtaccgggccgtgtccaaggaggtgaaggagatcctggccgactacgaccccaacttcatggccatgtccctggacgaggcctacctgaacatcaccaagcacctggaggagcggcagaactggcccgaggacaagcggcggtacttcatcaagatgggctcctccgtggagaacgacaaccccggcaaggaggtgaacaagctgtccgagcacgagcggtccatctcccccctgctgttcgaggagtccccctccgacgtgcagccccccggcgaccccttccaggtgaacttcgaggagcagaacaacccccagatcctgcagaactccgtggtgttcggcacctccgcccaggaggtggtgaaggagatccggttccggatcgagcagaagaccaccctgaccgcctccgccggcatcgcccccaacaccatgctggccaaggtgtgctccgacaagaacaagcccaacggccagtaccagatcctgcccaaccggcaggccgtgatggacttcatcaaggacctgcccatccggaaggtgtccggcatcggcaaggtgaccgagaagatgctgaaggccctgggcatcatcacctgcaccgagctgtaccagcagcgggccctgctgtccctgctgttctccgagacctcctggcactacttcctgcacatctccctgggcctgggctccacccacctgacccgggaccgggtgcggaagtccatgtccgtggagcggaccttctccgagatcaacaaggccgaggagcagtactccctgtgccaggagctgtgctccgagctggcccaggacctgcagaaggagcggctgaagggccggaccgtgaccatcaagctgaagaacgtgaacttcgaggtgaagacccgggcctccaccgtgtcctccgtggtgtccaccgccgaggagatcttcgccatcgccaaggagctgctgaagaccgagatcgacgccgacttcccccaccccctgcggctgcggctgatgggcgtgcggatctcctccttccccaacgaggaggaccggaagcaccagcagggcggcggctccggcaagcggaccgccgacggctccggcggcggctcccccaagaagaagcggaaggtgcccgccgccaagcgcgtgaagctggactccggctccgagacccccggcacctccgagtccgccacccccgagtccatgggcatccagggcctggccaagctgatcgccgacgtggccccctccgccatccgggagaacgacatcaagtcctacttcggccggaaggtggccatcgacgcctccatgtccatctaccagttcctgatcgccgtgcggcagggcggcgacgtgctgcagaacgaggagggcgagaccacctcccacctgatgggcatgttctaccggaccatccggatgatggagaacggcatcaagcccgtgtacgtgttcgacggcaagcccccccagctgaagtccggcgagctggccaagcggtccgagcggcgggccgaggccgagaagcagctgcagcaggcccaggccgccggcgccgagcaggaggtggagaagttcaccaagcggctggtgaaggtgaccaagcagcacaacgacgagtgcaagcacctgctgtccctgatgggcatcccctacctggacgccccctccgaggccgaggcctcctgcgccgccctggtgaaggccggcaaggtgtacgccgccgccaccgaggacatggactgcctgaccttcggctcccccgtgctgatgcggcacctgaccgcctccgaggccaagaagctgcccatccaggagttccacctgtcccggatcctgcaggagctgggcctgaaccaggagcagttcgtggacctgtgcatcctgctgggctccgactactgcgagtccatccggggcatcggccccaagcgggccgtggacctgatccagaagcacaagtccatcgaggagatcgtgcggcggctggaccccaacaagtaccccgtgcccgagaactggctgcacaaggaggcccaccagctgttcctggagcccgaggtgctggaccccgagtccgtggagctgaagtggtccgagcccaacgaggaggagctgatcaagttcatgtgcggcgagaagcagttctccgaggagcggatccggtccggcgtgaagcggctgtccaagtcccggcagggctccacccagggccggctggacgacttcttcaaggtgaccggctccctgtcctccgccaagcggaaggagcccgagcccaagggctccaccaagaagaaggccaagaccggcgccgccggcaagttcaagcggggcaagggctccggcgccaccaacttctccctgctgaagcaggccggcgacgtggaggagaaccccggccccatggccgccgccatgaccgacccccgggagaccgtgccccccggcaactccggcgaggagaccatcggcgaggccttcgcctggctgaaccggaccgtggaggccatcaaccgggaggccgtgaaccacctgccccgggagctgatcttccaggtgtggcagcggtcctggcggtactggcacgacgagcagggcatgtccgagtcctacaccaagtaccggtacctgtgcatcatccagaaggccgtgtacatgcacgtgcggaagggctgcacctgcctgggccggggccacggccccggcggctggcggcccggccccccccctccccccccacccggcctggtgtagctagcaccagcctcaagaacacccgaatggagtctctaagctacataataccaacttacactttacaaaatgttgtcccccaaaatgtagccattcgtatctgctcctaataaaaagaaagtttcttcacattctctcgagaaaaaaaaaaaatggaaaaaaaaaaaacggaaaaaaaaaaaaggtaaaaaaaaaaaatataaaaaaaaaaaacataaaaaaaaaaaacgaaaaaaaaaaaacgtaaaaaaaaaaaactcaaaaaaaaaaaagataaaaaaaaaaaacctaaaaaaaaaaaatgtaaaaaaaaaaaagggaaaaaaaaaaaacgcaaaaaaaaaaaacacaaaaaaaaaaaatgcaaaaaaaaaaaatcgaaaaaaaaaaaatctaaaaaaaaaaaacgaaaaaaaaaaaacccaaaaaaaaaaaagacaaaaaaaaaaaatagaaaaaaaaaaagttaaaaaaaaaaaactgaaaaaaaaaaaatttaaaaaaaaaaaatctag

SEQ ID NO: 1287 - DNA, 3489 bp, synthetic construct
  misc_feature 1..3489: note = Synthetic
  source 1..3489: mol_type = other DNA
atgggcgtgaagatcatctcccgcaagtccctgggcacccagaacgtgtacgacatcggcgtggagaaggaccacaacttcctgctgaagaacggcctggtggcctccaactgcttcaactccggcggctccaagcggaccgccgacggctccgagttcgagtcccccaagaagaagcggaaggtgtccggcggctcctccggcggctccatggactccaccaaggagaagtgcgactcctacaaggacgacctgctgctgcggatgggcctgaacgacaacaaggccggcatggagggcctggacaaggagaagatcaacaagatcatcatggaggccaccaagggctcccggttctacggcaacgagctgaagaaggagaagcaggtgaaccagcggatcgagaacatgatgcagcagaaggcccagatcacctcccagcagctgcggaaggcccagctgcaggtggaccggttcgccatggagctggagcagtcccggaacctgtccaacaccatcgtgcacatcgacatggacgccttctacgccgccgtggagatgcgggacaaccccgagctgaaggacaagcccatcgccgtgggctccatgtccatgctgtccacctccaactaccacgcccggcggttcggcgtgcgggccgccatgcccggcttcatcgccaagcggctgtgcccccagctgatcatcgtgccccccaacttcgacaagtaccgggccgtgtccaaggaggtgaaggagatcctggccgactacgaccccaacttcatggccatgtccctggacgaggcctacctgaacatcaccaagcacctggaggagcggcagaactggcccgaggacaagcggcggtacttcatcaagatgggctcctccgtggagaacgacaaccccggcaaggaggtgaacaagctgtccgagcacgagcggtccatctcccccctgctgttcgaggagtccccctccgacgtgcagccccccggcgaccccttccaggtgaacttcgaggagcagaacaacccccagatcctgcagaactccgtggtgttcggcacctccgcccaggaggtggtgaaggagatccggttccggatcgagcagaagaccaccctgaccgcctccgccggcatcgcccccaacaccatgctggccaaggtgtgctccgacaagaacaagcccaacggccagtaccagatcctgcccaaccggcaggccgtgatggacttcatcaaggacctgcccatccggaaggtgtccggcatcggcaaggtgaccgagaagatgctgaaggccctgggcatcatcacctgcaccgagctgtaccagcagcgggccctgctgtccctgctgttctccgagacctcctggcactacttcctgcacatctccctgggcctgggctccacccacctgacccgggaccgggtgcggaagtccatgtccgtggagcggaccttctccgagatcaacaaggccgaggagcagtactccctgtgccaggagctgtgctccgagctggcccaggacctgcagaaggagcggctgaagggccggaccgtgaccatcaagctgaagaacgtgaacttcgaggtgaagacccgggcctccaccgtgtcctccgtggtgtccaccgccgaggagatcttcgccatcgccaaggagctgctgaagaccgagatcgacgccgacttcccccaccccctgcggctgcggctgatgggcgtgcggatctcctccttccccaacgaggaggaccggaagcaccagcagggcggcggctccggcaagcggaccgccgacggctccggcggcggctcccccaagaagaagcggaaggtgcccgccgccaagcgcgtgaagctggactccggctccgagacccccggcacctccgagtccgccacccccgagtccatgggcatccagggcctggccaagctgatcgccgacgtggccccctccgccatccgggagaacgacatcaagtcctacttcggccggaaggtggccatcgacgcctccatgtccatctaccagttcctgatcgccgtgcggcagggcggcgacgtgctgcagaacgaggagggcgagaccacctcccacctgatgggcatgttctaccggaccatccggatgatggagaacggcatcaagcccgtgtacgtgttcgacggcaagcccccccagctgaagtccggcgagctggccaagcggtccgagcggcgggccgaggccgagaagcagctgcagcaggcccaggccgccggcgccgagcaggaggtggagaagttcaccaagcggctggtgaaggtgaccaagcagcacaacgacgagtgcaagcacctgctgtccctgatgggcatcccctacctggacgccccctccgaggccgaggcctcctgcgccgccctggtgaaggccggcaaggtgtacgccgccgccaccgaggacatggactgcctgaccttcggctcccccgtgctgatgcggcacctgaccgcctccgaggccaagaagctgcccatccaggagttccacctgtcccggatcctgcaggagctgggcctgaaccaggagcagttcgtggacctgtgcatcctgctgggctccgactactgcgagtccatccggggcatcggccccaagcgggccgtggacctgatccagaagcacaagtccatcgaggagatcgtgcggcggctggaccccaacaagtaccccgtgcccgagaactggctgcacaaggaggcccaccagctgttcctggagcccgaggtgctggaccccgagtccgtggagctgaagtggtccgagcccaacgaggaggagctgatcaagttcatgtgcggcgagaagcagttctccgaggagcggatccggtccggcgtgaagcggctgtccaagtcccggcagggctccacccagggccggctggacgacttcttcaaggtgaccggctccctgtcctccgccaagcggaaggagcccgagcccaagggctccaccaagaagaaggccaagaccggcgccgccggcaagttcaagcggggcaagggctccggcgccaccaacttctccctgctgaagcaggccggcgacgtggaggagaaccccggccccatggccgccgccatgaccgacccccgggagaccgtgccccccggcaactccggcgaggagaccatcggcgaggccttcgcctggctgaaccggaccgtggaggccatcaaccgggaggccgtgaaccacctgccccgggagctgatcttccaggtgtggcagcggtcctggcggtactggcacgacgagcagggcatgtccgagtcctacaccaagtaccggtacctgtgcatcatccagaaggccgtgtacatgcacgtgcggaagggctgcacctgcctgggccggggccacggccccggcggctggcggcccggccccccccctccccccccacccggcctggtgtag

SEQ ID NO: 1288 - protein, 1162 aa, synthetic construct
  REGION 1..1162: note = Synthetic
MGVKIISRKSLGTQNVYDIGVEKDHNFLLKNGLVASNCFNSGGSKRTADGSEFESPKKKRKVSGGSSGGSMDSTKEKCDSYKDDLLLRMGLNDNKAGMEGLDKEKINKIIMEATKGSRFYGNELKKEKQVNQRIENMMQQKAQITSQQLRKAQLQVDRFAMELEQSRNLSNTIVHIDMDAFYAAVEMRDNPELKDKPIAVGSMSMLSTSNYHARRFGVRAAMPGFIAKRLCPQLIIVPPNFDKYRAVSKEVKEILADYDPNFMAMSLDEAYLNITKHLEERQNWPEDKRRYFIKMGSSVENDNPGKEVNKLSEHERSISPLLFEESPSDVQPPGDPFQVNFEEQNNPQILQNSVVFGTSAQEVVKEIRFRIEQKTTLTASAGIAPNTMLAKVCSDKNKPNGQYQILPNRQAVMDFIKDLPIRKVSGIGKVTEKMLKALGIITCTELYQQRALLSLLFSETSWHYFLHISLGLGSTHLTRDRVRKSMSVERTFSEINKAEEQYSLCQELCSELAQDLQKERLKGRTVTIKLKNVNFEVKTRASTVSSVVSTAEEIFAIAKELLKTEIDADFPHPLRLRLMGVRISSFPNEEDRKHQQGGGSGKRTADGSGGGSPKKKRKVPAAKRVKLDSGSETPGTSESATPESMGIQGLAKLIADVAPSAIRENDIKSYFGRKVAIDASMSIYQFLIAVRQGGDVLQNEEGETTSHLMGMFYRTIRMMENGIKPVYVFDGKPPQLKSGELAKRSERRAEAEKQLQQAQAAGAEQEVEKFTKRLVKVTKQHNDECKHLLSLMGIPYLDAPSEAEASCAALVKAGKVYAAATEDMDCLTFGSPVLMRHLTASEAKKLPIQEFHLSRILQELGLNQEQFVDLCILLGSDYCESIRGIGPKRAVDLIQKHKSIEEIVRRLDPNKYPVPENWLHKEAHQLFLEPEVLDPESVELKWSEPNEEELIKFMCGEKQFSEERIRSGVKRLSKSRQGSTQGRLDDFFKVTGSLSSAKRKEPEPKGSTKKKAKTGAAGKFKRGKGSGATNFSLLKQAGDVEENPGPMAAAMTDPRETVPPGNSGEETIGEAFAWLNRTVEAINREAVNHLPRELIFQVWQRSWRYWHDEQGMSESYTKYRYLCIIQKAVYMHVRKGCTCLGRGHGPGGWRPGPPPPPPPGLV

SEQ ID NO: 1289 - RNA, 4103 nt, synthetic construct
  misc_feature 1..4103: note = Synthetic
  source 1..4103: mol_type = other RNA
aggactcactatttgttttcgcgcccagttgcaaaaagtgtcgaagctcagaataaacgctcaactttggccggatctgccaccatgggcgtgaagatcatctcccgcaagtccctgggcacccagaacgtgtacgacatcggcgtggagaaggaccacaacttcctgctgaagaacggcctggtggcctccaactgcttcaactccggcggctccaagcggaccgccgacggctccgagttcgagtcccccaagaagaagcggaaggtgtccggcggctcctccggcggctccatggactccaccaaggagaagtgcgactcctacaaggacgacctgctgctgcggatgggcctgaacgacaacaaggccggcatggagggcctggacaaggagaagatcaacaagatcatcatggaggccaccaagggctcccggttctacggcaacgagctgaagaaggagaagcaggtgaaccagcggatcgagaacatgatgcagcagaaggcccagatcacctcccagcagctgcggaaggcccagctgcaggtggaccggttcgccatggagctggagcagtcccggaacctgtccaacaccatcgtgcacatcgacatggacgccttctacgccgccgtggagatgcgggacaaccccgagctgaaggacaagcccatcgccgtgggctccatgtccatgctgtccacctccaactaccacgcccggcggttcggcgtgcgggccgccatgcccggcttcatcgccaagcggctgtgcccccagctgatcatcgtgccccccaacttcgacaagtaccgggccgtgtccaaggaggtgaaggagatcctggccgactacgaccccaacttcatggccatgtccctggacgaggcctacctgaacatcaccaagcacctggaggagcggcagaactggcccgaggacaagcggcggtacttcatcaagatgggctcctccgtggagaacgacaaccccggcaaggaggtgaacaagctgtccgagcacgagcggtccatctcccccctgctgttcgaggagtccccctccgacgtgcagccccccggcgaccccttccaggtgaacttcgaggagcagaacaacccccagatcctgcagaactccgtggtgttcggcacctccgcccaggaggtggtgaaggagatccggttccggatcgagcagaagaccaccctgaccgcctccgccggcatcgcccccaacaccatgctggccaaggtgtgctccgacaagaacaagcccaacggccagtaccagatcctgcccaaccggcaggccgtgatggacttcatcaaggacctgcccatccggaaggtgtccggcatcggcaaggtgaccgagaagatgctgaaggccctgggcatcatcacctgcaccgagctgtaccagcagcgggccctgctgtccctgctgttctccgagacctcctggcactacttcctgcacatctccctgggcctgggctccacccacctgacccgggaccgggtgcggaagtccatgtccgtggagcggaccttctccgagatcaacaaggccgaggagcagtactccctgtgccaggagctgtgctccgagctggcccaggacctgcagaaggagcggctgaagggccggaccgtgaccatcaagctgaagaacgtgaacttcgaggtgaagacccgggcctccaccgtgtcctccgtggtgtccaccgccgaggagatcttcgccatcgccaaggagctgctgaagaccgagatcgacgccgacttcccccaccccctgcggctgcggctgatgggcgtgcggatctcctccttccccaacgaggaggaccggaagcaccagcagggcggcggctccggcaagcggaccgccgacggctccggcggcggctcccccaagaagaagcggaaggtgcccgccgccaagcgcgtgaagctggacggctccggcgagggccggggctccctgctgacctgcggcgacgtggaggagaaccccggccccatgggcatccagggcctggccaagctgatcgccgacgtggccccctccgccatccgggagaacgacatcaagtcctacttcggccggaaggtggccatcgacgcctccatgtccatctaccagttcctgatcgccgtgcggcagggcggcgacgtgctgcagaacgaggagggcgagaccacctcccacctgatgggcatgttctaccggaccatccggatgatggagaacggcatcaagcccgtgtacgtgttcgacggcaagcccccccagctgaagtccggcgagctggccaagcggtccgagcggcgggccgaggccgagaagcagctgcagcaggcccaggccgccggcgccgagcaggaggtggagaagttcaccaagcggctggtgaaggtgaccaagcagcacaacgacgagtgcaagcacctgctgtccctgatgggcatcccctacctggacgccccctccgaggccgaggcctcctgcgccgccctggtgaaggccggcaaggtgtacgccgccgccaccgaggacatggactgcctgaccttcggctcccccgtgctgatgcggcacctgaccgcctccgaggccaagaagctgcccatccaggagttccacctgtcccggatcctgcaggagctgggcctgaaccaggagcagttcgtggacctgtgcatcctgctgggctccgactactgcgagtccatccggggcatcggccccaagcgggccgtggacctgatccagaagcacaagtccatcgaggagatcgtgcggcggctggaccccaacaagtaccccgtgcccgagaactggctgcacaaggaggcccaccagctgttcctggagcccgaggtgctggaccccgagtccgtggagctgaagtggtccgagcccaacgaggaggagctgatcaagttcatgtgcggcgagaagcagttctccgaggagcggatccggtccggcgtgaagcggctgtccaagtcccggcagggctccacccagggccggctggacgacttcttcaaggtgaccggctccctgtcctccgccaagcggaaggagcccgagcccaagggctccaccaagaagaaggccaagaccggcgccgccggcaagttcaagcggggcaagggctccggcgccaccaacttctccctgctgaagcaggccggcgacgtggaggagaaccccggccccatggccgccgccatgaccgacccccgggagaccgtgccccccggcaactccggcgaggagaccatcggcgaggccttcgcctggctgaaccggaccgtggaggccatcaaccgggaggccgtgaaccacctgccccgggagctgatcttccaggtgtggcagcggtcctggcggtactggcacgacgagcagggcatgtccgagtcctacaccaagtaccggtacctgtgcatcatccagaaggccgtgtacatgcacgtgcggaagggctgcacctgcctgggccggggccacggccccggcggctggcggcccggccccccccctccccccccacccggcctggtgtagctagcaccagcctcaagaacacccgaatggagtctctaagctacataataccaacttacactttacaaaatgttgtcccccaaaatgtagccattcgtatctgctcctaataaaaagaaagtttcttcacattctctcgagaaaaaaaaaaaatggaaaaaaaaaaaacggaaaaaaaaaaaaggtaaaaaaaaaaaatataaaaaaaaaaaacataaaaaaaaaaaacgaaaaaaaaaaaacgtaaaaaaaaaaaactcaaaaaaaaaaaagataaaaaaaaaaaacctaaaaaaaaaaaatgtaaaaaaaaaaaagggaaaaaaaaaaaacgcaaaaaaaaaaaacacaaaaaaaaaaaatgcaaaaaaaaaaaatcgaaaaaaaaaaaatctaaaaaaaaaaaacgaaaaaaaaaaaacccaaaaaaaaaaaagacaaaaaaaaaaaatagaaaaaaaaaaagttaaaaaaaaaaaactgaaaaaaaaaaaatttaaaaaaaaaaaatctag

SEQ ID NO: 1290 - DNA, 3504 bp, synthetic construct
  misc_feature 1..3504: note = Synthetic
  source 1..3504: mol_type = other DNA
atgggcgtgaagatcatctcccgcaagtccctgggcacccagaacgtgtacgacatcggcgtggagaaggaccacaacttcctgctgaagaacggcctggtggcctccaactgcttcaactccggcggctccaagcggaccgccgacggctccgagttcgagtcccccaagaagaagcggaaggtgtccggcggctcctccggcggctccatggactccaccaaggagaagtgcgactcctacaaggacgacctgctgctgcggatgggcctgaacgacaacaaggccggcatggagggcctggacaaggagaagatcaacaagatcatcatggaggccaccaagggctcccggttctacggcaacgagctgaagaaggagaagcaggtgaaccagcggatcgagaacatgatgcagcagaaggcccagatcacctcccagcagctgcggaaggcccagctgcaggtggaccggttcgccatggagctggagcagtcccggaacctgtccaacaccatcgtgcacatcgacatggacgccttctacgccgccgtggagatgcgggacaaccccgagctgaaggacaagcccatcgccgtgggctccatgtccatgctgtccacctccaactaccacgcccggcggttcggcgtgcgggccgccatgcccggcttcatcgccaagcggctgtgcccccagctgatcatcgtgccccccaacttcgacaagtaccgggccgtgtccaaggaggtgaaggagatcctggccgactacgaccccaacttcatggccatgtccctggacgaggcctacctgaacatcaccaagcacctggaggagcggcagaactggcccgaggacaagcggcggtacttcatcaagatgggctcctccgtggagaacgacaaccccggcaaggaggtgaacaagctgtccgagcacgagcggtccatctcccccctgctgttcgaggagtccccctccgacgtgcagccccccggcgaccccttccaggtgaacttcgaggagcagaacaacccccagatcctgcagaactccgtggtgttcggcacctccgcccaggaggtggtgaaggagatccggttccggatcgagcagaagaccaccctgaccgcctccgccggcatcgcccccaacaccatgctggccaaggtgtgctccgacaagaacaagcccaacggccagtaccagatcctgcccaaccggcaggccgtgatggacttcatcaaggacctgcccatccggaaggtgtccggcatcggcaaggtgaccgagaagatgctgaaggccctgggcatcatcacctgcaccgagctgtaccagcagcgggccctgctgtccctgctgttctccgagacctcctggcactacttcctgcacatctccctgggcctgggctccacccacctgacccgggaccgggtgcggaagtccatgtccgtggagcggaccttctccgagatcaacaaggccgaggagcagtactccctgtgccaggagctgtgctccgagctggcccaggacctgcagaaggagcggctgaagggccggaccgtgaccatcaagctgaagaacgtgaacttcgaggtgaagacccgggcctccaccgtgtcctccgtggtgtccaccgccgaggagatcttcgccatcgccaaggagctgctgaagaccgagatcgacgccgacttcccccaccccctgcggctgcggctgatgggcgtgcggatctcctccttccccaacgaggaggaccggaagcaccagcagggcggcggctccggcaagcggaccgccgacggctccggcggcggctcccccaagaagaagcggaaggtgcccgccgccaagcgcgtgaagctggacggctccggcgagggccggggctccctgctgacctgcggcgacgtggaggagaaccccggccccatgggcatccagggcctggccaagctgatcgccgacgtggccccctccgccatccgggagaacgacatcaagtcctacttcggccggaaggtggccatcgacgcctccatgtccatctaccagttcctgatcgccgtgcggcagggcggcgacgtgctgcagaacgaggagggcgagaccacctcccacctgatgggcatgttctaccggaccatccggatgatggagaacggcatcaagcccgtgtacgtgttcgacggcaagcccccccagctgaagtccggcgagctggccaagcggtccgagcggcgggccgaggccgagaagcagctgcagcaggcccaggccgccggcgccgagcaggaggtggagaagttcaccaagcggctggtgaaggtgaccaagcagcacaacgacgagtgcaagcacctgctgtccctgatgggcatcccctacctggacgccccctccgaggccgaggcctcctgcgccgccctggtgaaggccggcaaggtgtacgccgccgccaccgaggacatggactgcctgaccttcggctcccccgtgctgatgcggcacctgaccgcctccgaggccaagaagctgcccatccaggagttccacctgtcccggatcctgcaggagctgggcctgaaccaggagcagttcgtggacctgtgcatcctgctgggctccgactactgcgagtccatccggggcatcggccccaagcgggccgtggacctgatccagaagcacaagtccatcgaggagatcgtgcggcggctggaccccaacaagtaccccgtgcccgagaactggctgcacaaggaggcccaccagctgttcctggagcccgaggtgctggaccccgagtccgtggagctgaagtggtccgagcccaacgaggaggagctgatcaagttcatgtgcggcgagaagcagttctccgaggagcggatccggtccggcgtgaagcggctgtccaagtcccggcagggctccacccagggccggctggacgacttcttcaaggtgaccggctccctgtcctccgccaagcggaaggagcccgagcccaagggctccaccaagaagaaggccaagaccggcgccgccggcaagttcaagcggggcaagggctccggcgccaccaacttctccctgctgaagcaggccggcgacgtggaggagaaccccggccccatggccgccgccatgaccgacccccgggagaccgtgccccccggcaactccggcgaggagaccatcggcgaggccttcgcctggctgaaccggaccgtggaggccatcaaccgggaggccgtgaaccacctgccccgggagctgatcttccaggtgtggcagcggtcctggcggtactggcacgacgagcagggcatgtccgagtcctacaccaagtaccggtacctgtgcatcatccagaaggccgtgtacatgcacgtgcggaagggctgcacctgcctgggccggggccacggccccggcggctggcggcccggccccccccctccccccccacccggcctggtgtag

SEQ ID NO: 1291 - protein, 1167 aa, synthetic construct
  REGION 1..1167: note = Synthetic
MGVKIISRKSLGTQNVYDIGVEKDHNFLLKNGLVASNCFNSGGSKRTADGSEFESPKKKRKVSGGSSGGSMDSTKEKCDSYKDDLLLRMGLNDNKAGMEGLDKEKINKIIMEATKGSRFYGNELKKEKQVNQRIENMMQQKAQITSQQLRKAQLQVDRFAMELEQSRNLSNTIVHIDMDAFYAAVEMRDNPELKDKPIAVGSMSMLSTSNYHARRFGVRAAMPGFIAKRLCPQLIIVPPNFDKYRAVSKEVKEILADYDPNFMAMSLDEAYLNITKHLEERQNWPEDKRRYFIKMGSSVENDNPGKEVNKLSEHERSISPLLFEESPSDVQPPGDPFQVNFEEQNNPQILQNSVVFGTSAQEVVKEIRFRIEQKTTLTASAGIAPNTMLAKVCSDKNKPNGQYQILPNRQAVMDFIKDLPIRKVSGIGKVTEKMLKALGIITCTELYQQRALLSLLFSETSWHYFLHISLGLGSTHLTRDRVRKSMSVERTFSEINKAEEQYSLCQELCSELAQDLQKERLKGRTVTIKLKNVNFEVKTRASTVSSVVSTAEEIFAIAKELLKTEIDADFPHPLRLRLMGVRISSFPNEEDRKHQQGGGSGKRTADGSGGGSPKKKRKVPAAKRVKLDGSGEGRGSLLTCGDVEENPGPMGIQGLAKLIADVAPSAIRENDIKSYFGRKVAIDASMSIYQFLIAVRQGGDVLQNEEGETTSHLMGMFYRTIRMMENGIKPVYVFDGKPPQLKSGELAKRSERRAEAEKQLQQAQAAGAEQEVEKFTKRLVKVTKQHNDECKHLLSLMGIPYLDAPSEAEASCAALVKAGKVYAAATEDMDCLTFGSPVLMRHLTASEAKKLPIQEFHLSRILQELGLNQEQFVDLCILLGSDYCESIRGIGPKRAVDLIQKHKSIEEIVRRLDPNKYPVPENWLHKEAHQLFLEPEVLDPESVELKWSEPNEEELIKFMCGEKQFSEERIRSGVKRLSKSRQGSTQGRLDDFFKVTGSLSSAKRKEPEPKGSTKKKAKTGAAGKFKRGKGSGATNFSLLKQAGDVEENPGPMAAAMTDPRETVPPGNSGEETIGEAFAWLNRTVEAINREAVNHLPRELIFQVWQRSWRYWHDEQGMSESYTKYRYLCIIQKAVYMHVRKGCTCLGRGHGPGGWRPGPPPPPPPGLV

SEQ ID NO: 1292 - RNA, 4103 nt, synthetic construct
  misc_feature 1..4103: note = Synthetic
  source 1..4103: mol_type = other RNA
aggactcactatttgttttcgcgcccagttgcaaaaagtgtcgaagctcagaataaacgctcaactttggccggatctgccaccatgggcgtgaagatcatctcccgcaagtccctgggcacccagaacgtgtacgacatcggcgtggagaaggaccacaacttcctgctgaagaacggcctggtggcctccaactgcttcaactccggcggctccaagcggaccgccgacggctccgagttcgagtcccccaagaagaagcggaaggtgtccggcggctcctccggcggctccatggactccaccaaggagaagtgcgactcctacaaggacgacctgctgctgcggatgggcctgaacgacaacaaggccggcatggagggcctggacaaggagaagatcaacaagatcatcatggaggccaccaagggctcccggttctacggcaacgagctgaagaaggagaagcaggtgaaccagcggatcgagaacatgatgcagcagaaggcccagatcacctcccagcagctgcggaaggcccagctgcaggtggaccggttcgccatggagctggagcagtcccggaacctgtccaacaccatcgtgcacatcgacatggacgccttctacgccgccgtggagatgcgggacaaccccgagctgaaggacaagcccatcgccgtgggctccatgtccatgctgtccacctccaactaccacgcccggcggttcggcgtgcgggccgccatgcccggcttcatcgccaagcggctgtgcccccagctgatcatcgtgccccccaacttcgacaagtaccgggccgtgtccaaggaggtgaaggagatcctggccgactacgaccccaacttcatggccatgtccctggacgaggcctacctgaacatcaccaagcacctggaggagcggcagaactggcccgaggacaagcggcggtacttcatcaagatgggctcctccgtggagaacgacaaccccggcaaggaggtgaacaagctgtccgagcacgagcggtccatctcccccctgctgttcgaggagtccccctccgacgtgcagccccccggcgaccccttccaggtgaacttcgaggagcagaacaacccccagatcctgcagaactccgtggtgttcggcacctccgcccaggaggtggtgaaggagatccggttccggatcgagcagaagaccaccctgaccgcctccgccggcatcgcccccaacaccatgctggccaaggtgtgctccgacaagaacaagcccaacggccagtaccagatcctgcccaaccggcaggccgtgatggacttcatcaaggacctgcccatccggaaggtgtccggcatcggcaaggtgaccgagaagatgctgaaggccctgggcatcatcacctgcaccgagctgtaccagcagcgggccctgctgtccctgctgttctccgagacctcctggcactacttcctgcacatctccctgggcctgggctccacccacctgacccgggaccgggtgcggaagtccatgtccgtggagcggaccttctccgagatcaacaaggccgaggagcagtactccctgtgccaggagctgtgctccgagctggcccaggacctgcagaaggagcggctgaagggccggaccgtgaccatcaagctgaagaacgtgaacttcgaggtgaagacccgggcctccaccgtgtcctccgtggtgtccaccgccgaggagatcttcgccatcgccaaggagctgctgaagaccgagatcgacgccgacttcccccaccccctgcggctgcggctgatgggcgtgcggatctcctccttccccaacgaggaggaccggaagcaccagcagggcggcggctccggcaagcggaccgccgacggctccggcggcggctcccccaagaagaagcggaaggtgcccgccgccaagcgcgtgaagctggacggctccggcgagggccggggctccctgctgacctgcggcgacgtggaggagaaccccggccccatggccgccgccatgaccgacccccgggagaccgtgccccccggcaactccggcgaggagaccatcggcgaggccttcgcctggctgaaccggaccgtggaggccatcaaccgggaggccgtgaaccacctgccccgggagctgatcttccaggtgtggcagcggtcctggcggtactggcacgacgagcagggcatgtccgagtcctacaccaagtaccggtacctgtgcatcatccagaaggccgtgtacatgcacgtgcggaagggctgcacctgcctgggccggggccacggccccggcggctggcggcccggccccccccctccccccccacccggcctggtgggctccggcgccaccaacttctccctgctgaagcaggccggcgacgtggaggagaaccccggccccatgggcatccagggcctggccaagctgatcgccgacgtggccccctccgccatccgggagaacgacatcaagtcctacttcggccggaaggtggccatcgacgcctccatgtccatctaccagttcctgatcgccgtgcggcagggcggcgacgtgctgcagaacgaggagggcgagaccacctcccacctgatgggcatgttctaccggaccatccggatgatggagaacggcatcaagcccgtgtacgtgttcgacggcaagcccccccagctgaagtccggcgagctggccaagcggtccgagcggcgggccgaggccgagaagcagctgcagcaggcccaggccgccggcgccgagcaggaggtggagaagttcaccaagcggctggtgaaggtgaccaagcagcacaacgacgagtgcaagcacctgctgtccctgatgggcatcccctacctggacgccccctccgaggccgaggcctcctgcgccgccctggtgaaggccggcaaggtgtacgccgccgccaccgaggacatggactgcctgaccttcggctcccccgtgctgatgcggcacctgaccgcctccgaggccaagaagctgcccatccaggagttccacctgtcccggatcctgcaggagctgggcctgaaccaggagcagttcgtggacctgtgcatcctgctgggctccgactactgcgagtccatccggggcatcggccccaagcgggccgtggacctgatccagaagcacaagtccatcgaggagatcgtgcggcggctggaccccaacaagtaccccgtgcccgagaactggctgcacaaggaggcccaccagctgttcctggagcccgaggtgctggaccccgagtccgtggagctgaagtggtccgagcccaacgaggaggagctgatcaagttcatgtgcggcgagaagcagttctccgaggagcggatccggtccggcgtgaagcggctgtccaagtcccggcagggctccacccagggccggctggacgacttcttcaaggtgaccggctccctgtcctccgccaagcggaaggagcccgagcccaagggctccaccaagaagaaggccaagaccggcgccgccggcaagttcaagcggggcaagtagctagcaccagcctcaagaacacccgaatggagtctctaagctacataataccaacttacactttacaaaatgttgtcccccaaaatgtagccattcgtatctgctcctaataaaaagaaagtttcttcacattctctcgagaaaaaaaaaaaatggaaaaaaaaaaaacggaaaaaaaaaaaaggtaaaaaaaaaaaatataaaaaaaaaaaacataaaaaaaaaaaacgaaaaaaaaaaaacgtaaaaaaaaaaaactcaaaaaaaaaaaagataaaaaaaaaaaacctaaaaaaaaaaaatgtaaaaaaaaaaaagggaaaaaaaaaaaacgcaaaaaaaaaaaacacaaaaaaaaaaaatgcaaaaaaaaaaaatcgaaaaaaaaaaaatctaaaaaaaaaaaacgaaaaaaaaaaaacccaaaaaaaaaaaagacaaaaaaaaaaaatagaaaaaaaaaaagttaaaaaaaaaaaactgaaaaaaaaaaaatttaaaaaaaaaaaatctag

SEQ ID NO: 1293 - DNA, 3504 bp, synthetic construct
  misc_feature 1..3504: note = Synthetic
  source 1..3504: mol_type = other DNA
atgggcgtgaagatcatctcccgcaagtccctgggcacccagaacgtgtacgacatcggcgtggagaaggaccacaacttcctgctgaagaacggcctggtggcctccaactgcttcaactccggcggctccaagcggaccgccgacggctccgagttcgagtcccccaagaagaagcggaaggtgtccggcggctcctccggcggctccatggactccaccaaggagaagtgcgactcctacaaggacgacctgctgctgcggatgggcctgaacgacaacaaggccggcatggagggcctggacaaggagaagatcaacaagatcatcatggaggccaccaagggctcccggttctacggcaacgagctgaagaaggagaagcaggtgaaccagcggatcgagaacatgatgcagcagaaggcccagatcacctcccagcagctgcggaaggcccagctgcaggtggaccggttcgccatggagctggagcagtcccggaacctgtccaacaccatcgtgcacatcgacatggacgccttctacgccgccgtggagatgcgggacaaccccgagctgaaggacaagcccatcgccgtgggctccatgtccatgctgtccacctccaactaccacgcccggcggttcggcgtgcgggccgccatgcccggcttcatcgccaagcggctgtgcccccagctgatcatcgtgccccccaacttcgacaagtaccgggccgtgtccaaggaggtgaaggagatcctggccgactacgaccccaacttcatggccatgtccctggacgaggcctacctgaacatcaccaagcacctggaggagcggcagaactggcccgaggacaagcggcggtacttcatcaagatgggctcctccgtggagaacgacaaccccggcaaggaggtgaacaagctgtccgagcacgagcggtccatctcccccctgctgttcgaggagtccccctccgacgtgcagccccccggcgaccccttccaggtgaacttcgaggagcagaacaacccccagatcctgcagaactccgtggtgttcggcacctccgcccaggaggtggtgaaggagatccggttccggatcgagcagaagaccaccctgaccgcctccgccggcatcgcccccaacaccatgctggccaaggtgtgctccgacaagaacaagcccaacggccagtaccagatcctgcccaaccggcaggccgtgatggacttcatcaaggacctgcccatccggaaggtgtccggcatcggcaaggtgaccgagaagatgctgaaggccctgggcatcatcacctgcaccgagctgtaccagcagcgggccctgctgtccctgctgttctccgagacctcctggcactacttcctgcacatctccctgggcctgggctccacccacctgacccgggaccgggtgcggaagtccatgtccgtggagcggaccttctccgagatcaacaaggccgaggagcagtactccctgtgccaggagctgtgctccgagctggcccaggacctgcagaaggagcggctgaagggccggaccgtgaccatcaagctgaagaacgtgaacttcgaggtgaagacccgggcctccaccgtgtcctccgtggtgtccaccgccgaggagatcttcgccatcgccaaggagctgctgaagaccgagatcgacgccgacttcccccaccccctgcggctgcggctgatgggcgtgcggatctcctccttccccaacgaggaggaccggaagcaccagcagggcggcggctccggcaagcggaccgccgacggctccggcggcggctcccccaagaagaagcggaaggtgcccgccgccaagcgcgtgaagctggacggctccggcgagggccggggctccctgctgacctgcggcgacgtggaggagaaccccggccccatggccgccgccatgaccgacccccgggagaccgtgccccccggcaactccggcgaggagaccatcggcgaggccttcgcctggctgaaccggaccgtggaggccatcaaccgggaggccgtgaaccacctgccccgggagctgatcttccaggtgtggcagcggtcctggcggtactggcacgacgagcagggcatgtccgagtcctacaccaagtaccggtacctgtgcatcatccagaaggccgtgtacatgcacgtgcggaagggctgcacctgcctgggccggggccacggccccggcggctggcggcccggccccccccctccccccccacccggcctggtgggctccggcgccaccaacttctccctgctgaagcaggccggcgacgtggaggagaaccccggccccatgggcatccagggcctggccaagctgatcgccgacgtggccccctccgccatccgggagaacgacatcaagtcctacttcggccggaaggtggccatcgacgcctccatgtccatctaccagttcctgatcgccgtgcggcagggcggcgacgtgctgcagaacgaggagggcgagaccacctcccacctgatgggcatgttctaccggaccatccggatgatggagaacggcatcaagcccgtgtacgtgttcgacggcaagcccccccagctgaagtccggcgagctggccaagcggtccgagcggcgggccgaggccgagaagcagctgcagcaggcccaggccgccggcgccgagcaggaggtggagaagttcaccaagcggctggtgaaggtgaccaagcagcacaacgacgagtgcaagcacctgctgtccctgatgggcatcccctacctggacgccccctccgaggccgaggcctcctgcgccgccctggtgaaggccggcaaggtgtacgccgccgccaccgaggacatggactgcctgaccttcggctcccccgtgctgatgcggcacctgaccgcctccgaggccaagaagctgcccatccaggagttccacctgtcccggatcctgcaggagctgggcctgaaccaggagcagttcgtggacctgtgcatcctgctgggctccgactactgcgagtccatccggggcatcggccccaagcgggccgtggacctgatccagaagcacaagtccatcgaggagatcgtgcggcggctggaccccaacaagtaccccgtgcccgagaactggctgcacaaggaggcccaccagctgttcctggagcccgaggtgctggaccccgagtccgtggagctgaagtggtccgagcccaacgaggaggagctgatcaagttcatgtgcggcgagaagcagttctccgaggagcggatccggtccggcgtgaagcggctgtccaagtcccggcagggctccacccagggccggctggacgacttcttcaaggtgaccggctccctgtcctccgccaagcggaaggagcccgagcccaagggctccaccaagaagaaggccaagaccggcgccgccggcaagttcaagcggggcaagtag

SEQ ID NO: 1294 - protein, 1167 aa, synthetic construct
  REGION 1..1167: note = Synthetic
MGVKIISRKSLGTQNVYDIGVEKDHNFLLKNGLVASNCFNSGGSKRTADGSEFESPKKKRKVSGGSSGGSMDSTKEKCDSYKDDLLLRMGLNDNKAGMEGLDKEKINKIIMEATKGSRFYGNELKKEKQVNQRIENMMQQKAQITSQQLRKAQLQVDRFAMELEQSRNLSNTIVHIDMDAFYAAVEMRDNPELKDKPIAVGSMSMLSTSNYHARRFGVRAAMPGFIAKRLCPQLIIVPPNFDKYRAVSKEVKEILADYDPNFMAMSLDEAYLNITKHLEERQNWPEDKRRYFIKMGSSVENDNPGKEVNKLSEHERSISPLLFEESPSDVQPPGDPFQVNFEEQNNPQILQNSVVFGTSAQEVVKEIRFRIEQKTTLTASAGIAPNTMLAKVCSDKNKPNGQYQILPNRQAVMDFIKDLPIRKVSGIGKVTEKMLKALGIITCTELYQQRALLSLLFSETSWHYFLHISLGLGSTHLTRDRVRKSMSVERTFSEINKAEEQYSLCQELCSELAQDLQKERLKGRTVTIKLKNVNFEVKTRASTVSSVVSTAEEIFAIAKELLKTEIDADFPHPLRLRLMGVRISSFPNEEDRKHQQGGGSGKRTADGSGGGSPKKKRKVPAAKRVKLDGSGEGRGSLLTCGDVEENPGPMAAAMTDPRETVPPGNSGEETIGEAFAWLNRTVEAINREAVNHLPRELIFQVWQRSWRYWHDEQGMSESYTKYRYLCIIQKAVYMHVRKGCTCLGRGHGPGGWRPGPPPPPPPGLVGSGATNFSLLKQAGDVEENPGPMGIQGLAKLIADVAPSAIRENDIKSYFGRKVAIDASMSIYQFLIAVRQGGDVLQNEEGETTSHLMGMFYRTIRMMENGIKPVYVFDGKPPQLKSGELAKRSERRAEAEKQLQQAQAAGAEQEVEKFTKRLVKVTKQHNDECKHLLSLMGIPYLDAPSEAEASCAALVKAGKVYAAATEDMDCLTFGSPVLMRHLTASEAKKLPIQEFHLSRILQELGLNQEQFVDLCILLGSDYCESIRGIGPKRAVDLIQKHKSIEEIVRRLDPNKYPVPENWLHKEAHQLFLEPEVLDPESVELKWSEPNEEELIKFMCGEKQFSEERIRSGVKRLSKSRQGSTQGRLDDFFKVTGSLSSAKRKEPEPKGSTKKKAKTGAAGKFKRGK

SEQ ID NO: 1295 - RNA, 4316 nt, synthetic construct
  misc_feature 1..4316: note = Synthetic
  source 1..4316: mol_type = other RNA
aggactcactatttgttttcgcgcccagttgcaaaaagtgtcgaagctcagaataaacgctcaactttggccggatctgccaccatgggcgtgaagatcatctcccgcaagtccctgggcacccagaacgtgtacgacatcggcgtggagaaggaccacaacttcctgctgaagaacggcctggtggcctccaactgcttcaactccggcggctccaagcggaccgccgacggctccgagttcgagtcccccaagaagaagcggaaggtgtccggcggctcctccggcggctccatggactccaccaaggagaagtgcgactcctacaaggacgacctgctgctgcggatgggcctgaacgacaacaaggccggcatggagggcctggacaaggagaagatcaacaagatcatcatggaggccaccaagggctcccggttctacggcaacgagctgaagaaggagaagcaggtgaaccagcggatcgagaacatgatgcagcagaaggcccagatcacctcccagcagctgcggaaggcccagctgcaggtggaccggttcgccatggagctggagcagtcccggaacctgtccaacaccatcgtgcacatcgacatggacgccttctacgccgccgtggagatgcgggacaaccccgagctgaaggacaagcccatcgccgtgggctccatgtccatgctgtccacctccaactaccacgcccggcggttcggcgtgcgggccgccatgcccggcttcatcgccaagcggctgtgcccccagctgatcatcgtgccccccaacttcgacaagtaccgggccgtgtccaaggaggtgaaggagatcctggccgactacgaccccaacttcatggccatgtccctggacgaggcctacctgaacatcaccaagcacctggaggagcggcagaactggcccgaggacaagcggcggtacttcatcaagatgggctcctccgtggagaacgacaaccccggcaaggaggtgaacaagctgtccgagcacgagcggtccatctcccccctgctgttcgaggagtccccctccgacgtgcagccccccggcgaccccttccaggtgaacttcgaggagcagaacaacccccagatcctgcagaactccgtggtgttcggcacctccgcccaggaggtggtgaaggagatccggttccggatcgagcagaagaccaccctgaccgcctccgccggcatcgcccccaacaccatgctggccaaggtgtgctccgacaagaacaagcccaacggccagtaccagatcctgcccaaccggcaggccgtgatggacttcatcaaggacctgcccatccggaaggtgtccggcatcggcaaggtgaccgagaagatgctgaaggccctgggcatcatcacctgcaccgagctgtaccagcagcgggccctgctgtccctgctgttctccgagacctcctggcactacttcctgcacatctccctgggcctgggctccacccacctgacccgggaccgggtgcggaagtccatgtccgtggagcggaccttctccgagatcaacaaggccgaggagcagtactccctgtgccaggagctgtgctccgagctggcccaggacctgcagaaggagcggctgaagggccggaccgtgaccatcaagctgaagaacgtgaacttcgaggtgaagacccgggcctccaccgtgtcctccgtggtgtccaccgccgaggagatcttcgccatcgccaaggagctgctgaagaccgagatcgacgccgacttcccccaccccctgcggctgcggctgatgggcgtgcggatctcctccttccccaacgaggaggaccggaagcaccagcagggcggcggctccggcaagcggaccgccgacggctccggcggcggctcccccaagaagaagcggaaggtgcccgccgccaagcgcgtgaagctggactccggctccgagacccccggcacctccgagtccgccacccccgagtccatcgccgccctggagaaggagatcgccgccctggagaaggagaacgccgccctggagtgggagatcgccgccctggagaagggctccggcgagggccggggctccctgctgacctgcggcgacgtggaggagaaccccggccccatgggcatccagggcctggccaagctgatcgccgacgtggccccctccgccatccgggagaacgacatcaagtcctacttcggccggaaggtggccatcgacgcctccatgtccatctaccagttcctgatcgccgtgcggcagggcggcgacgtgctgcagaacgaggagggcgagaccacctcccacctgatgggcatgttctaccggaccatccggatgatggagaacggcatcaagcccgtgtacgtgttcgacggcaagcccccccagctgaagtccggcgagctggccaagcggtccgagcggcgggccgaggccgagaagcagctgcagcaggcccaggccgccggcgccgagcaggaggtggagaagttcaccaagcggctggtgaaggtgaccaagcagcacaacgacgagtgcaagcacctgctgtccctgatgggcatcccctacctggacgccccctccgaggccgaggcctcctgcgccgccctggtgaaggccggcaaggtgtacgccgccgccaccgaggacatggactgcctgaccttcggctcccccgtgctgatgcggcacctgaccgcctccgaggccaagaagctgcccatccaggagttccacctgtcccggatcctgcaggagctgggcctgaaccaggagcagttcgtggacctgtgcatcctgctgggctccgactactgcgagtccatccggggcatcggccccaagcgggccgtggacctgatccagaagcacaagtccatcgaggagatcgtgcggcggctggaccccaacaagtaccccgtgcccgagaactggctgcacaaggaggcccaccagctgttcctggagcccgaggtgctggaccccgagtccgtggagctgaagtggtccgagcccaacgaggaggagctgatcaagttcatgtgcggcgagaagcagttctccgaggagcggatccggtccggcgtgaagcggctgtccaagtcccggcagggctccacccagggccggctggacgacttcttcaaggtgaccggctccctgtcctccgccaagcggaaggagcccgagcccaagggctccaccaagaagaaggccaagaccggcgccgccggcaagttcaagcggggcaagaagatcgccgccctgaaggagaagatcgccgccctgaaggagaagaacgccgccctgaagtggaagatcgccgccctgaaggagggctccggcgccaccaacttctccctgctgaagcaggccggcgacgtggaggagaaccccggccccatggccgccgccatgaccgacccccgggagaccgtgccccccggcaactccggcgaggagaccatcggcgaggccttcgcctggctgaaccggaccgtggaggccatcaaccgggaggccgtgaaccacctgccccgggagctgatcttccaggtgtggcagcggtcctggcggtactggcacgacgagcagggcatgtccgagtcctacaccaagtaccggtacctgtgcatcatccagaaggccgtgtacatgcacgtgcggaagggctgcacctgcctgggccggggccacggccccggcggctggcggcccggccccccccctccccccccacccggcctggtgtagctagcaccagcctcaagaacacccgaatggagtctctaagctacataataccaacttacactttacaaaatgttgtcccccaaaatgtagccattcgtatctgctcctaataaaaagaaagtttcttcacattctctcgagaaaaaaaaaaaatggaaaaaaaaaaaacggaaaaaaaaaaaaggtaaaaaaaaaaaatataaaaaaaaaaaacataaaaaaaaaaaacgaaaaaaaaaaaacgtaaaaaaaaaaaactcaaaaaaaaaaaagataaaaaaaaaaaacctaaaaaaaaaaaatgtaaaaaaaaaaaagggaaaaaaaaaaaacgcaaaaaaaaaaaacacaaaaaaaaaaaatgcaaaaaaaaaaaatcgaaaaaaaaaaaatctaaaaaaaaaaaacgaaaaaaaaaaaacccaaaaaaaaaaaagacaaaaaaaaaaaatagaaaaaaaaaaagttaaaaaaaaaaaactgaaaaaaaaaaaatttaaaaaaaaaaaatctag

SEQ ID NO: 1296 - DNA, 3717 bp, synthetic construct
  misc_feature 1..3717: note = Synthetic
  source 1..3717: mol_type = other DNA
atgggcgtgaagatcatctcccgcaagtccctgggcacccagaacgtgtacgacatcggcgtggagaaggaccacaacttcctgctgaagaacggcctggtggcctccaactgcttcaactccggcggctccaagcggaccgccgacggctccgagttcgagtcccccaagaagaagcggaaggtgtccggcggctcctccggcggctccatggactccaccaaggagaagtgcgactcctacaaggacgacctgctgctgcggatgggcctgaacgacaacaaggccggcatggagggcctggacaaggagaagatcaacaagatcatcatggaggccaccaagggctcccggttctacggcaacgagctgaagaaggagaagcaggtgaaccagcggatcgagaacatgatgcagcagaaggcccagatcacctcccagcagctgcggaaggcccagctgcaggtggaccggttcgccatggagctggagcagtcccggaacctgtccaacaccatcgtgcacatcgacatggacgccttctacgccgccgtggagatgcgggacaaccccgagctgaaggacaagcccatcgccgtgggctccatgtccatgctgtccacctccaactaccacgcccggcggttcggcgtgcgggccgccatgcccggcttcatcgccaagcggctgtgcccccagctgatcatcgtgccccccaacttcgacaagtaccgggccgtgtccaaggaggtgaaggagatcctggccgactacgaccccaacttcatggccatgtccctggacgaggcctacctgaacatcaccaagcacctggaggagcggcagaactggcccgaggacaagcggcggtacttcatcaagatgggctcctccgtggagaacgacaaccccggcaaggaggtgaacaagctgtccgagcacgagcggtccatctcccccctgctgttcgaggagtccccctccgacgtgcagccccccggcgaccccttccaggtgaacttcgaggagcagaacaacccccagatcctgcagaactccgtggtgttcggcacctccgcccaggaggtggtgaaggagatccggttccggatcgagcagaagaccaccctgaccgcctccgccggcatcgcccccaacaccatgctggccaaggtgtgctccgacaagaacaagcccaacggccagtaccagatcctgcccaaccggcaggccgtgatggacttcatcaaggacctgcccatccggaaggtgtccggcatcggcaaggtgaccgagaagatgctgaaggccctgggcatcatcacctgcaccgagctgtaccagcagcgggccctgctgtccctgctgttctccgagacctcctggcactacttcctgcacatctccctgggcctgggctccacccacctgacccgggaccgggtgcggaagtccatgtccgtggagcggaccttctccgagatcaacaaggccgaggagcagtactccctgtgccaggagctgtgctccgagctggcccaggacctgcagaaggagcggctgaagggccggaccgtgaccatcaagctgaagaacgtgaacttcgaggtgaagacccgggcctccaccgtgtcctccgtggtgtccaccgccgaggagatcttcgccatcgccaaggagctgctgaagaccgagatcgacgccgacttcccccaccccctgcggctgcggctgatgggcgtgcggatctcctccttccccaacgaggaggaccggaagcaccagcagggcggcggctccggcaagcggaccgccgacggctccggcggcggctcccccaagaagaagcggaaggtgcccgccgccaagcgcgtgaagctggactccggctccgagacccccggcacctccgagtccgccacccccgagtccatcgccgccctggagaaggagatcgccgccctggagaaggagaacgccgccctggagtgggagatcgccgccctggagaagggctccggcgagggccggggctccctgctgacctgcggcgacgtggaggagaaccccggccccatgggcatccagggcctggccaagctgatcgccgacgtggccccctccgccatccgggagaacgacatcaagtcctacttcggccggaaggtggccatcgacgcctccatgtccatctaccagttcctgatcgccgtgcggcagggcggcgacgtgctgcagaacgaggagggcgagaccacctcccacctgatgggcatgttctaccggaccatccggatgatggagaacggcatcaagcccgtgtacgtgttcgacggcaagcccccccagctgaagtccggcgagctggccaagcggtccgagcggcgggccgaggccgagaagcagctgcagcaggcccaggccgccggcgccgagcaggaggtggagaagttcaccaagcggctggtgaaggtgaccaagcagcacaacgacgagtgcaagcacctgctgtccctgatgggcatcccctacctggacgccccctccgaggccgaggcctcctgcgccgccctggtgaaggccggcaaggtgtacgccgccgccaccgaggacatggactgcctgaccttcggctcccccgtgctgatgcggcacctgaccgcctccgaggccaagaagctgcccatccaggagttccacctgtcccggatcctgcaggagctgggcctgaaccaggagcagttcgtggacctgtgcatcctgctgggctccgactactgcgagtccatccggggcatcggccccaagcgggccgtggacctgatccagaagcacaagtccatcgaggagatcgtgcggcggctggaccccaacaagtaccccgtgcccgagaactggctgcacaaggaggcccaccagctgttcctggagcccgaggtgctggaccccgagtccgtggagctgaagtggtccgagcccaacgaggaggagctgatcaagttcatgtgcggcgagaagcagttctccgaggagcggatccggtccggcgtgaagcggctgtccaagtcccggcagggctccacccagggccggctggacgacttcttcaaggtgaccggctccctgtcctccgccaagcggaaggagcccgagcccaagggctccaccaagaagaaggccaagaccggcgccgccggcaagttcaagcggggcaagaagatcgccgccctgaaggagaagatcgccgccctgaaggagaagaacgccgccctgaagtggaagatcgccgccctgaaggagggctccggcgccaccaacttctccctgctgaagcaggccggcgacgtggaggagaaccccggccccatggccgccgccatgaccgacccccgggagaccgtgccccccggcaactccggcgaggagaccatcggcgaggccttcgcctggctgaaccggaccgtggaggccatcaaccgggaggccgtgaaccacctgccccgggagctgatcttccaggtgtggcagcggtcctggcggtactggcacgacgagcagggcatgtccgagtcctacaccaagtaccggtacctgtgcatcatccagaaggccgtgtacatgcacgtgcggaagggctgcacctgcctgggccggggccacggccccggcggctggcggcccggccccccccctccccccccacccggcctggtgtag

SEQ ID NO: 1297 - protein, 1238 aa, synthetic construct
  REGION 1..1238: note = Synthetic
MGVKIISRKSLGTQNVYDIGVEKDHNFLLKNGLVASNCFNSGGSKRTADGSEFESPKKKRKVSGGSSGGSMDSTKEKCDSYKDDLLLRMGLNDNKAGMEGLDKEKINKIIMEATKGSRFYGNELKKEKQVNQRIENMMQQKAQITSQQLRKAQLQVDRFAMELEQSRNLSNTIVHIDMDAFYAAVEMRDNPELKDKPIAVGSMSMLSTSNYHARRFGVRAAMPGFIAKRLCPQLIIVPPNFDKYRAVSKEVKEILADYDPNFMAMSLDEAYLNITKHLEERQNWPEDKRRYFIKMGSSVENDNPGKEVNKLSEHERSISPLLFEESPSDVQPPGDPFQVNFEEQNNPQILQNSVVFGTSAQEVVKEIRFRIEQKTTLTASAGIAPNTMLAKVCSDKNKPNGQYQILPNRQAVMDFIKDLPIRKVSGIGKVTEKMLKALGIITCTELYQQRALLSLLFSETSWHYFLHISLGLGSTHLTRDRVRKSMSVERTFSEINKAEEQYSLCQELCSELAQDLQKERLKGRTVTIKLKNVNFEVKTRASTVSSVVSTAEEIFAIAKELLKTEIDADFPHPLRLRLMGVRISSFPNEEDRKHQQGGGSGKRTADGSGGGSPKKKRKVPAAKRVKLDSGSETPGTSESATPESIAALEKEIAALEKENAALEWEIAALEKGSGEGRGSLLTCGDVEENPGPMGIQGLAKLIADVAPSAIRENDIKSYFGRKVAIDASMSIYQFLIAVRQGGDVLQNEEGETTSHLMGMFYRTIRMMENGIKPVYVFDGKPPQLKSGELAKRSERRAEAEKQLQQAQAAGAEQEVEKFTKRLVKVTKQHNDECKHLLSLMGIPYLDAPSEAEASCAALVKAGKVYAAATEDMDCLTFGSPVLMRHLTASEAKKLPIQEFHLSRILQELGLNQEQFVDLCILLGSDYCESIRGIGPKRAVDLIQKHKSIEEIVRRLDPNKYPVPENWLHKEAHQLFLEPEVLDPESVELKWSEPNEEELIKFMCGEKQFSEERIRSGVKRLSKSRQGSTQGRLDDFFKVTGSLSSAKRKEPEPKGSTKKKAKTGAAGKFKRGKKIAALKEKIAALKEKNAALKWKIAALKEGSGATNFSLLKQAGDVEENPGPMAAAMTDPRETVPPGNSGEETIGEAFAWLNRTVEAINREAVNHLPRELIFQVWQRSWRYWHDEQGMSESYTKYRYLCIIQKAVYMHVRKGCTCLGRGHGPGGWRPGPPPPPPPGLV

SEQ ID NO: 1298 - RNA, 7202 nt, synthetic construct
  misc_feature 1..7202: note = Synthetic
  source 1..7202: mol_type = other RNA
aggactcactatttgttttcgcgcccagttgcaaaaagtgtcgaagctcagaataaacgctcaactttggccggatctgccaccatgggcaagcggcccgccgccaccaagaaggccggccaggccaagaagaagaagtccggctccgagacccccggcacctccgagtccgccacccccgagtccggcaagggcgaccccaagaagccccggggcaagatgtcctcctacgccttcttcgtgcagacctgccgggaggagcacaagaagaagcaccccgacgcctccgtgaacttctccgagttctccaagaagtgctccgagcggtggaagaccatgtccgccaaggagaagggcaagttcgaggacatggccaaggccgacaaggcccggtacgagcgggagatgaagacctacatcccccccaagggcgagaccaagaagaagttcaaggaccccaacgcccccaagcggcccccctccgccttcttcctgttctgctccgagtaccggcccaagatcaagggcgagcaccccggcctgtccatcggcgacgtggccaagaagctgggcgagatgtggaacaacaccgccgccgacgacaagcagccctacgagaagaaggccgccaagctgaaggagaagtacgagaaggacatcgccgcctaccgggccaagggcaagcccgacgccgccaagaagggcgtggtgaaggccgagaagtccaagaagaagaagggcaccaaggactccaccaaggacatccccgagaccccctccaaggacggcaccaaggactccaccaaggacatccccgagaccccctccaaggacgacaagaagtactccatcggcctggacatcggcaccaactccgtgggctgggccgtgatcaccgacgagtacaaggtgccctccaagaagttcaaggtgctgggcaacaccgaccggcactccatcaagaagaacctgatcggcgccctgctgttcgactccggcgagaccgccgaggccacccggctgaagcggaccgcccggcggcggtacacccggcggaagaaccggatctgctacctgcaggagatcttctccaacgagatggccaaggtggacgactccttcttccaccggctggaggagtccttcctggtggaggaggacaagaagcacgagcggcaccccatcttcggcaacatcgtggacgaggtggcctaccacgagaagtaccccaccatctaccacctgcggaagaagctggtggactccaccgacaaggccgacctgcggctgatctacctggccctggcccacatgatcaagttccggggccacttcctgatcgagggcgacctgaaccccgacaactccgacgtggacaagctgttcatccagctggtgcagacctacaaccagctgttcgaggagaaccccatcaacgcctccggcgtggacgccaaggccatcctgtccgcccggctgtccaagtcccggcggctggagaacctgatcgcccagctgcccggcgagaagaagaacggcctgttcggcaacctgatcgccctgtccctgggcctgacccccaacttcaagtccaacttcgacctggccgaggacgccaagctgcagctgtccaaggacacctacgacgacgacctggacaacctgctggcccagatcggcgaccagtacgccgacctgttcctggccgccaagaacctgtccgacgccatcctgctgtccgacatcctgcgggtgaacaccgagatcaccaaggcccccctgtccgcctccatgatcaagcggtacgacgagcaccaccaggacctgaccctgctgaaggccctggtgcggcagcagctgcccgagaagtacaaggagatcttcttcgaccagtccaagaacggctacgccggctacatcgacggcggcgcctcccaggaggagttctacaagttcatcaagcccatcctggagaagatggacggcaccgaggagctgctggtgaagctgaaccgggaggacctgctgcggaagcagcggaccttcgacaacggctccatcccccaccagatccacctgggcgagctgcacgccatcctgcggcggcaggaggacttctaccccttcctgaaggacaaccgggagaagatcgagaagatcctgaccttccggatcccctactacgtgggccccctggcccggggcaactcccggttcgcctggatgacccggaagtccgaggagaccatcaccccctggaacttcgaggaggtggtggacaagggcgcctccgcccagtccttcatcgagcggatgaccaacttcgacaagaacctgcccaacgagaaggtgctgcccaagcactccctgctgtacgagtacttcaccgtgtacaacgagctgaccaaggtgaagtacgtgaccgagggcatgcggaagcccgccttcctgtccggcgagcagaagaaggccatcgtggacctgctgttcaagaccaaccggaaggtgaccgtgaagcagctgaaggaggactacttcaagaagatcgagtgcttcgactccgtggagatctccggcgtggaggaccggttcaacgcctccctgggcacctaccacgacctgctgaagatcatcaaggacaaggacttcctggacaacgaggagaacgaggacatcctggaggacatcgtgctgaccctgaccctgttcgaggaccgggagatgatcgaggagcggctgaagacctacgcccacctgttcgacgacaaggtgatgaagcagctgaagcggcggcggtacaccggctggggccggctgtcccggaagctgatcaacggcatccgggacaagcagtccggcaagaccatcctggacttcctgaagtccgacggcttcgccaaccggaacttcatgcagctgatccacgacgactccctgaccttcaaggaggacatccagaaggcccaggtgtccggccagggcgactccctgcacgagcacatcgccaacctggccggctcccccgccatcaagaagggcatcctgcagaccgtgaaggtggtggacgagctggtgaaggtgatgggccggcacaagcccgagaacatcgtgatcgagatggcccgggagaaccagaccacccagaagggccagaagaactcccgggagcggatgaagcggatcgaggagggcatcaaggagctgggctcccagatcctgaaggagcaccccgtggagaacacccagctgcagaacgagaagctgtacctgtactacctgcagaacggccgggacatgtacgtggaccaggagctggacatcaaccggctgtccgactacgacgtggacgccatcgtgccccagtccttcctgaaggacgactccatcgacaacaaggtgctgacccggtccgacaagaaccggggcaagtccgacaacgtgccctccgaggaggtggtgaagaagatgaagaactactggcggcagctgctgaacgccaagctgatcacccagcggaagttcgacaacctgaccaaggccgagcggggcggcctgtccgagctggacaaggccggcttcatcaagcggcagctggtggagacccggcagatcaccaagcacgtggcccagatcctggactcccggatgaacaccaagtacgacgagaacgacaagctgatccgggaggtgaaggtgatcaccctgaagtccaagctggtgtccgacttccggaaggacttccagttctacaaggtgcgggagatcaacaactaccaccacgcccacgacgcctacctgaacgccgtggtgggcaccgccctgatcaagaagtaccccaagctggagtccgagttcgtgtacggcgactacaaggtgtacgacgtgcggaagatgatcgccaagtccgagcaggagatcggcaaggccaccgccaagtacttcttctactccaacatcatgaacttcttcaagaccgagatcaccctggccaacggcgagatccggaagcggcccctgatcgagaccaacggcgagaccggcgagatcgtgtgggacaagggccgggacttcgccaccgtgcggaaggtgctgtccatgccccaggtgaacatcgtgaagaagaccgaggtgcagaccggcggcttctccaaggagtccatcctgcccaagcggaactccgacaagctgatcgcccggaagaaggactgggaccccaagaagtacggcggcttcgactcccccaccgtggcctactccgtgctggtggtggccaaggtggagaagggcaagtccaagaagctgaagtccgtgaaggagctgctgggcatcaccatcatggagcggtcctccttcgagaagaaccccatcgacttcctggaggccaagggctacaaggaggtgaagaaggacctgatcatcaagctgcccaagtactccctgttcgagctggagaacggccggaagcggatgctggcctccgccggcgagctgcagaagggcaacgagctggccctgccctccaagtacgtgaacttcctgtacctggcctcccactacgagaagctgaagggctcccccgaggacaacgagcagaagcagctgttcgtggagcagcacaagcactacctggacgagatcatcgagcagatctccgagttctccaagcgggtgatcctggccgacgccaacctggacaaggtgctgtccgcctacaacaagcaccgggacaagcccatccgggagcaggccgagaacatcatccacctgttcaccctgaccaacctgggcgcccccgccgccttcaagtacttcgacaccaccatcgaccggaagcggtacacctccaccaaggaggtgctggacgccaccctgatccaccagtccatcaccggcctgtacgagacccggatcgacctgtcccagctgggcggcgactccggcggctcctccggcggctccaagcggaccgccgacggctccgagttcgagtcccccaagaagaagcggaaggtgtccggcggctcctccggcggctccatggactccaccaaggagaagtgcgactcctacaaggacgacctgctgctgcggatgggcctgaacgacaacaaggccggcatggagggcctggacaaggagaagatcaacaagatcatcatggaggccaccaagggctcccggttctacggcaacgagctgaagaaggagaagcaggtgaaccagcggatcgagaacatgatgcagcagaaggcccagatcacctcccagcagctgcggaaggcccagctgcaggtggaccggttcgccatggagctggagcagtcccggaacctgtccaacaccatcgtgcacatcgacatggacgccttctacgccgccgtggagatgcgggacaaccccgagctgaaggacaagcccatcgccgtgggctccatgtccatgctgtccacctccaactaccacgcccggcggttcggcgtgcgggccgccatgcccggcttcatcgccaagcggctgtgcccccagctgatcatcgtgccccccaacttcgacaagtaccgggccgtgtccaaggaggtgaaggagatcctggccgactacgaccccaacttcatggccatgtccctggacgaggcctacctgaacatcaccaagcacctggaggagcggcagaactggcccgaggacaagcggcggtacttcatcaagatgggctcctccgtggagaacgacaaccccggcaaggaggtgaacaagctgtccgagcacgagcggtccatctcccccctgctgttcgaggagtccccctccgacgtgcagccccccggcgaccccttccaggtgaacttcgaggagcagaacaacccccagatcctgcagaactccgtggtgttcggcacctccgcccaggaggtggtgaaggagatccggttccggatcgagcagaagaccaccctgaccgcctccgccggcatcgcccccaacaccatgctggccaaggtgtgctccgacaagaacaagcccaacggccagtaccagatcctgcccaaccggcaggccgtgatggacttcatcaaggacctgcccatccggaaggtgtccggcatcggcaaggtgaccgagaagatgctgaaggccctgggcatcatcacctgcaccgagctgtaccagcagcgggccctgctgtccctgctgttctccgagacctcctggcactacttcctgcacatctccctgggcctgggctccacccacctgacccgggaccgggtgcggaagtccatgtccgtggagcggaccttctccgagatcaacaaggccgaggagcagtactccctgtgccaggagctgtgctccgagctggcccaggacctgcagaaggagcggctgaagggccggaccgtgaccatcaagctgaagaacgtgaacttcgaggtgaagacccgggcctccaccgtgtcctccgtggtgtccaccgccgaggagatcttcgccatcgccaaggagctgctgaagaccgagatcgacgccgacttcccccaccccctgcggctgcggctgatgggcgtgcggatctcctccttccccaacgaggaggaccggaagcaccagcagggcggcggctccggcaagcggaccgccgacggctccggcggcggctcccccaagaagaagcggaaggtgtagctagcaccagcctcaagaacacccgaatggagtctctaagctacataataccaacttacactttacaaaatgttgtcccccaaaatgtagccattcgtatctgctcctaataaaaagaaagtttcttcacattctctcgagaaaaaaaaaaaatggaaaaaaaaaaaacggaaaaaaaaaaaaggtaaaaaaaaaaaatataaaaaaaaaaaacataaaaaaaaaaaacgaaaaaaaaaaaacgtaaaaaaaaaaaactcaaaaaaaaaaaagataaaaaaaaaaaacctaaaaaaaaaaaatgtaaaaaaaaaaaagggaaaaaaaaaaaacgcaaaaaaaaaaaacacaaaaaaaaaaaatgcaaaaaaaaaaaatcgaaaaaaaaaaaatctaaaaaaaaaaaacgaaaaaaaaaaaacccaaaaaaaaaaaagacaaaaaaaaaaaatagaaaaaaaaaaagttaaaaaaaaaaaactgaaaaaaaaaaaatttaaaaaaaaaaaatctag

SEQ ID NO: 1299 - DNA, 6603 bp, synthetic construct
  misc_feature 1..6603: note = Synthetic
  source 1..6603: mol_type = other DNA
atgggcaagcggcccgccgccaccaagaaggccggccaggccaagaagaagaagtccggctccgagacccccggcacctccgagtccgccacccccgagtccggcaagggcgaccccaagaagccccggggcaagatgtcctcctacgccttcttcgtgcagacctgccgggaggagcacaagaagaagcaccccgacgcctccgtgaacttctccgagttctccaagaagtgctccgagcggtggaagaccatgtccgccaaggagaagggcaagttcgaggacatggccaaggccgacaaggcccggtacgagcgggagatgaagacctacatcccccccaagggcgagaccaagaagaagttcaaggaccccaacgcccccaagcggcccccctccgccttcttcctgttctgctccgagtaccggcccaagatcaagggcgagcaccccggcctgtccatcggcgacgtggccaagaagctgggcgagatgtggaacaacaccgccgccgacgacaagcagccctacgagaagaaggccgccaagctgaaggagaagtacgagaaggacatcgccgcctaccgggccaagggcaagcccgacgccgccaagaagggcgtggtgaaggccgagaagtccaagaagaagaagggcaccaaggactccaccaaggacatccccgagaccccctccaaggacggcaccaaggactccaccaaggacatccccgagaccccctccaaggacgacaagaagtactccatcggcctggacatcggcaccaactccgtgggctgggccgtgatcaccgacgagtacaaggtgccctccaagaagttcaaggtgctgggcaacaccgaccggcactccatcaagaagaacctgatcggcgccctgctgttcgactccggcgagaccgccgaggccacccggctgaagcggaccgcccggcggcggtacacccggcggaagaaccggatctgctacctgcaggagatcttctccaacgagatggccaaggtggacgactccttcttccaccggctggaggagtccttcctggtggaggaggacaagaagcacgagcggcaccccatcttcggcaacatcgtggacgaggtggcctaccacgagaagtaccccaccatctaccacctgcggaagaagctggtggactccaccgacaaggccgacctgcggctgatctacctggccctggcccacatgatcaagttccggggccacttcctgatcgagggcgacctgaaccccgacaactccgacgtggacaagctgttcatccagctggtgcagacctacaaccagctgttcgaggagaaccccatcaacgcctccggcgtggacgccaaggccatcctgtccgcccggctgtccaagtcccggcggctggagaacctgatcgcccagctgcccggcgagaagaagaacggcctgttcggcaacctgatcgccctgtccctgggcctgacccccaacttcaagtccaacttcgacctggccgaggacgccaagctgcagctgtccaaggacacctacgacgacgacctggacaacctgctggcccagatcggcgaccagtacgccgacctgttcctggccgccaagaacctgtccgacgccatcctgctgtccgacatcctgcgggtgaacaccgagatcaccaaggcccccctgtccgcctccatgatcaagcggtacgacgagcaccaccaggacctgaccctgctgaaggccctggtgcggcagcagctgcccgagaagtacaaggagatcttcttcgaccagtccaagaacggctacgccggctacatcgacggcggcgcctcccaggaggagttctacaagttcatcaagcccatcctggagaagatggacggcaccgaggagctgctggtgaagctgaaccgggaggacctgctgcggaagcagcggaccttcgacaacggctccatcccccaccagatccacctgggcgagctgcacgccatcctgcggcggcaggaggacttctaccccttcctgaaggacaaccgggagaagatcgagaagatcctgaccttccggatcccctactacgtgggccccctggcccggggcaactcccggttcgcctggatgacccggaagtccgaggagaccatcaccccctggaacttcgaggaggtggtggacaagggcgcctccgcccagtccttcatcgagcggatgaccaacttcgacaagaacctgcccaacgagaaggtgctgcccaagcactccctgctgtacgagtacttcaccgtgtacaacgagctgaccaaggtgaagtacgtgaccgagggcatgcggaagcccgccttcctgtccggcgagcagaagaaggccatcgtggacctgctgttcaagaccaaccggaaggtgaccgtgaagcagctgaaggaggactacttcaagaagatcgagtgcttcgactccgtggagatctccggcgtggaggaccggttcaacgcctccctgggcacctaccacgacctgctgaagatcatcaaggacaaggacttcctggacaacgaggagaacgaggacatcctggaggacatcgtgctgaccctgaccctgttcgaggaccgggagatgatcgaggagcggctgaagacctacgcccacctgttcgacgacaaggtgatgaagcagctgaagcggcggcggtacaccggctggggccggctgtcccggaagctgatcaacggcatccgggacaagcagtccggcaagaccatcctggacttcctgaagtccgacggcttcgccaaccggaacttcatgcagctgatccacgacgactccctgaccttcaaggaggacatccagaaggcccaggtgtccggccagggcgactccctgcacgagcacatcgccaacctggccggctcccccgccatcaagaagggcatcctgcagaccgtgaaggtggtggacgagctggtgaaggtgatgggccggcacaagcccgagaacatcgtgatcgagatggcccgggagaaccagaccacccagaagggccagaagaactcccgggagcggatgaagcggatcgaggagggcatcaaggagctgggctcccagatcctgaaggagcaccccgtggagaacacccagctgcagaacgagaagctgtacctgtactacctgcagaacggccgggacatgtacgtggaccaggagctggacatcaaccggctgtccgactacgacgtggacgccatcgtgccccagtccttcctgaaggacgactccatcgacaacaaggtgctgacccggtccgacaagaaccggggcaagtccgacaacgtgccctccgaggaggtggtgaagaagatgaagaactactggcggcagctgctgaacgccaagctgatcacccagcggaagttcgacaacctgaccaaggccgagcggggcggcctgtccgagctggacaaggccggcttcatcaagcggcagctggtggagacccggcagatcaccaagcacgtggcccagatcctggactcccggatgaacaccaagtacgacgagaacgacaagctgatccgggaggtgaaggtgatcaccctgaagtccaagctggtgtccgacttccggaaggacttccagttctacaaggtgcgggagatcaacaactaccaccacgcccacgacgcctacctgaacgccgtggtgggcaccgccctgatcaagaagtaccccaagctggagtccgagttcgtgtacggcgactacaaggtgtacgacgtgcggaagatgatcgccaagtccgagcaggagatcggcaaggccaccgccaagtacttcttctactccaacatcatgaacttcttcaagaccgagatcaccctggccaacggcgagatccggaagcggcccctgatcgagaccaacggcgagaccggcgagatcgtgtgggacaagggccgggacttcgccaccgtgcggaaggtgctgtccatgccccaggtgaacatcgtgaagaagaccgaggtgcagaccggcggcttctccaaggagtccatcctgcccaagcggaactccgacaagctgatcgcccggaagaaggactgggaccccaagaagtacggcggcttcgactcccccaccgtggcctactccgtgctggtggtggccaaggtggagaagggcaagtccaagaagctgaagtccgtgaaggagctgctgggcatcaccatcatggagcggtcctccttcgagaagaaccccatcgacttcctggaggccaagggctacaaggaggtgaagaaggacctgatcatcaagctgcccaagtactccctgttcgagctggagaacggccggaagcggatgctggcctccgccggcgagctgcagaagggcaacgagctggccctgccctccaagtacgtgaacttcctgtacctggcctcccactacgagaagctgaagggctcccccgaggacaacgagcagaagcagctgttcgtggagcagcacaagcactacctggacgagatcatcgagcagatctccgagttctccaagcgggtgatcctggccgacgccaacctggacaaggtgctgtccgcctacaacaagcaccgggacaagcccatccgggagcaggccgagaacatcatccacctgttcaccctgaccaacctgggcgcccccgccgccttcaagtacttcgacaccaccatcgaccggaagcggtacacctccaccaaggaggtgctggacgccaccctgatccaccagtccatcaccggcctgtacgagacccggatcgacctgtcccagctgggcggcgactccggcggctcctccggcggctccaagcggaccgccgacggctccgagttcgagtcccccaagaagaagcggaaggtgtccggcggctcctccggcggctccatggactccaccaaggagaagtgcgactcctacaaggacgacctgctgctgcggatgggcctgaacgacaacaaggccggcatggagggcctggacaaggagaagatcaacaagatcatcatggaggccaccaagggctcccggttctacggcaacgagctgaagaaggagaagcaggtgaaccagcggatcgagaacatgatgcagcagaaggcccagatcacctcccagcagctgcggaaggcccagctgcaggtggaccggttcgccatggagctggagcagtcccggaacctgtccaacaccatcgtgcacatcgacatggacgccttctacgccgccgtggagatgcgggacaaccccgagctgaaggacaagcccatcgccgtgggctccatgtccatgctgtccacctccaactaccacgcccggcggttcggcgtgcgggccgccatgcccggcttcatcgccaagcggctgtgcccccagctgatcatcgtgccccccaacttcgacaagtaccgggccgtgtccaaggaggtgaaggagatcctggccgactacgaccccaacttcatggccatgtccctggacgaggcctacctgaacatcaccaagcacctggaggagcggcagaactggcccgaggacaagcggcggtacttcatcaagatgggctcctccgtggagaacgacaaccccggcaaggaggtgaacaagctgtccgagcacgagcggtccatctcccccctgctgttcgaggagtccccctccgacgtgcagccccccggcgaccccttccaggtgaacttcgaggagcagaacaacccccagatcctgcagaactccgtggtgttcggcacctccgcccaggaggtggtgaaggagatccggttccggatcgagcagaagaccaccctgaccgcctccgccggcatcgcccccaacaccatgctggccaaggtgtgctccgacaagaacaagcccaacggccagtaccagatcctgcccaaccggcaggccgtgatggacttcatcaaggacctgcccatccggaaggtgtccggcatcggcaaggtgaccgagaagatgctgaaggccctgggcatcatcacctgcaccgagctgtaccagcagcgggccctgctgtccctgctgttctccgagacctcctggcactacttcctgcacatctccctgggcctgggctccacccacctgacccgggaccgggtgcggaagtccatgtccgtggagcggaccttctccgagatcaacaaggccgaggagcagtactccctgtgccaggagctgtgctccgagctggcccaggacctgcagaaggagcggctgaagggccggaccgtgaccatcaagctgaagaacgtgaacttcgaggtgaagacccgggcctccaccgtgtcctccgtggtgtccaccgccgaggagatcttcgccatcgccaaggagctgctgaagaccgagatcgacgccgacttcccccaccccctgcggctgcggctgatgggcgtgcggatctcctccttccccaacgaggaggaccggaagcaccagcagggcggcggctccggcaagcggaccgccgacggctccggcggcggctcccccaagaagaagcggaaggtgtag

SEQ ID NO: 1300 - protein, 2200 aa, synthetic construct
  REGION 1..2200: note = Synthetic
MGKRPAATKKAGQAKKKKSGSETPGTSESATPESGKGDPKKPRGKMSSYAFFVQTCREEHKKKHPDASVNFSEFSKKCSERWKTMSAKEKGKFEDMAKADKARYEREMKTYIPPKGETKKKFKDPNAPKRPPSAFFLFCSEYRPKIKGEHPGLSIGDVAKKLGEMWNNTAADDKQPYEKKAAKLKEKYEKDIAAYRAKGKPDAAKKGVVKAEKSKKKKGTKDSTKDIPETPSKDGTKDSTKDIPETPSKDDKKYSIGLDIGTNSVGWAVITDEYKVPSKKFKVLGNTDRHSIKKNLIGALLFDSGETAEATRLKRTARRRYTRRKNRICYLQEIFSNEMAKVDDSFFHRLEESFLVEEDKKHERHPIFGNIVDEVAYHEKYPTIYHLRKKLVDSTDKADLRLIYLALAHMIKFRGHFLIEGDLNPDNSDVDKLFIQLVQTYNQLFEENPINASGVDAKAILSARLSKSRRLENLIAQLPGEKKNGLFGNLIALSLGLTPNFKSNFDLAEDAKLQLSKDTYDDDLDNLLAQIGDQYADLFLAAKNLSDAILLSDILRVNTEITKAPLSASMIKRYDEHHQDLTLLKALVRQQLPEKYKEIFFDQSKNGYAGYIDGGASQEEFYKFIKPILEKMDGTEELLVKLNREDLLRKQRTFDNGSIPHQIHLGELHAILRRQEDFYPFLKDNREKIEKILTFRIPYYVGPLARGNSRFAWMTRKSEETITPWNFEEVVDKGASAQSFIERMTNFDKNLPNEKVLPKHSLLYEYFTVYNELTKVKYVTEGMRKPAFLSGEQKKAIVDLLFKTNRKVTVKQLKEDYFKKIECFDSVEISGVEDRFNASLGTYHDLLKIIKDKDFLDNEENEDILEDIVLTLTLFEDREMIEERLKTYAHLFDDKVMKQLKRRRYTGWGRLSRKLINGIRDKQSGKTILDFLKSDGFANRNFMQLIHDDSLTFKEDIQKAQVSGQGDSLHEHIANLAGSPAIKKGILQTVKVVDELVKVMGRHKPENIVIEMARENQTTQKGQKNSRERMKRIEEGIKELGSQILKEHPVENTQLQNEKLYLYYLQNGRDMYVDQELDINRLSDYDVDAIVPQSFLKDDSIDNKVLTRSDKNRGKSDNVPSEEVVKKMKNYWRQLLNAKLITQRKFDNLTKAERGGLSELDKAGFIKRQLVETRQITKHVAQILDSRMNTKYDENDKLIREVKVITLKSKLVSDFRKDFQFYKVREINNYHHAHDAYLNAVVGTALIKKYPKLESEFVYGDYKVYDVRKMIAKSEQEIGKATAKYFFYSNIMNFFKTEITLANGEIRKRPLIETNGETGEIVWDKGRDFATVRKVLSMPQVNIVKKTEVQTGGFSKESILPKRNSDKLIARKKDWDPKKYGGFDSPTVAYSVLVVAKVEKGKSKKLKSVKELLGITIMERSSFEKNPIDFLEAKGYKEVKKDLIIKLPKYSLFELENGRKRMLASAGELQKGNELALPSKYVNFLYLASHYEKLKGSPEDNEQKQLFVEQHKHYLDEIIEQISEFSKRVILADANLDKVLSAYNKHRDKPIREQAENIIHLFTLTNLGAPAAFKYFDTTIDRKRYTSTKEVLDATLIHQSITGLYETRIDLSQLGGDSGGSSGGSKRTADGSEFESPKKKRKVSGGSSGGSMDSTKEKCDSYKDDLLLRMGLNDNKAGMEGLDKEKINKIIMEATKGSRFYGNELKKEKQVNQRIENMMQQKAQITSQQLRKAQLQVDRFAMELEQSRNLSNTIVHIDMDAFYAAVEMRDNPELKDKPIAVGSMSMLSTSNYHARRFGVRAAMPGFIAKRLCPQLIIVPPNFDKYRAVSKEVKEILADYDPNFMAMSLDEAYLNITKHLEERQNWPEDKRRYFIKMGSSVENDNPGKEVNKLSEHERSISPLLFEESPSDVQPPGDPFQVNFEEQNNPQILQNSVVFGTSAQEVVKEIRFRIEQKTTLTASAGIAPNTMLAKVCSDKNKPNGQYQILPNRQAVMDFIKDLPIRKVSGIGKVTEKMLKALGIITCTELYQQRALLSLLFSETSWHYFLHISLGLGSTHLTRDRVRKSMSVERTFSEINKAEEQYSLCQELCSELAQDLQKERLKGRTVTIKLKNVNFEVKTRASTVSSVVSTAEEIFAIAKELLKTEIDADFPHPLRLRLMGVRISSFPNEEDRKHQQGGGSGKRTADGSGGGSPKKKRKV

SEQ ID NO: 1301 - RNA, 7579 nt, synthetic construct
  misc_feature 1..7579: note = Synthetic
  source 1..7579: mol_type = other RNA
gggaagctcagaataaacgctcaactttggccggatctgccaccatgaagcggcccgccgccaccaagaaggccggccaggccaagaagaagaaggacaagaagtactccatcggcctggacatcggcaccaactccgtgggctgggccgtgatcaccgacgagtacaaggtgccctccaagaagttcaaggtgctgggcaacaccgaccggcactccatcaagaagaacctgatcggcgccctgctgttcgactccggcgagaccgccgaggccacccggctgaagcggaccgcccggcggcggtacacccggcggaagaaccggatctgctacctgcaggagatcttctccaacgagatggccaaggtggacgactccttcttccaccggctggaggagtccttcctggtggaggaggacaagaagcacgagcggcaccccatcttcggcaacatcgtggacgaggtggcctaccacgagaagtaccccaccatctaccacctgcggaagaagctggtggactccaccgacaaggccgacctgcggctgatctacctggccctggcccacatgatcaagttccggggccacttcctgatcgagggcgacctgaaccccgacaactccgacgtggacaagctgttcatccagctggtgcagacctacaaccagctgttcgaggagaaccccatcaacgcctccggcgtggacgccaaggccatcctgtccgcccggctgtccaagtcccggcggctggagaacctgatcgcccagctgcccggcgagaagaagaacggcctgttcggcaacctgatcgccctgtccctgggcctgacccccaacttcaagtccaacttcgacctggccgaggacgccaagctgcagctgtccaaggacacctacgacgacgacctggacaacctgctggcccagatcggcgaccagtacgccgacctgttcctggccgccaagaacctgtccgacgccatcctgctgtccgacatcctgcgggtgaacaccgagatcaccaaggcccccctgtccgcctccatgatcaagcggtacgacgagcaccaccaggacctgaccctgctgaaggccctggtgcggcagcagctgcccgagaagtacaaggagatcttcttcgaccagtccaagaacggctacgccggctacatcgacggcggcgcctcccaggaggagttctacaagttcatcaagcccatcctggagaagatggacggcaccgaggagctgctggtgaagctgaaccgggaggacctgctgcggaagcagcggaccttcgacaacggctccatcccccaccagatccacctgggcgagctgcacgccatcctgcggcggcaggaggacttctaccccttcctgaaggacaaccgggagaagatcgagaagatcctgaccttccggatcccctactacgtgggccccctggcccggggcaactcccggttcgcctggatgacccggaagtccgaggagaccatcaccccctggaacttcgaggaggtggtggacaagggcgcctccgcccagtccttcatcgagcggatgaccaacttcgacaagaacctgcccaacgagaaggtgctgcccaagcactccctgctgtacgagtacttcaccgtgtacaacgagctgaccaaggtgaagtacgtgaccgagggcatgcggaagcccgccttcctgtccggcgagcagaagaaggccatcgtggacctgctgttcaagaccaaccggaaggtgaccgtgaagcagctgaaggaggactacttcaagaagatcgagtgcttcgactccgtggagatctccggcgtggaggaccggttcaacgcctccctgggcacctaccacgacctgctgaagatcatcaaggacaaggacttcctggacaacgaggagaacgaggacatcctggaggacatcgtgctgaccctgaccctgttcgaggaccgggagatgatcgaggagcggctgaagacctacgcccacctgttcgacgacaaggtgatgaagcagctgaagcggcggcggtacaccggctggggccggctgtcccggaagctgatcaacggcatccgggacaagcagtccggcaagaccatcctggacttcctgaagtccgacggcttcgccaaccggaacttcatgcagctgatccacgacgactccctgaccttcaaggaggacatccagaaggcccaggtgtccggccagggcgactccctgcacgagcacatcgccaacctggccggctcccccgccatcaagaagggcatcctgcagaccgtgaaggtggtggacgagctggtgaaggtgatgggccggcacaagcccgagaacatcgtgatcgagatggcccgggagaaccagaccacccagaagggccagaagaactcccgggagcggatgaagcggatcgaggagggcatcaaggagctgggctcccagatcctgaaggagcaccccgtggagaacacccagctgcagaacgagaagctgtacctgtactacctgcagaacggccgggacatgtacgtggaccaggagctggacatcaaccggctgtccgactacgacgtggacgccatcgtgccccagtccttcctgaaggacgactccatcgacaacaaggtgctgacccggtccgacaagaaccggggcaagtccgacaacgtgccctccgaggaggtggtgaagaagatgaagaactactggcggcagctgctgaacgccaagctgatcacccagcggaagttcgacaacctgaccaaggccgagcggggcggcctgtccgagctggacaaggccggcttcatcaagcggcagctggtggagacccggcagatcaccaagcacgtggcccagatcctggactcccggatgaacaccaagtacgacgagaacgacaagctgatccgggaggtgaaggtgatcaccctgaagtccaagctggtgtccgacttccggaaggacttccagttctacaaggtgcgggagatcaacaactaccaccacgcccacgacgcctacctgaacgccgtggtgggcaccgccctgatcaagaagtaccccaagctggagtccgagttcgtgtacggcgactacaaggtgtacgacgtgcggaagatgatcgccaagtccgagcaggagatcggcaaggccaccgccaagtacttcttctactccaacatcatgaacttcttcaagaccgagatcaccctggccaacggcgagatccggaagcggcccctgatcgagaccaacggcgagaccggcgagatcgtgtgggacaagggccgggacttcgccaccgtgcggaaggtgctgtccatgccccaggtgaacatcgtgaagaagaccgaggtgcagaccggcggcttctccaaggagtccatcctgcccaagcggaactccgacaagctgatcgcccggaagaaggactgggaccccaagaagtacggcggcttcgactcccccaccgtggcctactccgtgctggtggtggccaaggtggagaagggcaagtccaagaagctgaagtccgtgaaggagctgctgggcatcaccatcatggagcggtcctccttcgagaagaaccccatcgacttcctggaggccaagggctacaaggaggtgaagaaggacctgatcatcaagctgcccaagtactccctgttcgagctggagaacggccggaagcggatgctggcctccgccggcgagctgcagaagggcaacgagctggccctgccctccaagtacgtgaacttcctgtacctggcctcccactacgagaagctgaagggctcccccgaggacaacgagcagaagcagctgttcgtggagcagcacaagcactacctggacgagatcatcgagcagatctccgagttctccaagcgggtgatcctggccgacgccaacctggacaaggtgctgtccgcctacaacaagcaccgggacaagcccatccgggagcaggccgagaacatcatccacctgttcaccctgaccaacctgggcgcccccgccgccttcaagtacttcgacaccaccatcgaccggaagcggtacacctccaccaaggaggtgctggacgccaccctgatccaccagtccatcaccggcctgtacgagacccggatcgacctgtcccagctgggcggcgacggcgcccccgagtccgccaccgagtccggcggcacctccaccgagtccgagggctccgccggccccaagaagaagcggaaggtgacctccaccgagtccgagggctccgccggctccgccggctccacctccggctcctcctccggcatgaagatcgccgtggtggacaaggccctgaacaacacccggtacgacaagcacttccagctgtacggcgaggaggtggacgtgttccacatgtgcaacgagaagctgtccggccggctgctgaagaagcacatcaccatcggcacccccgagaaccccttcgaccccaacgactacgacttcgtgatcctggtgggcgccgagcccttcctgtacttcgccggcaagaagggcatcggcgactacaccggcaagcgggtggagtacaacggctacgccaactggatcgcctccatctcccccgcccagctgcacttcaagcccgagatgaagcccgtgttcgacgccaccgtggagaacatccacgacatcatcaacggccgggagaagatcgccaaggccggcgactaccggcccatcaccgaccccgacgaggccgaggagtacatcaagatggtgtacaacatggtgatcggccccgtggccttcgactccgagacctccgccctgtactgccgggacggctacctgctgggcgtgtccatctcccaccaggagtaccagggcgtgtacatcgactccgactgcctgaccgaggtggccgtgtactacctgcagaagatcctggactccgagaaccacaccatcgtgttccacaacctgaagttcgacatgcacttctacaagtaccacctgggcctgaccttcgacaaggcccacaaggagcggcggctgcacgacaccatgctgcagcactacgtgctggacgagcggcggggcacccacggcctgaagtccctggccatgaagtacaccgacatgggcgactacgacttcgagctggacaagttcaaggacgactactgcaaggcccacaagatcaagaaggaggacttcacctacgacctgatccccttcgacatcatgtggccctacgccgccaaggacaccgacgccaccatccggctgcacaacttcttcctgcccaagatcgagaagaacgagaagctgtgctccctgtactacgacgtgctgatgcccggctgcgtgttcctgcagcgggtggaggaccggggcgtgcccatctccatcgaccggctgaaggaggcccagtaccagctgacccacaacctgaacaaggcccgggagaagctgtacacctaccccgaggtgaagcagctggagcaggaccagaacgaggccttcaaccccaactccgtgaagcagctgcgggtgctgctgttcgactacgtgggcctgacccccaccggcaagctgaccgacaccggcgccgactccaccgacgccgaggccctgaacgagctggccacccagcaccccatcgccaagaccctgctggagatccggaagctgaccaagctgatctccacctacgtggagaagatcctgctgtccatcgacgccgacggctgcatccggaccggcttccacgagcacatgaccacctccggccggctgtcctcctccggcaagctgaacctgcagcagctgccccgggacgagtccatcatcaagggctgcgtggtggccccccccggctaccgggtgatcgcctgggacctgaccaccgccgaggtgtactacgccgccgtgctgtccggcgaccggaacatgcagcaggtgttcatcaacatgcggaacgagcccgacaagtaccccgacttccactccaacatcgcccacatggtgttcaagctgcagtgcgagccccgggacgtgaagaagctgttccccgccctgcggcaggccgccaaggccatcaccttcggcatcctgtacggctccggccccgccaaggtggcccactccgtgaacgaggccctgctggagcaggccgccaagaccggcgagcccttcgtggagtgcaccgtggccgacgccaaggagtacatcgagacctacttcggccagttcccccagctgaagcggtggatcgacaagtgccacgaccagatcaagaaccacggcttcatctactcccacttcggccggaagcggcggctgcacaacatccactccgaggaccggggcgtgcagggcgaggagatccggtccggcttcaacgccatcatccagtccgcctcctccgactccctgctgctgggcgccgtggacgccgacaacgagatcatctccctgggcctggagcaggagatgaagatcgtgatgctggtgcacgactccgtggtggccatcgtgcgggaggacctgatcgaccagtacaacgagatcctgatccggaacatccagaaggaccggggcatctccatccccggctgccccatcggcatcgactccgactccgaggccggcggctcccgggactactcctgcggcaagatgaagaagcagcacccctccatcgcctgcatcgacgacgacgagtacacccggtacgtgaagggcgtgctgctggacgccgagttcgagtacaagaagctggccgccatggacaaggagcaccccgaccactccaagtacaaggacgacaagttcatcgccgtgtgcaaggacctggacaacgtgaagcggatcctgggcgccggcggcggctccggcaagcggaccgccgacggctccggcggcggctcccccaagaagaagcggaaggtgcctgccgctaagagagtgaagctggactccgagtccgccacccccgagtccgtgtccggctggcggctgttcaagaagatctcctagctagcaccagcctcaagaacacccgaatggagtctctaagctacataataccaacttacactttacaaaatgttgtcccccaaaatgtagccattcgtatctgctcctaataaaaagaaagtttcttcacattctctcgagaaaaaaaaaaaatggaaaaaaaaaaaacggaaaaaaaaaaaaggtaaaaaaaaaaaatataaaaaaaaaaaacataaaaaaaaaaaacgaaaaaaaaaaaacgtaaaaaaaaaaaactcaaaaaaaaaaaagataaaaaaaaaaaacctaaaaaaaaaaaatgtaaaaaaaaaaaagggaaaaaaaaaaaacgcaaaaaaaaaaaacacaaaaaaaaaaaatgcaaaaaaaaaaaatcgaaaaaaaaaaaatctaaaaaaaaaaaacgaaaaaaaaaaaacccaaaaaaaaaaaagacaaaaaaaaaaaatagaaaaaaaaaaagttaaaaaaaaaaaactgaaaaaaaaaaaatttaaaaaaaaaaaatctag

SEQ ID NO: 1302 - DNA, 7020 bp, synthetic construct
  misc_feature 1..7020: note = Synthetic
  source 1..7020: mol_type = other DNA
atgaagcggcccgccgccaccaagaaggccggccaggccaagaagaagaaggacaagaagtactccatcggcctggacatcggcaccaactccgtgggctgggccgtgatcaccgacgagtacaaggtgccctccaagaagttcaaggtgctgggcaacaccgaccggcactccatcaagaagaacctgatcggcgccctgctgttcgactccggcgagaccgccgaggccacccggctgaagcggaccgcccggcggcggtacacccggcggaagaaccggatctgctacctgcaggagatcttctccaacgagatggccaaggtggacgactccttcttccaccggctggaggagtccttcctggtggaggaggacaagaagcacgagcggcaccccatcttcggcaacatcgtggacgaggtggcctaccacgagaagtaccccaccatctaccacctgcggaagaagctggtggactccaccgacaaggccgacctgcggctgatctacctggccctggcccacatgatcaagttccggggccacttcctgatcgagggcgacctgaaccccgacaactccgacgtggacaagctgttcatccagctggtgcagacctacaaccagctgttcgaggagaaccccatcaacgcctccggcgtggacgccaaggccatcctgtccgcccggctgtccaagtcccggcggctggagaacctgatcgcccagctgcccggcgagaagaagaacggcctgttcggcaacctgatcgccctgtccctgggcctgacccccaacttcaagtccaacttcgacctggccgaggacgccaagctgcagctgtccaaggacacctacgacgacgacctggacaacctgctggcccagatcggcgaccagtacgccgacctgttcctggccgccaagaacctgtccgacgccatcctgctgtccgacatcctgcgggtgaacaccgagatcaccaaggcccccctgtccgcctccatgatcaagcggtacgacgagcaccaccaggacctgaccctgctgaaggccctggtgcggcagcagctgcccgagaagtacaaggagatcttcttcgaccagtccaagaacggctacgccggctacatcgacggcggcgcctcccaggaggagttctacaagttcatcaagcccatcctggagaagatggacggcaccgaggagctgctggtgaagctgaaccgggaggacctgctgcggaagcagcggaccttcgacaacggctccatcccccaccagatccacctgggcgagctgcacgccatcctgcggcggcaggaggacttctaccccttcctgaaggacaaccgggagaagatcgagaagatcctgaccttccggatcccctactacgtgggccccctggcccggggcaactcccggttcgcctggatgacccggaagtccgaggagaccatcaccccctggaacttcgaggaggtggtggacaagggcgcctccgcccagtccttcatcgagcggatgaccaacttcgacaagaacctgcccaacgagaaggtgctgcccaagcactccctgctgtacgagtacttcaccgtgtacaacgagctgaccaaggtgaagtacgtgaccgagggcatgcggaagcccgccttcctgtccggcgagcagaagaaggccatcgtggacctgctgttcaagaccaaccggaaggtgaccgtgaagcagctgaaggaggactacttcaagaagatcgagtgcttcgactccgtggagatctccggcgtggaggaccggttcaacgcctccctgggcacctaccacgacctgctgaagatcatcaaggacaaggacttcctggacaacgaggagaacgaggacatcctggaggacatcgtgctgaccctgaccctgttcgaggaccgggagatgatcgaggagcggctgaagacctacgcccacctgttcgacgacaaggtgatgaagcagctgaagcggcggcggtacaccggctggggccggctgtcccggaagctgatcaacggcatccgggacaagcagtccggcaagaccatcctggacttcctgaagtccgacggcttcgccaaccggaacttcatgcagctgatccacgacgactccctgaccttcaaggaggacatccagaaggcccaggtgtccggccagggcgactccctgcacgagcacatcgccaacctggccggctcccccgccatcaagaagggcatcctgcagaccgtgaaggtggtggacgagctggtgaaggtgatgggccggcacaagcccgagaacatcgtgatcgagatggcccgggagaaccagaccacccagaagggccagaagaactcccgggagcggatgaagcggatcgaggagggcatcaaggagctgggctcccagatcctgaaggagcaccccgtggagaacacccagctgcagaacgagaagctgtacctgtactacctgcagaacggccgggacatgtacgtggaccaggagctggacatcaaccggctgtccgactacgacgtggacgccatcgtgccccagtccttcctgaaggacgactccatcgacaacaaggtgctgacccggtccgacaagaaccggggcaagtccgacaacgtgccctccgaggaggtggtgaagaagatgaagaactactggcggcagctgctgaacgccaagctgatcacccagcggaagttcgacaacctgaccaaggccgagcggggcggcctgtccgagctggacaaggccggcttcatcaagcggcagctggtggagacccggcagatcaccaagcacgtggcccagatcctggactcccggatgaacaccaagtacgacgagaacgacaagctgatccgggaggtgaaggtgatcaccctgaagtccaagctggtgtccgacttccggaaggacttccagttctacaaggtgcgggagatcaacaactaccaccacgcccacgacgcctacctgaacgccgtggtgggcaccgccctgatcaagaagtaccccaagctggagtccgagttcgtgtacggcgactacaaggtgtacgacgtgcggaagatgatcgccaagtccgagcaggagatcggcaaggccaccgccaagtacttcttctactccaacatcatgaacttcttcaagaccgagatcaccctggccaacggcgagatccggaagcggcccctgatcgagaccaacggcgagaccggcgagatcgtgtgggacaagggccgggacttcgccaccgtgcggaaggtgctgtccatgccccaggtgaacatcgtgaagaagaccgaggtgcagaccggcggcttctccaaggagtccatcctgcccaagcggaactccgacaagctgatcgcccggaagaaggactgggaccccaagaagtacggcggcttcgactcccccaccgtggcctactccgtgctggtggtggccaaggtggagaagggcaagtccaagaagctgaagtccgtgaaggagctgctgggcatcaccatcatggagcggtcctccttcgagaagaaccccatcgacttcctggaggccaagggctacaaggaggtgaagaaggacctgatcatcaagctgcccaagtactccctgttcgagctggagaacggccggaagcggatgctggcctccgccggcgagctgcagaagggcaacgagctggccctgccctccaagtacgtgaacttcctgtacctggcctcccactacgagaagctgaagggctcccccgaggacaacgagcagaagcagctgttcgtggagcagcacaagcactacctggacgagatcatcgagcagatctccgagttctccaagcgggtgatcctggccgacgccaacctggacaaggtgctgtccgcctacaacaagcaccgggacaagcccatccgggagcaggccgagaacatcatccacctgttcaccctgaccaacctgggcgcccccgccgccttcaagtacttcgacaccaccatcgaccggaagcggtacacctccaccaaggaggtgctggacgccaccctgatccaccagtccatcaccggcctgtacgagacccggatcgacctgtcccagctgggcggcgacggcgcccccgagtccgccaccgagtccggcggcacctccaccgagtccgagggctccgccggccccaagaagaagcggaaggtgacctccaccgagtccgagggctccgccggctccgccggctccacctccggctcctcctccggcatgaagatcgccgtggtggacaaggccctgaacaacacccggtacgacaagcacttccagctgtacggcgaggaggtggacgtgttccacatgtgcaacgagaagctgtccggccggctgctgaagaagcacatcaccatcggcacccccgagaaccccttcgaccccaacgactacgacttcgtgatcctggtgggcgccgagcccttcctgtacttcgccggcaagaagggcatcggcgactacaccggcaagcgggtggagtacaacggctacgccaactggatcgcctccatctcccccgcccagctgcacttcaagcccgagatgaagcccgtgttcgacgccaccgtggagaacatccacgacatcatcaacggccgggagaagatcgccaaggccggcgactaccggcccatcaccgaccccgacgaggccgaggagtacatcaagatggtgtacaacatggtgatcggccccgtggccttcgactccgagacctccgccctgtactgccgggacggctacctgctgggcgtgtccatctcccaccaggagtaccagggcgtgtacatcgactccgactgcctgaccgaggtggccgtgtactacctgcagaagatcctggactccgagaaccacaccatcgtgttccacaacctgaagttcgacatgcacttctacaagtaccacctgggcctgaccttcgacaaggcccacaaggagcggcggctgcacgacaccatgctgcagcactacgtgctggacgagcggcggggcacccacggcctgaagtccctggccatgaagtacaccgacatgggcgactacgacttcgagctggacaagttcaaggacgactactgcaaggcccacaagatcaagaaggaggacttcacctacgacctgatccccttcgacatcatgtggccctacgccgccaaggacaccgacgccaccatccggctgcacaacttcttcctgcccaagatcgagaagaacgagaagctgtgctccctgtactacgacgtgctgatgcccggctgcgtgttcctgcagcgggtggaggaccggggcgtgcccatctccatcgaccggctgaaggaggcccagtaccagctgacccacaacctgaacaaggcccgggagaagctgtacacctaccccgaggtgaagcagctggagcaggaccagaacgaggccttcaaccccaactccgtgaagcagctgcgggtgctgctgttcgactacgtgggcctgacccccaccggcaagctgaccgacaccggcgccgactccaccgacgccgaggccctgaacgagctggccacccagcaccccatcgccaagaccctgctggagatccggaagctgaccaagctgatctccacctacgtggagaagatcctgctgtccatcgacgccgacggctgcatccggaccggcttccacgagcacatgaccacctccggccggctgtcctcctccggcaagctgaacctgcagcagctgccccgggacgagtccatcatcaagggctgcgtggtggccccccccggctaccgggtgatcgcctgggacctgaccaccgccgaggtgtactacgccgccgtgctgtccggcgaccggaacatgcagcaggtgttcatcaacatgcggaacgagcccgacaagtaccccgacttccactccaacatcgcccacatggtgttcaagctgcagtgcgagccccgggacgtgaagaagctgttccccgccctgcggcaggccgccaaggccatcaccttcggcatcctgtacggctccggccccgccaaggtggcccactccgtgaacgaggccctgctggagcaggccgccaagaccggcgagcccttcgtggagtgcaccgtggccgacgccaaggagtacatcgagacctacttcggccagttcccccagctgaagcggtggatcgacaagtgccacgaccagatcaagaaccacggcttcatctactcccacttcggccggaagcggcggctgcacaacatccactccgaggaccggggcgtgcagggcgaggagatccggtccggcttcaacgccatcatccagtccgcctcctccgactccctgctgctgggcgccgtggacgccgacaacgagatcatctccctgggcctggagcaggagatgaagatcgtgatgctggtgcacgactccgtggtggccatcgtgcgggaggacctgatcgaccagtacaacgagatcctgatccggaacatccagaaggaccggggcatctccatccccggctgccccatcggcatcgactccgactccgaggccggcggctcccgggactactcctgcggcaagatgaagaagcagcacccctccatcgcctgcatcgacgacgacgagtacacccggtacgtgaagggcgtgctgctggacgccgagttcgagtacaagaagctggccgccatggacaaggagcaccccgaccactccaagtacaaggacgacaagttcatcgccgtgtgcaaggacctggacaacgtgaagcggatcctgggcgccggcggcggctccggcaagcggaccgccgacggctccggcggcggctcccccaagaagaagcggaaggtgcctgccgctaagagagtgaagctggactccgagtccgccacccccgagtccgtgtccggctggcggctgttcaagaagatctcctag

SEQ ID NO: 1303 - protein, 2339 aa, synthetic construct
  REGION 1..2339: note = Synthetic
MKRPAATKKAGQAKKKKDKKYSIGLDIGTNSVGWAVITDEYKVPSKKFKVLGNTDRHSIKKNLIGALLFDSGETAEATRLKRTARRRYTRRKNRICYLQEIFSNEMAKVDDSFFHRLEESFLVEEDKKHERHPIFGNIVDEVAYHEKYPTIYHLRKKLVDSTDKADLRLIYLALAHMIKFRGHFLIEGDLNPDNSDVDKLFIQLVQTYNQLFEENPINASGVDAKAILSARLSKSRRLENLIAQLPGEKKNGLFGNLIALSLGLTPNFKSNFDLAEDAKLQLSKDTYDDDLDNLLAQIGDQYADLFLAAKNLSDAILLSDILRVNTEITKAPLSASMIKRYDEHHQDLTLLKALVRQQLPEKYKEIFFDQSKNGYAGYIDGGASQEEFYKFIKPILEKMDGTEELLVKLNREDLLRKQRTFDNGSIPHQIHLGELHAILRRQEDFYPFLKDNREKIEKILTFRIPYYVGPLARGNSRFAWMTRKSEETITPWNFEEVVDKGASAQSFIERMTNFDKNLPNEKVLPKHSLLYEYFTVYNELTKVKYVTEGMRKPAFLSGEQKKAIVDLLFKTNRKVTVKQLKEDYFKKIECFDSVEISGVEDRFNASLGTYHDLLKIIKDKDFLDNEENEDILEDIVLTLTLFEDREMIEERLKTYAHLFDDKVMKQLKRRRYTGWGRLSRKLINGIRDKQSGKTILDFLKSDGFANRNFMQLIHDDSLTFKEDIQKAQVSGQGDSLHEHIANLAGSPAIKKGILQTVKVVDELVKVMGRHKPENIVIEMARENQTTQKGQKNSRERMKRIEEGIKELGSQILKEHPVENTQLQNEKLYLYYLQNGRDMYVDQELDINRLSDYDVDAIVPQSFLKDDSIDNKVLTRSDKNRGKSDNVPSEEVVKKMKNYWRQLLNAKLITQRKFDNLTKAERGGLSELDKAGFIKRQLVETRQITKHVAQILDSRMNTKYDENDKLIREVKVITLKSKLVSDFRKDFQFYKVREINNYHHAHDAYLNAVVGTALIKKYPKLESEFVYGDYKVYDVRKMIAKSEQEIGKATAKYFFYSNIMNFFKTEITLANGEIRKRPLIETNGETGEIVWDKGRDFATVRKVLSMPQVNIVKKTEVQTGGFSKESILPKRNSDKLIARKKDWDPKKYGGFDSPTVAYSVLVVAKVEKGKSKKLKSVKELLGITIMERSSFEKNPIDFLEAKGYKEVKKDLIIKLPKYSLFELENGRKRMLASAGELQKGNELALPSKYVNFLYLASHYEKLKGSPEDNEQKQLFVEQHKHYLDEIIEQISEFSKRVILADANLDKVLSAYNKHRDKPIREQAENIIHLFTLTNLGAPAAFKYFDTTIDRKRYTSTKEVLDATLIHQSITGLYETRIDLSQLGGDGAPESATESGGTSTESEGSAGPKKKRKVTSTESEGSAGSAGSTSGSSSGMKIAVVDKALNNTRYDKHFQLYGEEVDVFHMCNEKLSGRLLKKHITIGTPENPFDPNDYDFVILVGAEPFLYFAGKKGIGDYTGKRVEYNGYANWIASISPAQLHFKPEMKPVFDATVENIHDIINGREKIAKAGDYRPITDPDEAEEYIKMVYNMVIGPVAFDSETSALYCRDGYLLGVSISHQEYQGVYIDSDCLTEVAVYYLQKILDSENHTIVFHNLKFDMHFYKYHLGLTFDKAHKERRLHDTMLQHYVLDERRGTHGLKSLAMKYTDMGDYDFELDKFKDDYCKAHKIKKEDFTYDLIPFDIMWPYAAKDTDATIRLHNFFLPKIEKNEKLCSLYYDVLMPGCVFLQRVEDRGVPISIDRLKEAQYQLTHNLNKAREKLYTYPEVKQLEQDQNEAFNPNSVKQLRVLLFDYVGLTPTGKLTDTGADSTDAEALNELATQHPIAKTLLEIRKLTKLISTYVEKILLSIDADGCIRTGFHEHMTTSGRLSSSGKLNLQQLPRDESIIKGCVVAPPGYRVIAWDLTTAEVYYAAVLSGDRNMQQVFINMRNEPDKYPDFHSNIAHMVFKLQCEPRDVKKLFPALRQAAKAITFGILYGSGPAKVAHSVNEALLEQAAKTGEPFVECTVADAKEYIETYFGQFPQLKRWIDKCHDQIKNHGFIYSHFGRKRRLHNIHSEDRGVQGEEIRSGFNAIIQSASSDSLLLGAVDADNEIISLGLEQEMKIVMLVHDSVVAIVREDLIDQYNEILIRNIQKDRGISIPGCPIGIDSDSEAGGSRDYSCGKMKKQHPSIACIDDDEYTRYVKGVLLDAEFEYKKLAAMDKEHPDHSKYKDDKFIAVCKDLDNVKRILGAGGGSGKRTADGSGGGSPKKKRKVPAAKRVKLDSESATPESVSGWRLFKKIS

SEQ ID NO: 1304 - RNA, 7579 nt, synthetic construct; identical to SEQ ID NO: 1301
  misc_feature 1..7579: note = Synthetic
  source 1..7579: mol_type = other RNA

SEQ ID NO: 1305 - RNA, 7565 nt, synthetic construct
  misc_feature 1..7565: note = Synthetic
  source 1..7565: mol_type = other RNA
aggactcactatttgttttcgcgcccagttgcaaaaagtgtcgaagctcagaataaacgctcaactttggccggatctgccaccatgggcaagcggcccgccgccaccaagaaggccggccaggccaagaagaagaaggacaagaagtactccatcggcctggacatcggcaccaactccgtgggctgggccgtgatcaccgacgagtacaaggtgccctccaagaagttcaaggtgctgggcaacaccgaccggcactccatcaagaagaacctgatcggcgccctgctgttcgactccggcgagaccgccgaggccacccggctgaagcggaccgcccggcggcggtacacccggcggaagaaccggatctgctacctgcaggagatcttctccaacgagatggccaaggtggacgactccttcttccaccggctggaggagtccttcctggtggaggaggacaagaagcacgagcggcaccccatcttcggcaacatcgtggacgaggtggcctaccacgagaagtaccccaccatctaccacctgcggaagaagctggtggactccaccgacaaggccgacctgcggctgatctacctggccctggcccacatgatcaagttccggggccacttcctgatcgagggcgacctgaaccccgacaactccgacgtggacaagctgttcatccagctggtgcagacctacaaccagctgttcgaggagaaccccatcaacgcctccggcgtggacgccaaggccatcctgtccgcccggctgtccaagtcccggcggctggagaacctgatcgcccagctgcccggcgagaagaagaacggcctgttcggcaacctgatcgccctgtccctgggcctgacccccaacttcaagtccaacttcgacctggccgaggacgccaagctgcagctgtccaaggacacctacgacgacgacctggacaacctgctggcccagatcggcgaccagtacgccgacctgttcctggccgccaagaacctgtccgacgccatcctgctgtccgacatcctgcgggtgaacaccgagatcaccaaggcccccctgtccgcctccatgatcaagcggtacgacgagcaccaccaggacctgaccctgctgaaggccctggtgcggcagcagctgcccgagaagtacaaggagatcttcttcgaccagtccaagaacggctacgccggctacatcgacggcggcgcctcccaggaggagttctacaagttcatcaagcccatcctggagaagatggacggcaccgaggagctgctggtgaagctgaaccgggaggacctgctgcggaagcagcggaccttcgacaacggctccatcccccaccagatccacctgggcgagctgcacgccatcctgcggcggcaggaggacttctaccccttcctgaaggacaaccgggagaagatcgagaagatcctgaccttccggatcccctactacgtgggccccctggcccggggcaactcccggttcgcctggatgacccggaagtccgaggagaccatcaccccctggaacttcgaggaggtggtggacaagggcgcctccgcccagtccttcatcgagcggatgaccaacttcgacaagaacctgcccaacgagaaggtgctgcccaagcactccctgctgtacgagtacttcaccgtgtacaacgagctgaccaaggtgaagtacgtgaccgagggcatgcggaagcccgccttcctgtccggcgagcagaagaaggccatcgtggacctgctgttcaagaccaaccggaaggtgaccgtgaagcagctgaaggaggactacttcaagaagatcgagtgcttcgactccgtggagatctccggcgtggaggaccggttcaacgcctccctgggcacctaccacgacctgctgaagatcatcaaggacaaggacttcctggacaacgaggagaacgaggacatcctggaggacatcgtgctgaccctgaccctgttcgaggaccgggagatgatcgaggagcggctgaagacctacgcccacctgttcgacgacaaggtgatgaagcagctgaagcggcggcggtacaccggctggggccggctgtcccggaagctgatcaacggcatccgggacaagcagtccggcaagaccatcctggacttcctgaagtccgacggcttcgccaaccggaacttcatgcagctgatccacgacgactccctgaccttcaaggaggacatccagaaggcccaggtgtccggccagggcgactccctgcacgagcacatcgccaacctggccggctcccccgccatcaagaagggcatcctgcagaccgtgaaggtggtggacgagctggtgaaggtgatgggccggcacaagcccgagaacatcgtgatcgagatggcccgggagaaccagaccacccagaagggccagaagaactcccgggagcggatgaagcggatcgaggagggcatcaaggagctgggctcccagatcctgaaggagcaccccgtggagaacacccagctgcagaacgagaagctgtacctgtactacctgcagaacggccgggacatgtacgtggaccaggagctggacatcaaccggctgtccgactacgacgtggacgccatcgtgccccagtccttcctgaaggacgactccatcgacaacaaggtgctgacccggtccgacaagaaccggggcaagtccgacaacgtgccctccgaggaggtggtgaagaagatgaagaactactggcggcagctgctgaacgccaagctgatcacccagcggaagttcgacaacctgaccaaggccgagcggggcggcctgtccgagctggacaaggccggcttcatcaagcggcagctggtggagacccggcagatcaccaagcacgtggcccagatcctggactcccggatgaacaccaagtacgacgagaacgacaagctgatccgggaggtgaaggtgatcaccctgaagtccaagctggtgtccgacttccggaaggacttccagttctacaaggtgcgggagatcaacaactaccaccacgcccacgacgcctacctgaacgccgtggtgggcaccgccctgatcaagaagtaccccaagctggagtccgagttcgtgtacggcgactacaaggtgtacgacgtgcggaagatgatcgccaagtccgagcaggagatcggcaaggccaccgccaagtacttcttctactccaacatcatgaacttcttcaagaccgagatcaccctggccaacggcgagatccggaagcggcccctgatcgagaccaacggcgagaccggcgagatcgtgtgggacaagggccgggacttcgccaccgtgcggaaggtgctgtccatgccccaggtgaacatcgtgaagaagaccgaggtgcagaccggcggcttctccaaggagtccatcctgcccaagcggaactccgacaagctgatcgcccggaagaaggactgggaccccaagaagtacggcggcttcgactcccccaccgtggcctactccgtgctggtggtggccaaggtggagaagggcaagtccaagaagctgaagtccgtgaaggagctgctgggcatcaccatcatggagcggtcctccttcgagaagaaccccatcgacttcctggaggccaagggctacaaggaggtgaagaaggacctgatcatcaagctgcccaagtactccctgttcgagctggagaacggccggaagcggatgctggcctccgccggcgagctgcagaagggcaacgagctggccctgccctccaagtacgtgaacttcctgtacctggcctcccactacgagaagctgaagggctcccccgaggacaacgagcagaagcagctgttcgtggagcagcacaagcactacctggacgagatcatcgagcagatctccgagttctccaagcgggtgatcctggccgacgccaacctggacaaggtgctgtccgcctacaacaagcaccgggacaagcccatccgggagcaggccgagaacatcatccacctgttcaccctgaccaacctgggcgcccccgccgccttcaagtacttcgacaccaccatcgaccggaagcggtacacctccaccaaggaggtgctggacgccaccctgatccaccagtccatcaccggcctgtacgagacccggatcgacctgtcccagctgggcggcgacggcgcccccgagtccgccaccgagtccggcggcacctccaccgagtccgagggctccgccggccccaagaagaagcggaaggtgacctccaccgagtccgagggctccgccggctccgccggctccacctccggctcctcctccggcatgaagatcgccgtggtggacaaggccctgaacaacacccggtacgacaagcacttccagctgtacggcgaggaggtggacgtgttccacatgtgcaacgagaagctgtccggccggctgctgaagaagcacatcaccatcggcacccccgagaaccccttcgaccccaacgactacgacttcgtgatcctggtgggcgccgagcccttcctgtacttcgccggcaagaagggcatcggcgactacaccggcaagcgggtggagtacaacggctacgccaactggatcgcctccatctcccccgcccagctgcacttcaagcccgagatgaagcccgtgttcgacgccaccgtggagaacatccacgacatcatcaacggccgggagaagatcgccaaggccggcgactaccggcccatcaccgaccccgacgaggccgaggagtacatcaagatggtgtacaacatggtgatcggccccgtggccttcgcctccgccacctccgccctgtactgccgggacggctacctgctgggcgtgtccatctcccaccaggagtaccagggcgtgtacatcgactccgactgcctgaccgaggtggccgtgtactacctgcagaagatcctggactccgagaaccacaccatcgtgttccacaacctgaagttcgacatgcacttctacaagtaccacctgggcctgaccttcgacaaggcccacaaggagcggcggctgcacgacaccatgctgcagcactacgtgctggacgagcggcggggcacccacggcctgaagtccctggccatgaagtacaccgacatgggcgactacgacttcgagctggacaagttcaaggacgactactgcaaggcccacaagatcaagaaggaggacttcacctacgacctgatccccttcgacatcatgtggccctacgccgccaaggacaccgacgccaccatccggctgcacaacttcttcctgcccaagatcgagaagaacgagaagctgtgctccctgtactacgacgtgctgatgcccggctgcgtgttcctgcagcgggtggaggaccggggcgtgcccatctccatcgaccggctgaaggaggcccagtaccagctgacccacaacctgaacaaggcccgggagaagctgtacacctaccccgaggtgaagcagctggagcaggaccagaacgaggccttcaaccccaactccgtgaagcagctgcgggtgctgctgttcgactacgtgggcctgacccccaccggcaagctgaccgacaccggcgccgactccaccgacgccgaggccctgaacgagctggccacccagcaccccatcgccaagaccctgctggagatccggaagctgaccaagctgatctccacctacgtggagaagatcctgctgtccatcgacgccgacggctgcatccggaccggcttccacgagcacatgaccacctccggccggctgtcctcctccggcaagctgaacctgcagcagctgccccgggacgagtccatcatcaagggctgcgtggtggccccccccggctaccgggtgatcgcctgggacctgaccaccgccgaggtgtactacgccgccgtgctgtccggcgaccggaacatgcagcaggtgttcatcaacatgcggaacgagcccgacaagtaccccgacttccactccaacatcgcccacatggtgttcaagctgcagtgcgagccccgggacgtgaagaagctgttccccgccctgcggcaggccgccaaggccatcaccttcggcatcctgtacggctccggccccgccaaggtggcccactccgtgaacgaggccctgctggagcaggccgccaagaccggcgagcccttcgtggagtgcaccgtggccgacgccaaggagtacatcgagacctacttcggccagttcccccagctgaagcggtggatcgacaagtgccacgaccagatcaagaaccacggcttcatctactcccacttcggccggaagcggcggctgcacaacatccactccgaggaccggggcgtgcagggcgaggagatccggtccggcttcaacgccatcatccagtccgcctcctccgactccctgctgctgggcgccgtggacgccgacaacgagatcatctccctgggcctggagcaggagatgaagatcgtgatgctggtgcacgactccgtggtggccatcgtgcgggaggacctgatcgaccagtacaacgagatcctgatccggaacatccagaaggaccggggcatctccatccccggctgccccatcggcatcgactccgactccgaggccggcggctcccgggactactcctgcggcaagatgaagaagcagcacccctccatcgcctgcatcgacgacgacgagtacacccggtacgtgaagggcgtgctgctggacgccgagttcgagtacaagaagctggccgccatggacaaggagcaccccgaccactccaagtacaaggacgacaagttcatcgccgtgtgcaaggacctggacaacgtgaagcggatcctgggcgccggcggcggctccggcaagcggaccgccgacggctccggcggcggctcccccaagaagaagcggaaggtgcctgccgctaagagagtgaagctggactagctagcaccagcctcaagaacacccgaatggagtctctaagctacataataccaacttacactttacaaaatgttgtcccccaaaatgtagccattcgtatctgctcctaataaaaagaaagtttcttcacattctctcgagaaaaaaaaaaaatggaaaaaaaaaaaacggaaaaaaaaaaaaggtaaaaaaaaaaaatataaaaaaaaaaaacataaaaaaaaaaaacgaaaaaaaaaaaacgtaaaaaaaaaaaactcaaaaaaaaaaaagataaaaaaaaaaaacctaaaaaaaaaaaatgtaaaaaaaaaaaagggaaaaaaaaaaaacgcaaaaaaaaaaaacacaaaaaaaaaaaatgcaaaaaaaaaaaatcgaaaaaaaaaaaatctaaaaaaaaaaaacgaaaaaaaaaaaacccaaaaaaaaaaaagacaaaaaaaaaaaatagaaaaaaaaaaagttaaaaaaaaaaaactgaaaaaaaaaaaatttaaaaaaaaaaaatctag

SEQ ID NO: 1306 - DNA, 6966 bp, synthetic construct
  misc_feature 1..6966: note = Synthetic
  source 1..6966: mol_type = other DNA
atgggcaagcggcccgccgccaccaagaaggccggccaggccaagaagaagaaggacaagaagtactccatcggcctggacatcggcaccaactccgtgggctgggccgtgatcaccgacgagtacaaggtgccctccaagaagttcaaggtgctgggcaacaccgaccggcactccatcaagaagaacctgatcggcgccctgctgttcgactccggcgagaccgccgaggccacccggctgaagcggaccgcccggcggcggtacacccggcggaagaaccggatctgctacctgcaggagatcttctccaacgagatggccaaggtggacgactccttcttccaccggctggaggagtccttcctggtggaggaggacaagaagcacgagcggcaccccatcttcggcaacatcgtggacgaggtggcctaccacgagaagtaccccaccatctaccacctgcggaagaagctggtggactccaccgacaaggccgacctgcggctgatctacctggccctggcccacatgatcaagttccggggccacttcctgatcgagggcgacctgaaccccgacaactccgacgtggacaagctgttcatccagctggtgcagacctacaaccagctgttcgaggagaaccccatcaacgcctccggcgtggacgccaaggccatcctgtccgcccggctgtccaagtcccggcggctggagaacctgatcgcccagctgcccggcgagaagaagaacggcctgttcggcaacctgatcgccctgtccctgggcctgacccccaacttcaagtccaacttcgacctggccgaggacgccaagctgcagctgtccaaggacacctacgacgacgacctggacaacctgctggcccagatcggcgaccagtacgccgacctgttcctggccgccaagaacctgtccgacgccatcctgctgtccgacatcctgcgggtgaacaccgagatcaccaaggcccccctgtccgcctccatgatcaagcggtacgacgagcaccaccaggacctgaccctgctgaaggccctggtgcggcagcagctgcccgagaagtacaaggagatcttcttcgaccagtccaagaacggctacgccggctacatcgacggcggcgcctcccaggaggagttctacaagttcatcaagcccatcctggagaagatggacggcaccgaggagctgctggtgaagctgaaccgggaggacctgctgcggaagcagcggaccttcgacaacggctccatcccccaccagatccacctgggcgagctgcacgccatcctgcggcggcaggaggacttctaccccttcctgaaggacaaccgggagaagatcgagaagatcctgaccttccggatcccctactacgtgggccccctggcccggggcaactcccggttcgcctggatgacccggaagtccgaggagaccatcaccccctggaacttcgaggaggtggtggacaagggcgcctccgcccagtccttcatcgagcggatgaccaacttcgacaagaacctgcccaacgagaaggtgctgcccaagcactccctgctgtacgagtacttcaccgtgtacaacgagctgaccaaggtgaagtacgtgaccgagggcatgcggaagcccgccttcctgtccggcgagcagaagaaggccatcgtggacctgctgttcaagaccaaccggaaggtgaccgtgaagcagctgaaggaggactacttcaagaagatcgagtgcttcgactccgtggagatctccggcgtggaggaccggttcaacgcctccctgggcacctaccacgacctgctgaagatcatcaaggacaaggacttcctggacaacgaggagaacgaggacatcctggaggacatcgtgctgaccctgaccctgttcgaggaccgggagatgatcgaggagcggctgaagacctacgcccacctgttcgacgacaaggtgatgaagcagctgaagcggcggcggtacaccggctggggccggctgtcccggaagctgatcaacggcatccgggacaagcagtccggcaagaccatcctggacttcctgaagtccgacggcttcgccaaccggaacttcatgcagctgatccacgacgactccctgaccttcaaggaggacatccagaaggcccaggtgtccggccagggcgactccctgcacgagcacatcgccaacctggccggctcccccgccatcaagaagggcatcctgcagaccgtgaaggtggtggacgagctggtgaaggtgatgggccggcacaagcccgagaacatcgtgatcgagatggcccgggagaaccagaccacccagaagggccagaagaactcccgggagcggatgaagcggatcgaggagggcatcaaggagctgggctcccagatcctgaaggagcaccccgtggagaacacccagctgcagaacgagaagctgtacctgtactacctgcagaacggccgggacatgtacgtggaccaggagctggacatcaaccggctgtccgactacgacgtggacgccatcgtgccccagtccttcctgaaggacgactccatcgacaacaaggtgctgacccggtccgacaagaaccggggcaagtccgacaacgtgccctccgaggaggtggtgaagaagatgaagaactactggcggcagctgctgaacgccaagctgatcacccagcggaagttcgacaacctgaccaaggccgagcggggcggcctgtccgagctggacaaggccggcttcatcaagcggcagctggtggagacccggcagatcaccaagcacgtggcccagatcctggactcccggatgaacaccaagtacgacgagaacgacaagctgatccgggaggtgaaggtgatcaccctgaagtccaagctggtgtccgacttccggaaggacttccagttctacaaggtgcgggagatcaacaactaccaccacgcccacgacgcctacctgaacgccgtggtgggcaccgccctgatcaagaagtaccccaagctggagtccgagttcgtgtacggcgactacaaggtgtacgacgtgcggaagatgatcgccaagtccgagcaggagatcggcaaggccaccgccaagtacttcttctactccaacatcatgaacttcttcaagaccgagatcaccctggccaacggcgagatccggaagcggcccctgatcgagaccaacggcgagaccggcgagatcgtgtgggacaagggccgggacttcgccaccgtgcggaaggtgctgtccatgccccaggtgaacatcgtgaagaagaccgaggtgcagaccggcggcttctccaaggagtccatcctgcccaagcggaactccgacaagctgatcgcccggaagaaggactgggaccccaagaagtacggcggcttcgactcccccaccgtggcctactccgtgctggtggtggccaaggtggagaagggcaagtccaagaagctgaagtccgtgaaggagctgctgggcatcaccatcatggagcggtcctccttcgagaagaaccccatcgacttcctggaggccaagggctacaaggaggtgaagaaggacctgatcatcaagctgcccaagtactccctgttcgagctggagaacggccggaagcggatgctggcctccgccggcgagctgcagaagggcaacgagctggccctgccctccaagtacgtgaacttcctgtacctggcctcccactacgagaagctgaagggctcccccgaggacaacgagcagaagcagctgttcgtggagcagcacaagcactacctggacgagatcatcgagcagatctccgagttctccaagcgggtgatcctggccgacgccaacctggacaaggtgctgtccgcctacaacaagcaccgggacaagcccatccgggagcaggccgagaacatcatccacctgttcaccctgaccaacctgggcgcccccgccgccttcaagtacttcgacaccaccatcgaccggaagcggtacacctccaccaaggaggtgctggacgccaccctgatccaccagtccatcaccggcctgtacgagacccggatcgacctgtcccagctgggcggcgacggcgcccccgagtccgccaccgagtccggcggcacctccaccgagtccgagggctccgccggccccaagaagaagcggaaggtgacctccaccgagtccgagggctccgccggctccgccggctccacctccggctcctcctccggcatgaagatcgccgtggtggacaaggccctgaacaacacccggtacgacaagcacttccagctgtacggcgaggaggtggacgtgttccacatgtgcaacgagaagctgtccggccggctgctgaagaagcacatcaccatcggcacccccgagaaccccttcgaccccaacgactacgacttcgtgatcctggtgggcgccgagcccttcctgtacttcgccggcaagaagggcatcggcgactacaccggcaagcgggtggagtacaacggctacgccaactggatcgcctccatctcccccgcccagctgcacttcaagcccgagatgaagcccgtgttcgacgccaccgtggagaacatccacgacatcatcaacggccgggagaagatcgccaaggccggcgactaccggcccatcaccgaccccgacgaggccgaggagtacatcaagatggtgtacaacatggtgatcggccccgtggccttcgcctccgccacctccgccctgtactgccgggacggctacctgctgggcgtgtccatctcccaccaggagtaccagggcgtgtacatcgactccgactgcctgaccgaggtggccgtgtactacctgcagaagatcctggactccgagaaccacaccatcgtgttccacaacctgaagttcgacatgcacttctacaagtaccacctgggcctgaccttcgacaaggcccacaaggagcggcggctgcacgacaccatgctgcagcactacgtgctggacgagcggcggggcacccacggcctgaagtccctggccatgaagtacaccgacatgggcgactacgacttcgagctggacaagttcaaggacgactactgcaaggcccacaagatcaagaaggaggacttcacctacgacctgatccccttcgacatcatgtggccctacgccgccaaggacaccgacgccaccatccggctgcacaacttcttcctgcccaagatcgagaagaacgagaagctgtgctccctgtactacgacgtgctgatgcccggctgcgtgttcctgcagcgggtggaggaccggggcgtgcccatctccatcgaccggctgaaggaggcccagtaccagctgacccacaacctgaacaaggcccgggagaagctgtacacctaccccgaggtgaagcagctggagcaggaccagaacgaggccttcaaccccaactccgtgaagcagctgcgggtgctgctgttcgactacgtgggcctgacccccaccggcaagctgaccgacaccggcgccgactccaccgacgccgaggccctgaacgagctggccacccagcaccccatcgccaagaccctgctggagatccggaagctgaccaagctgatctccacctacgtggagaagatcctgctgtccatcgacgccgacggctgcatccggaccggcttccacgagcacatgaccacctccggccggctgtcctcctccggcaagctgaacctgcagcagctgccccgggacgagtccatcatcaagggctgcgtggtggccccccccggctaccgggtgatcgcctgggacctgaccaccgccgaggtgtactacgccgccgtgctgtccggcgaccggaacatgcagcaggtgttcatcaacatgcggaacgagcccgacaagtaccccgacttccactccaacatcgcccacatggtgttcaagctgcagtgcgagccccgggacgtgaagaagctgttccccgccctgcggcaggccgccaaggccatcaccttcggcatcctgtacggctccggccccgccaaggtggcccactccgtgaacgaggccctgctggagcaggccgccaagaccggcgagcccttcgtggagtgcaccgtggccgacgccaaggagtacatcgagacctacttcggccagttcccccagctgaagcggtggatcgacaagtgccacgaccagatcaagaaccacggcttcatctactcccacttcggccggaagcggcggctgcacaacatccactccgaggaccggggcgtgcagggcgaggagatccggtccggcttcaacgccatcatccagtccgcctcctccgactccctgctgctgggcgccgtggacgccgacaacgagatcatctccctgggcctggagcaggagatgaagatcgtgatgctggtgcacgactccgtggtggccatcgtgcgggaggacctgatcgaccagtacaacgagatcctgatccggaacatccagaaggaccggggcatctccatccccggctgccccatcggcatcgactccgactccgaggccggcggctcccgggactactcctgcggcaagatgaagaagcagcacccctccatcgcctgcatcgacgacgacgagtacacccggtacgtgaagggcgtgctgctggacgccgagttcgagtacaagaagctggccgccatggacaaggagcaccccgaccactccaagtacaaggacgacaagttcatcgccgtgtgcaaggacctggacaacgtgaagcggatcctgggcgccggcggcggctccggcaagcggaccgccgacggctccggcggcggctcccccaagaagaagcggaaggtgcctgccgctaagagagtgaagctggactag

SEQ ID NO: 1307 - protein, 2321 aa, synthetic construct
  REGION 1..2321: note = Synthetic
MGKRPAATKKAGQAKKKKDKKYSIGLDIGTNSVGWAVITDEYKVPSKKFKVLGNTDRHSIKKNLIGALLFDSGETAEATRLKRTARRRYTRRKNRICYLQEIFSNEMAKVDDSFFHRLEESFLVEEDKKHERHPIFGNIVDEVAYHEKYPTIYHLRKKLVDSTDKADLRLIYLALAHMIKFRGHFLIEGDLNPDNSDVDKLFIQLVQTYNQLFEENPINASGVDAKAILSARLSKSRRLENLIAQLPGEKKNGLFGNLIALSLGLTPNFKSNFDLAEDAKLQLSKDTYDDDLDNLLAQIGDQYADLFLAAKNLSDAILLSDILRVNTEITKAPLSASMIKRYDEHHQDLTLLKALVRQQLPEKYKEIFFDQSKNGYAGYIDGGASQEEFYKFIKPILEKMDGTEELLVKLNREDLLRKQRTFDNGSIPHQIHLGELHAILRRQEDFYPFLKDNREKIEKILTFRIPYYVGPLARGNSRFAWMTRKSEETITPWNFEEVVDKGASAQSFIERMTNFDKNLPNEKVLPKHSLLYEYFTVYNELTKVKYVTEGMRKPAFLSGEQKKAIVDLLFKTNRKVTVKQLKEDYFKKIECFDSVEISGVEDRFNASLGTYHDLLKIIKDKDFLDNEENEDILEDIVLTLTLFEDREMIEERLKTYAHLFDDKVMKQLKRRRYTGWGRLSRKLINGIRDKQSGKTILDFLKSDGFANRNFMQLIHDDSLTFKEDIQKAQVSGQGDSLHEHIANLAGSPAIKKGILQTVKVVDELVKVMGRHKPENIVIEMARENQTTQKGQKNSRERMKRIEEGIKELGSQILKEHPVENTQLQNEKLYLYYLQNGRDMYVDQELDINRLSDYDVDAIVPQSFLKDDSIDNKVLTRSDKNRGKSDNVPSEEVVKKMKNYWRQLLNAKLITQRKFDNLTKAERGGLSELDKAGFIKRQLVETRQITKHVAQILDSRMNTKYDENDKLIREVKVITLKSKLVSDFRKDFQFYKVREINNYHHAHDAYLNAVVGTALIKKYPKLESEFVYGDYKVYDVRKMIAKSEQEIGKATAKYFFYSNIMNFFKTEITLANGEIRKRPLIETNGETGEIVWDKGRDFATVRKVLSMPQVNIVKKTEVQTGGFSKESILPKRNSDKLIARKKDWDPKKYGGFDSPTVAYSVLVVAKVEKGKSKKLKSVKELLGITIMERSSFEKNPIDFLEAKGYKEVKKDLIIKLPKYSLFELENGRKRMLASAGELQKGNELALPSKYVNFLYLASHYEKLKGSPEDNEQKQLFVEQHKHYLDEIIEQISEFSKRVILADANLDKVLSAYNKHRDKPIREQAENIIHLFTLTNLGAPAAFKYFDTTIDRKRYTSTKEVLDATLIHQSITGLYETRIDLSQLGGDGAPESATESGGTSTESEGSAGPKKKRKVTSTESEGSAGSAGSTSGSSSGMKIAVVDKALNNTRYDKHFQLYGEEVDVFHMCNEKLSGRLLKKHITIGTPENPFDPNDYDFVILVGAEPFLYFAGKKGIGDYTGKRVEYNGYANWIASISPAQLHFKPEMKPVFDATVENIHDIINGREKIAKAGDYRPITDPDEAEEYIKMVYNMVIGPVAFASATSALYCRDGYLLGVSISHQEYQGVYIDSDCLTEVAVYYLQKILDSENHTIVFHNLKFDMHFYKYHLGLTFDKAHKERRLHDTMLQHYVLDERRGTHGLKSLAMKYTDMGDYDFELDKFKDDYCKAHKIKKEDFTYDLIPFDIMWPYAAKDTDATIRLHNFFLPKIEKNEKLCSLYYDVLMPGCVFLQRVEDRGVPISIDRLKEAQYQLTHNLNKAREKLYTYPEVKQLEQDQNEAFNPNSVKQLRVLLFDYVGLTPTGKLTDTGADSTDAEALNELATQHPIAKTLLEIRKLTKLISTYVEKILLSIDADGCIRTGFHEHMTTSGRLSSSGKLNLQQLPRDESIIKGCVVAPPGYRVIAWDLTTAEVYYAAVLSGDRNMQQVFINMRNEPDKYPDFHSNIAHMVFKLQCEPRDVKKLFPALRQAAKAITFGILYGSGPAKVAHSVNEALLEQAAKTGEPFVECTVADAKEYIETYFGQFPQLKRWIDKCHDQIKNHGFIYSHFGRKRRLHNIHSEDRGVQGEEIRSGFNAIIQSASSDSLLLGAVDADNEIISLGLEQEMKIVMLVHDSVVAIVREDLIDQYNEILIRNIQKDRGISIPGCPIGIDSDSEAGGSRDYSCGKMKKQHPSIACIDDDEYTRYVKGVLLDAEFEYKKLAAMDKEHPDHSKYKDDKFIAVCKDLDNVKRILGAGGGSGKRTADGSGGGSPKKKRKVPAAKRVKLD

SEQ ID NO: 1308-1361 - skipped (54 entries)

SEQ ID NO: 1362 - RNA, 5081 nt, synthetic construct
  misc_feature 1..5081: note = Synthetic
  source 1..5081: mol_type = other RNA
aggactcactatttgttttcgcgcccagttgcaaaaagtgtcgaagctcagaataaacgctcaactttggccggatctgccaccatgggcaagcggcccgccgccaccaagaaggccggccaggccaagaagaagaaggacaagaagtactccatcggcctggacatcggcaccaactccgtgggctgggccgtgatcaccgacgagtacaaggtgccctccaagaagttcaaggtgctgggcaacaccgaccggcactccatcaagaagaacctgatcggcgccctgctgttcgactccggcgagaccgccgaggccacccggctgaagcggaccgcccggcggcggtacacccggcggaagaaccggatctgctacctgcaggagatcttctccaacgagatggccaaggtggacgactccttcttccaccggctggaggagtccttcctggtggaggaggacaagaagcacgagcggcaccccatcttcggcaacatcgtggacgaggtggcctaccacgagaagtaccccaccatctaccacctgcggaagaagctggtggactccaccgacaaggccgacctgcggctgatctacctggccctggcccacatgatcaagttccggggccacttcctgatcgagggcgacctgaaccccgacaactccgacgtggacaagctgttcatccagctggtgcagacctacaaccagctgttcgaggagaaccccatcaacgcctccggcgtggacgccaaggccatcctgtccgcccggctgtccaagtcccggcggctggagaacctgatcgcccagctgcccggcgagaagaagaacggcctgttcggcaacctgatcgccctgtccctgggcctgacccccaacttcaagtccaacttcgacctggccgaggacgccaagctgcagctgtccaaggacacctacgacgacgacctggacaacctgctggcccagatcggcgaccagtacgccgacctgttcctggccgccaagaacctgtccgacgccatcctgctgtccgacatcctgcgggtgaacaccgagatcaccaaggcccccctgtccgcctccatgatcaagcggtacgacgagcaccaccaggacctgaccctgctgaaggccctggtgcggcagcagctgcccgagaagtacaaggagatcttcttcgaccagtccaagaacggctacgccggctacatcgacggcggcgcctcccaggaggagttctacaagttcatcaagcccatcctggagaagatggacggcaccgaggagctgctggtgaagctgaaccgggaggacctgctgcggaagcagcggaccttcgacaacggctccatcccccaccagatccacctgggcgagctgcacgccatcctgcggcggcaggaggacttctaccccttcctgaaggacaaccgggagaagatcgagaagatcctgaccttccggatcccctactacgtgggccccctggcccggggcaactcccggttcgcctggatgacccggaagtccgaggagaccatcaccccctggaacttcgaggaggtggtggacaagggcgcctccgcccagtccttcatcgagcggatgaccaacttcgacaagaacctgcccaacgagaaggtgctgcccaagcactccctgctgtacgagtacttcaccgtgtacaacgagctgaccaaggtgaagtacgtgaccgagggcatgcggaagcccgccttcctgtccggcgagcagaagaaggccatcgtggacctgctgttcaagaccaaccggaaggtgaccgtgaagcagctgaaggaggactacttcaagaagatcgagtgcttcgactccgtggagatctccggcgtggaggaccggttcaacgcctccctgggcacctaccacgacctgctgaagatcatcaaggacaaggacttcctggacaacgaggagaacgaggacatcctggaggacatcgtgctgaccctgaccctgttcgaggaccgggagatgatcgaggagcggctgaagacctacgcccacctgttcgacgacaaggtgatgaagcagctgaagcggcggcggtacaccggctggggccggctgtcccggaagctgatcaacggcatccgggacaagcagtccggcaagaccatcctggacttcctgaagtccgacggcttcgccaaccggaacttcatgcagctgatccacgacgactccctgaccttcaaggaggacatccagaaggcccaggtgtccggccagggcgactccctgcacgagcacatcgccaacctggccggctcccccgccatcaagaagggcatcctgcagaccgtgaaggtggtggacgagctggtgaaggtgatgggccggcacaagcccgagaacatcgtgatcgagatggcccgggagaaccagaccacccagaagggccagaagaactcccgggagcggatgaagcggatcgaggagggcatcaaggagctgggctcccagatcctgaaggagcaccccgtggagaacacccagctgcagaacgagaagctgtacctgtactacctgcagaacggccgggacatgtacgtggaccaggagctggacatcaaccggctgtccgactacgacgtggacgccatcgtgccccagtccttcctgaaggacgactccatcgacaacaaggtgctgacccggtccgacaagaaccggggcaagtccgacaacgtgccctccgaggaggtggtgaagaagatgaagaactactggcggcagctgctgaacgccaagctgatcacccagcggaagttcgacaacctgaccaaggccgagcggggcggcctgtccgagctggacaaggccggcttcatcaagcggcagctggtggagacccggcagatcaccaagcacgtggcccagatcctggactcccggatgaacaccaagtacgacgagaacgacaagctgatccgggaggtgaaggtgatcaccctgaagtccaagctggtgtccgacttccggaaggacttccagttctacaaggtgcgggagatcaacaactaccaccacgcccacgacgcctacctgaacgccgtggtgggcaccgccctgatcaagaagtaccccaagctggagtccgagttcgtgtacggcgactacaaggtgtacgacgtgcggaagatgatcgccaagtccgagcaggagatcggcaaggccaccgccaagtacttcttctactccaacatcatgaacttcttcaagaccgagatcaccctggccaacggcgagatccggaagcggcccctgatcgagaccaacggcgagaccggcgagatcgtgtgggacaagggccgggacttcgccaccgtgcggaaggtgctgtccatgccccaggtgaacatcgtgaagaagaccgaggtgcagaccggcggcttctccaaggagtccatcctgcccaagcggaactccgacaagctgatcgcccggaagaaggactgggaccccaagaagtacggcggcttcgactcccccaccgtggcctactccgtgctggtggtggccaaggtggagaagggcaagtccaagaagctgaagtccgtgaaggagctgctgggcatcaccatcatggagcggtcctccttcgagaagaaccccatcgacttcctggaggccaagggctacaaggaggtgaagaaggacctgatcatcaagctgcccaagtactccctgttcgagctggagaacggccggaagcggatgctggcctccgccggcgagctgcagaagggcaacgagctggccctgccctccaagtacgtgaacttcctgtacctggcctcccactacgagaagctgaagggctcccccgaggacaacgagcagaagcagctgttcgtggagcagcacaagcactacctggacgagatcatcgagcagatctccgagttctccaagcgggtgatcctggccgacgccaacctggacaaggtgctgtccgcctacaacaagcaccgggacaagcccatccgggagcaggccgagaacatcatccacctgttcaccctgaccaacctgggcgcccccgccgccttcaagtacttcgacaccaccatcgaccggaagcggtacacctccaccaaggaggtgctggacgccaccctgatccaccagtccatcaccggcctgtacgagacccggatcgacctgtcccagctgggcggcgactccggcggctcccggggcaagtgcctgtcctacgacaccgagatcctgaccgtggagtacggcttcctgcccatcggcaagatcgtggaggagcggatcgagtgcaccgtgtacaccgtggacaagaacggcttcgtgtacacccagcccatcgcccagtggcacaaccgcggcgagcaggaggtgttcgagtactgcctggaggacggctccatcatccgcgccaccaaggaccacaagttcatgaccaccgacggccagatgctgcccatcgacgagatcttcgagcgcggcctggacctgaagcaggtggacggcctgccctagctagcaccagcctcaagaacacccgaatggagtctctaagctacataataccaacttacactttacaaaatgttgtcccccaaaatgtagccattcgtatctgctcctaataaaaagaaagtttcttcacattctctcgagaaaaaaaaaaaatggaaaaaaaaaaaacggaaaaaaaaaaaaggtaaaaaaaaaaaatataaaaaaaaaaaacataaaaaaaaaaaacgaaaaaaaaaaaacgtaaaaaaaaaaaactcaaaaaaaaaaaagataaaaaaaaaaaacctaaaaaaaaaaaatgtaaaaaaaaaaaagggaaaaaaaaaaaacgcaaaaaaaaaaaacacaaaaaaaaaaaatgcaaaaaaaaaaaatcgaaaaaaaaaaaatctaaaaaaaaaaaacgaaaaaaaaaaaacccaaaaaaaaaaaagacaaaaaaaaaaaatagaaaaaaaaaaagttaaaaaaaaaaaactgaaaaaaaaaaaatttaaaaaaaaaaaatctag

SEQ ID NO: 1363 - DNA, 4482 bp, synthetic construct
  misc_feature 1..4482: note = Synthetic
  source 1..4482: mol_type = other DNA
atgggcaagcggcccgccgccaccaagaaggccggccaggccaagaagaagaaggacaagaagtactccatcggcctggacatcggcaccaactccgtgggctgggccgtgatcaccgacgagtacaaggtgccctccaagaagttcaaggtgctgggcaacaccgaccggcactccatcaagaagaacctgatcggcgccctgctgttcgactccggcgagaccgccgaggccacccggctgaagcggaccgcccggcggcggtacacccggcggaagaaccggatctgctacctgcaggagatcttctccaacgagatggccaaggtggacgactccttcttccaccggctggaggagtccttcctggtggaggaggacaagaagcacgagcggcaccccatcttcggcaacatcgtggacgaggtggcctaccacgagaagtaccccaccatctaccacctgcggaagaagctggtggactccaccgacaaggccgacctgcggctgatctacctggccctggcccacatgatcaagttccggggccacttcctgatcgagggcgacctgaaccccgacaactccgacgtggacaagctgttcatccagctggtgcagacctacaaccagctgttcgaggagaaccccatcaacgcctccggcgtggacgccaaggccatcctgtccgcccggctgtccaagtcccggcggctggagaacctgatcgcccagctgcccggcgagaagaagaacggcctgttcggcaacctgatcgccctgtccctgggcctgacccccaacttcaagtccaacttcgacctggccgaggacgccaagctgcagctgtccaaggacacctacgacgacgacctggacaacctgctggcccagatcggcgaccagtacgccgacctgttcctggccgccaagaacctgtccgacgccatcctgctgtccgacatcctgcgggtgaacaccgagatcaccaaggcccccctgtccgcctccatgatcaagcggtacgacgagcaccaccaggacctgaccctgctgaaggccctggtgcggcagcagctgcccgagaagtacaaggagatcttcttcgaccagtccaagaacggctacgccggctacatcgacggcggcgcctcccaggaggagttctacaagttcatcaagcccatcctggagaagatggacggcaccgaggagctgctggtgaagctgaaccgggaggacctgctgcggaagcagcggaccttcgacaacggctccatcccccaccagatccacctgggcgagctgcacgccatcctgcggcggcaggaggacttctaccccttcctgaaggacaaccgggagaagatcgagaagatcctgaccttccggatcccctactacgtgggccccctggcccggggcaactcccggttcgcctggatgacccggaagtccgaggagaccatcaccccctggaacttcgaggaggtggtggacaagggcgcctccgcccagtccttcatcgagcggatgaccaacttcgacaagaacctgcccaacgagaaggtgctgcccaagcactccctgctgtacgagtacttcaccgtgtacaacgagctgaccaaggtgaagtacgtgaccgagggcatgcggaagcccgccttcctgtccggcgagcagaagaaggccatcgtggacctgctgttcaagaccaaccggaaggtgaccgtgaagcagctgaaggaggactacttcaagaagatcgagtgcttcgactccgtggagatctccggcgtggaggaccggttcaacgcctccctgggcacctaccacgacctgctgaagatcatcaaggacaaggacttcctggacaacgaggagaacgaggacatcctggaggacatcgtgctgaccctgaccctgttcgaggaccgggagatgatcgaggagcggctgaagacctacgcccacctgttcgacgacaaggtgatgaagcagctgaagcggcggcggtacaccggctggggccggctgtcccggaagctgatcaacggcatccgggacaagcagtccggcaagaccatcctggacttcctgaagtccgacggcttcgccaaccggaacttcatgcagctgatccacgacgactccctgaccttcaaggaggacatccagaaggcccaggtgtccggccagggcgactccctgcacgagcacatcgccaacctggccggctcccccgccatcaagaagggcatcctgcagaccgtgaaggtggtggacgagctggtgaaggtgatgggccggcacaagcccgagaacatcgtgatcgagatggcccgggagaaccagaccacccagaagggccagaagaactcccgggagcggatgaagcggatcgaggagggcatcaaggagctgggctcccagatcctgaaggagcaccccgtggagaacacccagctgcagaacgagaagctgtacctgtactacctgcagaacggccgggacatgtacgtggaccaggagctggacatcaaccggctgtccgactacgacgtggacgccatcgtgccccagtccttcctgaaggacgactccatcgacaacaaggtgctgacccggtccgacaagaaccggggcaagtccgacaacgtgccctccgaggaggtggtgaagaagatgaagaactactggcggcagctgctgaacgccaagctgatcacccagcggaagttcgacaacctgaccaaggccgagcggggcggcctgtccgagctggacaaggccggcttcatcaagcggcagctggtggagacccggcagatcaccaagcacgtggcccagatcctggactcccggatgaacaccaagtacgacgagaacgacaagctgatccgggaggtgaaggtgatcaccctgaagtccaagctggtgtccgacttccggaaggacttccagttctacaaggtgcgggagatcaacaactaccaccacgcccacgacgcctacctgaacgccgtggtgggcaccgccctgatcaagaagtaccccaagctggagtccgagttcgtgtacggcgactacaaggtgtacgacgtgcggaagatgatcgccaagtccgagcaggagatcggcaaggccaccgccaagtacttcttctactccaacatcatgaacttcttcaagaccgagatcaccctggccaacggcgagatccggaagcggcccctgatcgagaccaacggcgagaccggcgagatcgtgtgggacaagggccgggacttcgccaccgtgcggaaggtgctgtccatgccccaggtgaacatcgtgaagaagaccgaggtgcagaccggcggcttctccaaggagtccatcctgcccaagcggaactccgacaagctgatcgcccggaagaaggactgggaccccaagaagtacggcggcttcgactcccccaccgtggcctactccgtgctggtggtggccaaggtggagaagggcaagtccaagaagctgaagtccgtgaaggagctgctgggcatcaccatcatggagcggtcctccttcgagaagaaccccatcgacttcctggaggccaagggctacaaggaggtgaagaaggacctgatcatcaagctgcccaagtactccctgttcgagctggagaacggccggaagcggatgctggcctccgccggcgagctgcagaagggcaacgagctggccctgccctccaagtacgtgaacttcctgtacctggcctcccactacgagaagctgaagggctcccccgaggacaacgagcagaagcagctgttcgtggagcagcacaagcactacctggacgagatcatcgagcagatctccgagttctccaagcgggtgatcctggccgacgccaacctggacaaggtgctgtccgcctacaacaagcaccgggacaagcccatccgggagcaggccgagaacatcatccacctgttcaccctgaccaacctgggcgcccccgccgccttcaagtacttcgacaccaccatcgaccggaagcggtacacctccaccaaggaggtgctggacgccaccctgatccaccagtccatcaccggcctgtacgagacccggatcgacctgtcccagctgggcggcgactccggcggctcccggggcaagtgcctgtcctacgacaccgagatcctgaccgtggagtacggcttcctgcccatcggcaagatcgtggaggagcggatcgagtgcaccgtgtacaccgtggacaagaacggcttcgtgtacacccagcccatcgcccagtggcacaaccgcggcgagcaggaggtgttcgagtactgcctggaggacggctccatcatccgcgccaccaaggaccacaagttcatgaccaccgacggccagatgctgcccatcgacgagatcttcgagcgcggcctggacctgaagcaggtggacggcctgccctag

SEQ ID NO: 1364 - protein, 1493 aa, synthetic construct
  REGION 1..1493: note = Synthetic
MGKRPAATKKAGQAKKKKDKKYSIGLDIGTNSVGWAVITDEYKVPSKKFKVLGNTDRHSIKKNLIGALLFDSGETAEATRLKRTARRRYTRRKNRICYLQEIFSNEMAKVDDSFFHRLEESFLVEEDKKHERHPIFGNIVDEVAYHEKYPTIYHLRKKLVDSTDKADLRLIYLALAHMIKFRGHFLIEGDLNPDNSDVDKLFIQLVQTYNQLFEENPINASGVDAKAILSARLSKSRRLENLIAQLPGEKKNGLFGNLIALSLGLTPNFKSNFDLAEDAKLQLSKDTYDDDLDNLLAQIGDQYADLFLAAKNLSDAILLSDILRVNTEITKAPLSASMIKRYDEHHQDLTLLKALVRQQLPEKYKEIFFDQSKNGYAGYIDGGASQEEFYKFIKPILEKMDGTEELLVKLNREDLLRKQRTFDNGSIPHQIHLGELHAILRRQEDFYPFLKDNREKIEKILTFRIPYYVGPLARGNSRFAWMTRKSEETITPWNFEEVVDKGASAQSFIERMTNFDKNLPNEKVLPKHSLLYEYFTVYNELTKVKYVTEGMRKPAFLSGEQKKAIVDLLFKTNRKVTVKQLKEDYFKKIECFDSVEISGVEDRFNASLGTYHDLLKIIKDKDFLDNEENEDILEDIVLTLTLFEDREMIEERLKTYAHLFDDKVMKQLKRRRYTGWGRLSRKLINGIRDKQSGKTILDFLKSDGFANRNFMQLIHDDSLTFKEDIQKAQVSGQGDSLHEHIANLAGSPAIKKGILQTVKVVDELVKVMGRHKPENIVIEMARENQTTQKGQKNSRERMKRIEEGIKELGSQILKEHPVENTQLQNEKLYLYYLQNGRDMYVDQELDINRLSDYDVDAIVPQSFLKDDSIDNKVLTRSDKNRGKSDNVPSEEVVKKMKNYWRQLLNAKLITQRKFDNLTKAERGGLSELDKAGFIKRQLVETRQITKHVAQILDSRMNTKYDENDKLIREVKVITLKSKLVSDFRKDFQFYKVREINNYHHAHDAYLNAVVGTALIKKYPKLESEFVYGDYKVYDVRKMIAKSEQEIGKATAKYFFYSNIMNFFKTEITLANGEIRKRPLIETNGETGEIVWDKGRDFATVRKVLSMPQVNIVKKTEVQTGGFSKESILPKRNSDKLIARKKDWDPKKYGGFDSPTVAYSVLVVAKVEKGKSKKLKSVKELLGITIMERSSFEKNPIDFLEAKGYKEVKKDLIIKLPKYSLFELENGRKRMLASAGELQKGNELALPSKYVNFLYLASHYEKLKGSPEDNEQKQLFVEQHKHYLDEIIEQISEFSKRVILADANLDKVLSAYNKHRDKPIREQAENIIHLFTLTNLGAPAAFKYFDTTIDRKRYTSTKEVLDATLIHQSITGLYETRIDLSQLGGDSGGSRGKCLSYDTEILTVEYGFLPIGKIVEERIECTVYTVDKNGFVYTQPIAQWHNRGEQEVFEYCLEDGSIIRATKDHKFMTTDGQMLPIDEIFERGLDLKQVDGLP

SEQ ID NO: 1365 - RNA, 5777 nt, synthetic construct
  misc_feature 1..5777: note = Synthetic
  source 1..5777: mol_type = other RNA
aggactcactatttgttttcgcgcccagttgcaaaaagtgtcgaagctcagaataaacgctcaactttggccggatctgccaccatgggcaagcggcccgccgccaccaagaaggccggccaggccaagaagaagaagtccggctccgagacccccggcacctccgagtccgccacccccgagtccggcaagggcgaccccaagaagccccggggcaagatgtcctcctacgccttcttcgtgcagacctgccgggaggagcacaagaagaagcaccccgacgcctccgtgaacttctccgagttctccaagaagtgctccgagcggtggaagaccatgtccgccaaggagaagggcaagttcgaggacatggccaaggccgacaaggcccggtacgagcgggagatgaagacctacatcccccccaagggcgagaccaagaagaagttcaaggaccccaacgcccccaagcggcccccctccgccttcttcctgttctgctccgagtaccggcccaagatcaagggcgagcaccccggcctgtccatcggcgacgtggccaagaagctgggcgagatgtggaacaacaccgccgccgacgacaagcagccctacgagaagaaggccgccaagctgaaggagaagtacgagaaggacatcgccgcctaccgggccaagggcaagcccgacgccgccaagaagggcgtggtgaaggccgagaagtccaagaagaagaagggcaccaaggactccaccaaggacatccccgagaccccctccaaggacggcaccaaggactccaccaaggacatccccgagaccccctccaaggacgacaagaagtactccatcggcctggacatcggcaccaactccgtgggctgggccgtgatcaccgacgagtacaaggtgccctccaagaagttcaaggtgctgggcaacaccgaccggcactccatcaagaagaacctgatcggcgccctgctgttcgactccggcgagaccgccgaggccacccggctgaagcggaccgcccggcggcggtacacccggcggaagaaccggatctgctacctgcaggagatcttctccaacgagatggccaaggtggacgactccttcttccaccggctggaggagtccttcctggtggaggaggacaagaagcacgagcggcaccccatcttcggcaacatcgtggacgaggtggcctaccacgagaagtaccccaccatctaccacctgcggaagaagctggtggactccaccgacaaggccgacctgcggctgatctacctggccctggcccacatgatcaagttccggggccacttcctgatcgagggcgacctgaaccccgacaactccgacgtggacaagctgttcatccagctggtgcagacctacaaccagctgttcgaggagaaccccatcaacgcctccggcgtggacgccaaggccatcctgtccgcccggctgtccaagtcccggcggctggagaacctgatcgcccagctgcccggcgagaagaagaacggcctgttcggcaacctgatcgccctgtccctgggcctgacccccaacttcaagtccaacttcgacctggccgaggacgccaagctgcagctgtccaaggacacctacgacgacgacctggacaacctgctggcccagatcggcgaccagtacgccgacctgttcctggccgccaagaacctgtccgacgccatcctgctgtccgacatcctgcgggtgaacaccgagatcaccaaggcccccctgtccgcctccatgatcaagcggtacgacgagcaccaccaggacctgaccctgctgaaggccctggtgcggcagcagctgcccgagaagtacaaggagatcttcttcgaccagtccaagaacggctacgccggctacatcgacggcggcgcctcccaggaggagttctacaagttcatcaagcccatcctggagaagatggacggcaccgaggagctgctggtgaagctgaaccgggaggacctgctgcggaagcagcggaccttcgacaacggctccatcccccaccagatccacctgggcgagctgcacgccatcctgcggcggcaggaggacttctaccccttcctgaaggacaaccgggagaagatcgagaagatcctgaccttccggatcccctactacgtgggccccctggcccggggcaactcccggttcgcctggatgacccggaagtccgaggagaccatcaccccctggaacttcgaggaggtggtggacaagggcgcctccgcccagtccttcatcgagcggatgaccaacttcgacaagaacctgcccaacgagaaggtgctgcccaagcactccctgctgtacgagtacttcaccgtgtacaacgagctgaccaaggtgaagtacgtgaccgagggcatgcggaagcccgccttcctgtccggcgagcagaagaaggccatcgtggacctgctgttcaagaccaaccggaaggtgaccgtgaagcagctgaaggaggactacttcaagaagatcgagtgcttcgactccgtggagatctccggcgtggaggaccggttcaacgcctccctgggcacctaccacgacctgctgaagatcatcaaggacaaggacttcctggacaacgaggagaacgaggacatcctggaggacatcgtgctgaccctgaccctgttcgaggaccgggagatgatcgaggagcggctgaagacctacgcccacctgttcgacgacaaggtgatgaagcagctgaagcggcggcggtacaccggctggggccggctgtcccggaagctgatcaacggcatccgggacaagcagtccggcaagaccatcctggacttcctgaagtccgacggcttcgccaaccggaacttcatgcagctgatccacgacgactccctgaccttcaaggaggacatccagaaggcccaggtgtccggccagggcgactccctgcacgagcacatcgccaacctggccggctcccccgccatcaagaagggcatcctgcagaccgtgaaggtggtggacgagctggtgaaggtgatgggccggcacaagcccgagaacatcgtgatcgagatggcccgggagaaccagaccacccagaagggccagaagaactcccgggagcggatgaagcggatcgaggagggcatcaaggagctgggctcccagatcctgaaggagcaccccgtggagaacacccagctgcagaacgagaagctgtacctgtactacctgcagaacggccgggacatgtacgtggaccaggagctggacatcaaccggctgtccgactacgacgtggacgccatcgtgccccagtccttcctgaaggacgactccatcgacaacaaggtgctgacccggtccgacaagaaccggggcaagtccgacaacgtgccctccgaggaggtggtgaagaagatgaagaactactggcggcagctgctgaacgccaagctgatcacccagcggaagttcgacaacctgaccaaggccgagcggggcggcctgtccgagctggacaaggccggcttcatcaagcggcagctggtggagacccggcagatcaccaagcacgtggcccagatcctggactcccggatgaacaccaagtacgacgagaacgacaagctgatccgggaggtgaaggtgatcaccctgaagtccaagctggtgtccgacttccggaaggacttccagttctacaaggtgcgggagatcaacaactaccaccacgcccacgacgcctacctgaacgccgtggtgggcaccgccctgatcaagaagtaccccaagctggagtccgagttcgtgtacggcgactacaaggtgtacgacgtgcggaagatgatcgccaagtccgagcaggagatcggcaaggccaccgccaagtacttcttctactccaacatcatgaacttcttcaagaccgagatcaccctggccaacggcgagatccggaagcggcccctgatcgagaccaacggcgagaccggcgagatcgtgtgggacaagggccgggacttcgccaccgtgcggaaggtgctgtccatgccccaggtgaacatcgtgaagaagaccgaggtgcagaccggcggcttctccaaggagtccatcctgcccaagcggaactccgacaagctgatcgcccggaagaaggactgggaccccaagaagtacggcggcttcgactcccccaccgtggcctactccgtgctggtggtggccaaggtggagaagggcaagtccaagaagctgaagtccgtgaaggagctgctgggcatcaccatcatggagcggtcctccttcgagaagaaccccatcgacttcctggaggccaagggctacaaggaggtgaagaaggacctgatcatcaagctgcccaagtactccctgttcgagctggagaacggccggaagcggatgctggcctccgccggcgagctgcagaagggcaacgagctggccctgccctccaagtacgtgaacttcctgtacctggcctcccactacgagaagctgaagggctcccccgaggacaacgagcagaagcagctgttcgtggagcagcacaagcactacctggacgagatcatcgagcagatctccgagttctccaagcgggtgatcctggccgacgccaacctggacaaggtgctgtccgcctacaacaagcaccgggacaagcccatccgggagcaggccgagaacatcatccacctgttcaccctgaccaacctgggcgcccccgccgccttcaagtacttcgacaccaccatcgaccggaagcggtacacctccaccaaggaggtgctggacgccaccctgatccaccagtccatcaccggcctgtacgagacccggatcgacctgtcccagctgggcggcgactccggcggctcccggggcaagtgcctgtcctacgacaccgagatcctgaccgtggagtacggcttcctgcccatcggcaagatcgtggaggagcggatcgagtgcaccgtgtacaccgtggacaagaacggcttcgtgtacacccagcccatcgcccagtggcacaaccgcggcgagcaggaggtgttcgagtactgcctggaggacggctccatcatccgcgccaccaaggaccacaagttcatgaccaccgacggccagatgctgcccatcgacgagatcttcgagcgcggcctggacctgaagcaggtggacggcctgccctagctagcaccagcctcaagaacacccgaatggagtctctaagctacataataccaacttacactttacaaaatgttgtcccccaaaatgtagccattcgtatctgctcctaataaaaagaaagtttcttcacattctctcgagaaaaaaaaaaaatggaaaaaaaaaaaacggaaaaaaaaaaaaggtaaaaaaaaaaaatataaaaaaaaaaaacataaaaaaaaaaaacgaaaaaaaaaaaacgtaaaaaaaaaaaactcaaaaaaaaaaaagataaaaaaaaaaaacctaaaaaaaaaaaatgtaaaaaaaaaaaagggaaaaaaaaaaaacgcaaaaaaaaaaaacacaaaaaaaaaaaatgcaaaaaaaaaaaatcgaaaaaaaaaaaatctaaaaaaaaaaaacgaaaaaaaaaaaacccaaaaaaaaaaaagacaaaaaaaaaaaatagaaaaaaaaaaagttaaaaaaaaaaaactgaaaaaaaaaaaatttaaaaaaaaaaaatctag

SEQ ID NO: 1366 - DNA, 5178 bp, synthetic construct
  misc_feature 1..5178: note = Synthetic
  source 1..5178: mol_type = other DNA
atgggcaagcggcccgccgccaccaagaaggccggccaggccaagaagaagaagtccggctccgagacccccggcacctccgagtccgccacccccgagtccggcaagggcgaccccaagaagccccggggcaagatgtcctcctacgccttcttcgtgcagacctgccgggaggagcacaagaagaagcaccccgacgcctccgtgaacttctccgagttctccaagaagtgctccgagcggtggaagaccatgtccgccaaggagaagggcaagttcgaggacatggccaaggccgacaaggcccggtacgagcgggagatgaagacctacatcccccccaagggcgagaccaagaagaagttcaaggaccccaacgcccccaagcggcccccctccgccttcttcctgttctgctccgagtaccggcccaagatcaagggcgagcaccccggcctgtccatcggcgacgtggccaagaagctgggcgagatgtggaacaacaccgccgccgacgacaagcagccctacgagaagaaggccgccaagctgaaggagaagtacgagaaggacatcgccgcctaccgggccaagggcaagcccgacgccgccaagaagggcgtggtgaaggccgagaagtccaagaagaagaagggcaccaaggactccaccaaggacatccccgagaccccctccaaggacggcaccaaggactccaccaaggacatccccgagaccccctccaaggacgacaagaagtactccatcggcctggacatcggcaccaactccgtgggctgggccgtgatcaccgacgagtacaaggtgccctccaagaagttcaaggtgctgggcaacaccgaccggcactccatcaagaagaacctgatcggcgccctgctgttcgactccggcgagaccgccgaggccacccggctgaagcggaccgcccggcggcggtacacccggcggaagaaccggatctgctacctgcaggagatcttctccaacgagatggccaaggtggacgactccttcttccaccggctggaggagtccttcctggtggaggaggacaagaagcacgagcggcaccccatcttcggcaacatcgtggacgaggtggcctaccacgagaagtaccccaccatctaccacctgcggaagaagctggtggactccaccgacaaggccgacctgcggctgatctacctggccctggcccacatgatcaagttccggggccacttcctgatcgagggcgacctgaaccccgacaactccgacgtggacaagctgttcatccagctggtgcagacctacaaccagctgttcgaggagaaccccatcaacgcctccggcgtggacgccaaggccatcctgtccgcccggctgtccaagtcccggcggctggagaacctgatcgcccagctgcccggcgagaagaagaacggcctgttcggcaacctgatcgccctgtccctgggcctgacccccaacttcaagtccaacttcgacctggccgaggacgccaagctgcagctgtccaaggacacctacgacgacgacctggacaacctgctggcccagatcggcgaccagtacgccgacctgttcctggccgccaagaacctgtccgacgccatcctgctgtccgacatcctgcgggtgaacaccgagatcaccaaggcccccctgtccgcctccatgatcaagcggtacgacgagcaccaccaggacctgaccctgctgaaggccctggtgcggcagcagctgcccgagaagtacaaggagatcttcttcgaccagtccaagaacggctacgccggctacatcgacggcggcgcctcccaggaggagttctacaagttcatcaagcccatcctggagaagatggacggcaccgaggagctgctggtgaagctgaaccgggaggacctgctgcggaagcagcggaccttcgacaacggctccatcccccaccagatccacctgggcgagctgcacgccatcctgcggcggcaggaggacttctaccccttcctgaaggacaaccgggagaagatcgagaagatcctgaccttccggatcccctactacgtgggccccctggcccggggcaactcccggttcgcctggatgacccggaagtccgaggagaccatcaccccctggaacttcgaggaggtggtggacaagggcgcctccgcccagtccttcatcgagcggatgaccaacttcgacaagaacctgcccaacgagaaggtgctgcccaagcactccctgctgtacgagtacttcaccgtgtacaacgagctgaccaaggtgaagtacgtgaccgagggcatgcggaagcccgccttcctgtccggcgagcagaagaaggccatcgtggacctgctgttcaagaccaaccggaaggtgaccgtgaagcagctgaaggaggactacttcaagaagatcgagtgcttcgactccgtggagatctccggcgtggaggaccggttcaacgcctccctgggcacctaccacgacctgctgaagatcatcaaggacaaggacttcctggacaacgaggagaacgaggacatcctggaggacatcgtgctgaccctgaccctgttcgaggaccgggagatgatcgaggagcggctgaagacctacgcccacctgttcgacgacaaggtgatgaagcagctgaagcggcggcggtacaccggctggggccggctgtcccggaagctgatcaacggcatccgggacaagcagtccggcaagaccatcctggacttcctgaagtccgacggcttcgccaaccggaacttcatgcagctgatccacgacgactccctgaccttcaaggaggacatccagaaggcccaggtgtccggccagggcgactccctgcacgagcacatcgccaacctggccggctcccccgccatcaagaagggcatcctgcagaccgtgaaggtggtggacgagctggtgaaggtgatgggccggcacaagcccgagaacatcgtgatcgagatggcccgggagaaccagaccacccagaagggccagaagaactcccgggagcggatgaagcggatcgaggagggcatcaaggagctgggctcccagatcctgaaggagcaccccgtggagaacacccagctgcagaacgagaagctgtacctgtactacctgcagaacggccgggacatgtacgtggaccaggagctggacatcaaccggctgtccgactacgacgtggacgccatcgtgccccagtccttcctgaaggacgactccatcgacaacaaggtgctgacccggtccgacaagaaccggggcaagtccgacaacgtgccctccgaggaggtggtgaagaagatgaagaactactggcggcagctgctgaacgccaagctgatcacccagcggaagttcgacaacctgaccaaggccgagcggggcggcctgtccgagctggacaaggccggcttcatcaagcggcagctggtggagacccggcagatcaccaagcacgtggcccagatcctggactcccggatgaacaccaagtacgacgagaacgacaagctgatccgggaggtgaaggtgatcaccctgaagtccaagctggtgtccgacttccggaaggacttccagttctacaaggtgcgggagatcaacaactaccaccacgcccacgacgcctacctgaacgccgtggtgggcaccgccctgatcaagaagtaccccaagctggagtccgagttcgtgtacggcgactacaaggtgtacgacgtgcggaagatgatcgccaagtccgagcaggagatcggcaaggccaccgccaagtacttcttctactccaacatcatgaacttcttcaagaccgagatcaccctggccaacggcgagatccggaagcggcccctgatcgagaccaacggcgagaccggcgagatcgtgtgggacaagggccgggacttcgccaccgtgcggaaggtgctgtccatgccccaggtgaacatcgtgaagaagaccgaggtgcagaccggcggcttctccaaggagtccatcctgcccaagcggaactccgacaagctgatcgcccggaagaaggactgggaccccaagaagtacggcggcttcgactcccccaccgtggcctactccgtgctggtggtggccaaggtggagaagggcaagtccaagaagctgaagtccgtgaaggagctgctgggcatcaccatcatggagcggtcctccttcgagaagaaccccatcgacttcctggaggccaagggctacaaggaggtgaagaaggacctgatcatcaagctgcccaagtactccctgttcgagctggagaacggccggaagcggatgctggcctccgccggcgagctgcagaagggcaacgagctggccctgccctccaagtacgtgaacttcctgtacctggcctcccactacgagaagctgaagggctcccccgaggacaacgagcagaagcagctgttcgtggagcagcacaagcactacctggacgagatcatcgagcagatctccgagttctccaagcgggtgatcctggccgacgccaacctggacaaggtgctgtccgcctacaacaagcaccgggacaagcccatccgggagcaggccgagaacatcatccacctgttcaccctgaccaacctgggcgcccccgccgccttcaagtacttcgacaccaccatcgaccggaagcggtacacctccaccaaggaggtgctggacgccaccctgatccaccagtccatcaccggcctgtacgagacccggatcgacctgtcccagctgggcggcgactccggcggctcccggggcaagtgcctgtcctacgacaccgagatcctgaccgtggagtacggcttcctgcccatcggcaagatcgtggaggagcggatcgagtgcaccgtgtacaccgtggacaagaacggcttcgtgtacacccagcccatcgcccagtggcacaaccgcggcgagcaggaggtgttcgagtactgcctggaggacggctccatcatccgcgccaccaaggaccacaagttcatgaccaccgacggccagatgctgcccatcgacgagatcttcgagcgcggcctggacctgaagcaggtggacggcctgccctag

SEQ ID NO: 1367 - protein, 1725 aa, synthetic construct
  REGION 1..1725: note = Synthetic
MGKRPAATKKAGQAKKKKSGSETPGTSESATPESGKGDPKKPRGKMSSYAFFVQTCREEHKKKHPDASVNFSEFSKKCSERWKTMSAKEKGKFEDMAKADKARYEREMKTYIPPKGETKKKFKDPNAPKRPPSAFFLFCSEYRPKIKGEHPGLSIGDVAKKLGEMWNNTAADDKQPYEKKAAKLKEKYEKDIAAYRAKGKPDAAKKGVVKAEKSKKKKGTKDSTKDIPETPSKDGTKDSTKDIPETPSKDDKKYSIGLDIGTNSVGWAVITDEYKVPSKKFKVLGNTDRHSIKKNLIGALLFDSGETAEATRLKRTARRRYTRRKNRICYLQEIFSNEMAKVDDSFFHRLEESFLVEEDKKHERHPIFGNIVDEVAYHEKYPTIYHLRKKLVDSTDKADLRLIYLALAHMIKFRGHFLIEGDLNPDNSDVDKLFIQLVQTYNQLFEENPINASGVDAKAILSARLSKSRRLENLIAQLPGEKKNGLFGNLIALSLGLTPNFKSNFDLAEDAKLQLSKDTYDDDLDNLLAQIGDQYADLFLAAKNLSDAILLSDILRVNTEITKAPLSASMIKRYDEHHQDLTLLKALVRQQLPEKYKEIFFDQSKNGYAGYIDGGASQEEFYKFIKPILEKMDGTEELLVKLNREDLLRKQRTFDNGSIPHQIHLGELHAILRRQEDFYPFLKDNREKIEKILTFRIPYYVGPLARGNSRFAWMTRKSEETITPWNFEEVVDKGASAQSFIERMTNFDKNLPNEKVLPKHSLLYEYFTVYNELTKVKYVTEGMRKPAFLSGEQKKAIVDLLFKTNRKVTVKQLKEDYFKKIECFDSVEISGVEDRFNASLGTYHDLLKIIKDKDFLDNEENEDILEDIVLTLTLFEDREMIEERLKTYAHLFDDKVMKQLKRRRYTGWGRLSRKLINGIRDKQSGKTILDFLKSDGFANRNFMQLIHDDSLTFKEDIQKAQVSGQGDSLHEHIANLAGSPAIKKGILQTVKVVDELVKVMGRHKPENIVIEMARENQTTQKGQKNSRERMKRIEEGIKELGSQILKEHPVENTQLQNEKLYLYYLQNGRDMYVDQELDINRLSDYDVDAIVPQSFLKDDSIDNKVLTRSDKNRGKSDNVPSEEVVKKMKNYWRQLLNAKLITQRKFDNLTKAERGGLSELDKAGFIKRQLVETRQITKHVAQILDSRMNTKYDENDKLIREVKVITLKSKLVSDFRKDFQFYKVREINNYHHAHDAYLNAVVGTALIKKYPKLESEFVYGDYKVYDVRKMIAKSEQEIGKATAKYFFYSNIMNFFKTEITLANGEIRKRPLIETNGETGEIVWDKGRDFATVRKVLSMPQVNIVKKTEVQTGGFSKESILPKRNSDKLIARKKDWDPKKYGGFDSPTVAYSVLVVAKVEKGKSKKLKSVKELLGITIMERSSFEKNPIDFLEAKGYKEVKKDLIIKLPKYSLFELENGRKRMLASAGELQKGNELALPSKYVNFLYLASHYEKLKGSPEDNEQKQLFVEQHKHYLDEIIEQISEFSKRVILADANLDKVLSAYNKHRDKPIREQAENIIHLFTLTNLGAPAAFKYFDTTIDRKRYTSTKEVLDATLIHQSITGLYETRIDLSQLGGDSGGSRGKCLSYDTEILTVEYGFLPIGKIVEERIECTVYTVDKNGFVYTQPIAQWHNRGEQEVFEYCLEDGSIIRATKDHKFMTTDGQMLPIDEIFERGLDLKQVDGLP

SEQ ID NO: 1368 - RNA, 2486 nt, synthetic construct
  misc_feature 1..2486: note = Synthetic
  source 1..2486: mol_type = other RNA
aggactcactatttgttttcgcgcccagttgcaaaaagtgtcgaagctcagaataaacgctcaactttggccggatctgccaccatgggcgtgaagatcatctcccgcaagtccctgggcacccagaacgtgtacgacatcggcgtggagaaggaccacaacttcctgctgaagaacggcctggtggcctccaactgcttcaactccggcggctccaagcggaccgccgacggctccgagttcgagtcccccaagaagaagcggaaggtgtccggcggctcctccggcggctccatggactccaccaaggagaagtgcgactcctacaaggacgacctgctgctgcggatgggcctgaacgacaacaaggccggcatggagggcctggacaaggagaagatcaacaagatcatcatggaggccaccaagggctcccggttctacggcaacgagctgaagaaggagaagcaggtgaaccagcggatcgagaacatgatgcagcagaaggcccagatcacctcccagcagctgcggaaggcccagctgcaggtggaccggttcgccatggagctggagcagtcccggaacctgtccaacaccatcgtgcacatcgacatggacgccttctacgccgccgtggagatgcgggacaaccccgagctgaaggacaagcccatcgccgtgggctccatgtccatgctgtccacctccaactaccacgcccggcggttcggcgtgcgggccgccatgcccggcttcatcgccaagcggctgtgcccccagctgatcatcgtgccccccaacttcgacaagtaccgggccgtgtccaaggaggtgaaggagatcctggccgactacgaccccaacttcatggccatgtccctggacgaggcctacctgaacatcaccaagcacctggaggagcggcagaactggcccgaggacaagcggcggtacttcatcaagatgggctcctccgtggagaacgacaaccccggcaaggaggtgaacaagctgtccgagcacgagcggtccatctcccccctgctgttcgaggagtccccctccgacgtgcagccccccggcgaccccttccaggtgaacttcgaggagcagaacaacccccagatcctgcagaactccgtggtgttcggcacctccgcccaggaggtggtgaaggagatccggttccggatcgagcagaagaccaccctgaccgcctccgccggcatcgcccccaacaccatgctggccaaggtgtgctccgacaagaacaagcccaacggccagtaccagatcctgcccaaccggcaggccgtgatggacttcatcaaggacctgcccatccggaaggtgtccggcatcggcaaggtgaccgagaagatgctgaaggccctgggcatcatcacctgcaccgagctgtaccagcagcgggccctgctgtccctgctgttctccgagacctcctggcactacttcctgcacatctccctgggcctgggctccacccacctgacccgggaccgggtgcggaagtccatgtccgtggagcggaccttctccgagatcaacaaggccgaggagcagtactccctgtgccaggagctgtgctccgagctggcccaggacctgcagaaggagcggctgaagggccggaccgtgaccatcaagctgaagaacgtgaacttcgaggtgaagacccgggcctccaccgtgtcctccgtggtgtccaccgccgaggagatcttcgccatcgccaaggagctgctgaagaccgagatcgacgccgacttcccccaccccctgcggctgcggctgatgggcgtgcggatctcctccttccccaacgaggaggaccggaagcaccagcagggcggcggctccggcaagcggaccgccgacggctccggcggcggctcccccaagaagaagcggaaggtgcccgccgccaagcgcgtgaagctggactagctagcaccagcctcaagaacacccgaatggagtctctaagctacataataccaacttacactttacaaaatgttgtcccccaaaatgtagccattcgtatctgctcctaataaaaagaaagtttcttcacattctctcgagaaaaaaaaaaaatggaaaaaaaaaaaacggaaaaaaaaaaaaggtaaaaaaaaaaaatataaaaaaaaaaaacataaaaaaaaaaaacgaaaaaaaaaaaacgtaaaaaaaaaaaactcaaaaaaaaaaaagataaaaaaaaaaaacctaaaaaaaaaaaatgtaaaaaaaaaaaagggaaaaaaaaaaaacgcaaaaaaaaaaaacacaaaaaaaaaaaatgcaaaaaaaaaaaatcgaaaaaaaaaaaatctaaaaaaaaaaaacgaaaaaaaaaaaacccaaaaaaaaaaaagacaaaaaaaaaaaatagaaaaaaaaaaagttaaaaaaaaaaaactgaaaaaaaaaaaatttaaaaaaaaaaaatctag

SEQ ID NO: 1369 - DNA, 1887 bp, synthetic construct
  misc_feature 1..1887: note = Synthetic
  source 1..1887: mol_type = other DNA
atgggcgtgaagatcatctcccgcaagtccctgggcacccagaacgtgtacgacatcggcgtggagaaggaccacaacttcctgctgaagaacggcctggtggcctccaactgcttcaactccggcggctccaagcggaccgccgacggctccgagttcgagtcccccaagaagaagcggaaggtgtccggcggctcctccggcggctccatggactccaccaaggagaagtgcgactcctacaaggacgacctgctgctgcggatgggcctgaacgacaacaaggccggcatggagggcctggacaaggagaagatcaacaagatcatcatggaggccaccaagggctcccggttctacggcaacgagctgaagaaggagaagcaggtgaaccagcggatcgagaacatgatgcagcagaaggcccagatcacctcccagcagctgcggaaggcccagctgcaggtggaccggttcgccatggagctggagcagtcccggaacctgtccaacaccatcgtgcacatcgacatggacgccttctacgccgccgtggagatgcgggacaaccccgagctgaaggacaagcccatcgccgtgggctccatgtccatgctgtccacctccaactaccacgcccggcggttcggcgtgcgggccgccatgcccggcttcatcgccaagcggctgtgcccccagctgatcatcgtgccccccaacttcgacaagtaccgggccgtgtccaaggaggtgaaggagatcctggccgactacgaccccaacttcatggccatgtccctggacgaggcctacctgaacatcaccaagcacctggaggagcggcagaactggcccgaggacaagcggcggtacttcatcaagatgggctcctccgtggagaacgacaaccccggcaaggaggtgaacaagctgtccgagcacgagcggtccatctcccccctgctgttcgaggagtccccctccgacgtgcagccccccggcgaccccttccaggtgaacttcgaggagcagaacaacccccagatcctgcagaactccgtggtgttcggcacctccgcccaggaggtggtgaaggagatccggttccggatcgagcagaagaccaccctgaccgcctccgccggcatcgcccccaacaccatgctggccaaggtgtgctccgacaagaacaagcccaacggccagtaccagatcctgcccaaccggcaggccgtgatggacttcatcaaggacctgcccatccggaaggtgtccggcatcggcaaggtgaccgagaagatgctgaaggccctgggcatcatcacctgcaccgagctgtaccagcagcgggccctgctgtccctgctgttctccgagacctcctggcactacttcctgcacatctccctgggcctgggctccacccacctgacccgggaccgggtgcggaagtccatgtccgtggagcggaccttctccgagatcaacaaggccgaggagcagtactccctgtgccaggagctgtgctccgagctggcccaggacctgcagaaggagcggctgaagggccggaccgtgaccatcaagctgaagaacgtgaacttcgaggtgaagacccgggcctccaccgtgtcctccgtggtgtccaccgccgaggagatcttcgccatcgccaaggagctgctgaagaccgagatcgacgccgacttcccccaccccctgcggctgcggctgatgggcgtgcggatctcctccttccccaacgaggaggaccggaagcaccagcagggcggcggctccggcaagcggaccgccgacggctccggcggcggctcccccaagaagaagcggaaggtgcccgccgccaagcgcgtgaagctggactag

SEQ ID NO: 1370 - protein, 628 aa, synthetic construct
  REGION 1..628: note = Synthetic
MGVKIISRKSLGTQNVYDIGVEKDHNFLLKNGLVASNCFNSGGSKRTADGSEFESPKKKRKVSGGSSGGSMDSTKEKCDSYKDDLLLRMGLNDNKAGMEGLDKEKINKIIMEATKGSRFYGNELKKEKQVNQRIENMMQQKAQITSQQLRKAQLQVDRFAMELEQSRNLSNTIVHIDMDAFYAAVEMRDNPELKDKPIAVGSMSMLSTSNYHARRFGVRAAMPGFIAKRLCPQLIIVPPNFDKYRAVSKEVKEILADYDPNFMAMSLDEAYLNITKHLEERQNWPEDKRRYFIKMGSSVENDNPGKEVNKLSEHERSISPLLFEESPSDVQPPGDPFQVNFEEQNNPQILQNSVVFGTSAQEVVKEIRFRIEQKTTLTASAGIAPNTMLAKVCSDKNKPNGQYQILPNRQAVMDFIKDLPIRKVSGIGKVTEKMLKALGIITCTELYQQRALLSLLFSETSWHYFLHISLGLGSTHLTRDRVRKSMSVERTFSEINKAEEQYSLCQELCSELAQDLQKERLKGRTVTIKLKNVNFEVKTRASTVSSVVSTAEEIFAIAKELLKTEIDADFPHPLRLRLMGVRISSFPNEEDRKHQQGGGSGKRTADGSGGGSPKKKRKVPAAKRVKLD

SEQ ID NO: 1371 - RNA, 6512 nt, synthetic construct
  misc_feature 1..6512: note = Synthetic
  source 1..6512: mol_type = other RNA
aggactcactatttgttttcgcgcccagttgcaaaaagtgtcgaagctcagaataaacgctcaactttggccggatctgccaccatgggcaagcggaccgccgacggctccgagttcgagtcccccaagaagaagcggaaggtggacaagaagtactccatcggcctggacatcggcaccaactccgtgggctgggccgtgatcaccgacgagtacaaggtgccctccaagaagttcaaggtgctgggcaacaccgaccggcactccatcaagaagaacctgatcggcgccctgctgttcgactccggcgagaccgccgaggccacccggctgaagcggaccgcccggcggcggtacacccggcggaagaaccggatctgctacctgcaggagatcttctccaacgagatggccaaggtggacgactccttcttccaccggctggaggagtccttcctggtggaggaggacaagaagcacgagcggcaccccatcttcggcaacatcgtggacgaggtggcctaccacgagaagtaccccaccatctaccacctgcggaagaagctggtggactccaccgacaaggccgacctgcggctgatctacctggccctggcccacatgatcaagttccggggccacttcctgatcgagggcgacctgaaccccgacaactccgacgtggacaagctgttcatccagctggtgcagacctacaaccagctgttcgaggagaaccccatcaacgcctccggcgtggacgccaaggccatcctgtccgcccggctgtccaagtcccggcggctggagaacctgatcgcccagctgcccggcgagaagaagaacggcctgttcggcaacctgatcgccctgtccctgggcctgacccccaacttcaagtccaacttcgacctggccgaggacgccaagctgcagctgtccaaggacacctacgacgacgacctggacaacctgctggcccagatcggcgaccagtacgccgacctgttcctggccgccaagaacctgtccgacgccatcctgctgtccgacatcctgcgggtgaacaccgagatcaccaaggcccccctgtccgcctccatgatcaagcggtacgacgagcaccaccaggacctgaccctgctgaaggccctggtgcggcagcagctgcccgagaagtacaaggagatcttcttcgaccagtccaagaacggctacgccggctacatcgacggcggcgcctcccaggaggagttctacaagttcatcaagcccatcctggagaagatggacggcaccgaggagctgctggtgaagctgaaccgggaggacctgctgcggaagcagcggaccttcgacaacggctccatcccccaccagatccacctgggcgagctgcacgccatcctgcggcggcaggaggacttctaccccttcctgaaggacaaccgggagaagatcgagaagatcctgaccttccggatcccctactacgtgggccccctggcccggggcaactcccggttcgcctggatgacccggaagtccgaggagaccatcaccccctggaacttcgaggaggtggtggacaagggcgcctccgcccagtccttcatcgagcggatgaccaacttcgacaagaacctgcccaacgagaaggtgctgcccaagcactccctgctgtacgagtacttcaccgtgtacaacgagctgaccaaggtgaagtacgtgaccgagggcatgcggaagcccgccttcctgtccggcgagcagaagaaggccatcgtggacctgctgttcaagaccaaccggaaggtgaccgtgaagcagctgaaggaggactacttcaagaagatcgagtgcttcgactccgtggagatctccggcgtggaggaccggttcaacgcctccctgggcacctaccacgacctgctgaagatcatcaaggacaaggacttcctggacaacgaggagaacgaggacatcctggaggacatcgtgctgaccctgaccctgttcgaggaccgggagatgatcgaggagcggctgaagacctacgcccacctgttcgacgacaaggtgatgaagcagctgaagcggcggcggtacaccggctggggccggctgtcccggaagctgatcaacggcatccgggacaagcagtccggcaagaccatcctggacttcctgaagtccgacggcttcgccaaccggaacttcatgcagctgatccacgacgactccctgaccttcaaggaggacatccagaaggcccaggtgtccggccagggcgactccctgcacgagcacatcgccaacctggccggctcccccgccatcaagaagggcatcctgcagaccgtgaaggtggtggacgagctggtgaaggtgatgggccggcacaagcccgagaacatcgtgatcgagatggcccgggagaaccagaccacccagaagggccagaagaactcccgggagcggatgaagcggatcgaggagggcatcaaggagctgggctcccagatcctgaaggagcaccccgtggagaacacccagctgcagaacgagaagctgtacctgtactacctgcagaacggccgggacatgtacgtggaccaggagctggacatcaaccggctgtccgactacgacgtggacgccatcgtgccccagtccttcctgaaggacgactccatcgacaacaaggtgctgacccggtccgacaagaaccggggcaagtccgacaacgtgccctccgaggaggtggtgaagaagatgaagaactactggcggcagctgctgaacgccaagctgatcacccagcggaagttcgacaacctgaccaaggccgagcggggcggcctgtccgagctggacaaggccggcttcatcaagcggcagctggtggagacccggcagatcaccaagcacgtggcccagatcctggactcccggatgaacaccaagtacgacgagaacgacaagctgatccgggaggtgaaggtgatcaccctgaagtccaagctggtgtccgacttccggaaggacttccagttctacaaggtgcgggagatcaacaactaccaccacgcccacgacgcctacctgaacgccgtggtgggcaccgccctgatcaagaagtaccccaagctggagtccgagttcgtgtacggcgactacaaggtgtacgacgtgcggaagatgatcgccaagtccgagcaggagatcggcaaggccaccgccaagtacttcttctactccaacatcatgaacttcttcaagaccgagatcaccctggccaacggcgagatccggaagcggcccctgatcgagaccaacggcgagaccggcgagatcgtgtgggacaagggccgggacttcgccaccgtgcggaaggtgctgtccatgccccaggtgaacatcgtgaagaagaccgaggtgcagaccggcggcttctccaaggagtccatcctgcccaagcggaactccgacaagctgatcgcccggaagaaggactgggaccccaagaagtacggcggcttcgactcccccaccgtggcctactccgtgctggtggtggccaaggtggagaagggcaagtccaagaagctgaagtccgtgaaggagctgctgggcatcaccatcatggagcggtcctccttcgagaagaaccccatcgacttcctggaggccaagggctacaaggaggtgaagaaggacctgatcatcaagctgcccaagtactccctgttcgagctggagaacggccggaagcggatgctggcctccgccggcgagctgcagaagggcaacgagctggccctgccctccaagtacgtgaacttcctgtacctggcctcccactacgagaagctgaagggctcccccgaggacaacgagcagaagcagctgttcgtggagcagcacaagcactacctggacgagatcatcgagcagatctccgagttctccaagcgggtgatcctggccgacgccaacctggacaaggtgctgtccgcctacaacaagcaccgggacaagcccatccgggagcaggccgagaacatcatccacctgttcaccctgaccaacctgggcgcccccgccgccttcaagtacttcgacaccaccatcgaccggaagcggtacacctccaccaaggaggtgctggacgccaccctgatccaccagtccatcaccggcctgtacgagacccggatcgacctgtcccagctgggcggcgactccggcggctcctccggcggctccaagcggaccgccgacggctccgagttcgagtcccccaagaagaagcggaaggtgtccggcggctcctccggcggctccatggactccaccaaggagaagtgcgactcctacaaggacgacctgctgctgcggatgggcctgaacgacaacaaggccggcatggagggcctggacaaggagaagatcaacaagatcatcatggaggccaccaagggctcccggttctacggcaacgagctgaagaaggagaagcaggtgaaccagcggatcgagaacatgatgcagcagaaggcccagatcacctcccagcagctgcggaaggcccagctgcaggtggaccggttcgccatggagctggagcagtcccggaacctgtccaacaccatcgtgcacatcgacatggacgccttctacgccgccgtggagatgcgggacaaccccgagctgaaggacaagcccatcgccgtgggctccatgtccatgctgtccacctccaactaccacgcccggcggttcggcgtgcgggccgccatgcccggcttcatcgccaagcggctgtgcccccagctgatcatcgtgccccccaacttcgacaagtaccgggccgtgtccaaggaggtgaaggagatcctggccgactacgaccccaacttcatggccatgtccctggacgaggcctacctgaacatcaccaagcacctggaggagcggcagaactggcccgaggacaagcggcggtacttcatcaagatgggctcctccgtggagaacgacaaccccggcaaggaggtgaacaagctgtccgagcacgagcggtccatctcccccctgctgttcgaggagtccccctccgacgtgcagccccccggcgaccccttccaggtgaacttcgaggagcagaacaacccccagatcctgcagaactccgtggtgttcggcacctccgcccaggaggtggtgaaggagatccggttccggatcgagcagaagaccaccctgaccgcctccgccggcatcgcccccaacaccatgctggccaaggtgtgctccgacaagaacaagcccaacggccagtaccagatcctgcccaaccggcaggccgtgatggacttcatcaaggacctgcccatccggaaggtgtccggcatcggcaaggtgaccgagaagatgctgaaggccctgggcatcatcacctgcaccgagctgtaccagcagcgggccctgctgtccctgctgttctccgagacctcctggcactacttcctgcacatctccctgggcctgggctccacccacctgacccgggaccgggtgcggaagtccatgtccgtggagcggaccttctccgagatcaacaaggccgaggagcagtactccctgtgccaggagctgtgctccgagctggcccaggacctgcagaaggagcggctgaagggccggaccgtgaccatcaagctgaagaacgtgaacttcgaggtgaagacccgggcctccaccgtgtcctccgtggtgtccaccgccgaggagatcttcgccatcgccaaggagctgctgaagaccgagatcgacgccgacttcccccaccccctgcggctgcggctgatgggcgtgcggatctcctccttccccaacgaggaggaccggaagcaccagcagggcggcggctccggcaagcggaccgccgacggctccggcggcggctcccccaagaagaagcggaaggtgtagctagcaccagcctcaagaacacccgaatggagtctctaagctacataataccaacttacactttacaaaatgttgtcccccaaaatgtagccattcgtatctgctcctaataaaaagaaagtttcttcacattctctcgagaaaaaaaaaaaatggaaaaaaaaaaaacggaaaaaaaaaaaaggtaaaaaaaaaaaatataaaaaaaaaaaacataaaaaaaaaaaacgaaaaaaaaaaaacgtaaaaaaaaaaaactcaaaaaaaaaaaagataaaaaaaaaaaacctaaaaaaaaaaaatgtaaaaaaaaaaaagggaaaaaaaaaaaacgcaaaaaaaaaaaacacaaaaaaaaaaaatgcaaaaaaaaaaaatcgaaaaaaaaaaaatctaaaaaaaaaaaacgaaaaaaaaaaaacccaaaaaaaaaaaagacaaaaaaaaaaaatagaaaaaaaaaaagttaaaaaaaaaaaactgaaaaaaaaaaaatttaaaaaaaaaaaatctag

SEQ ID NO: 1372 - DNA, 5913 bp, synthetic construct
  misc_feature 1..5913: note = Synthetic
  source 1..5913: mol_type = other DNA
atgggcaagcggaccgccgacggctccgagttcgagtcccccaagaagaagcggaaggtggacaagaagtactccatcggcctggacatcggcaccaactccgtgggctgggccgtgatcaccgacgagtacaaggtgccctccaagaagttcaaggtgctgggcaacaccgaccggcactccatcaagaagaacctgatcggcgccctgctgttcgactccggcgagaccgccgaggccacccggctgaagcggaccgcccggcggcggtacacccggcggaagaaccggatctgctacctgcaggagatcttctccaacgagatggccaaggtggacgactccttcttccaccggctggaggagtccttcctggtggaggaggacaagaagcacgagcggcaccccatcttcggcaacatcgtggacgaggtggcctaccacgagaagtaccccaccatctaccacctgcggaagaagctggtggactccaccgacaaggccgacctgcggctgatctacctggccctggcccacatgatcaagttccggggccacttcctgatcgagggcgacctgaaccccgacaactccgacgtggacaagctgttcatccagctggtgcagacctacaaccagctgttcgaggagaaccccatcaacgcctccggcgtggacgccaaggccatcctgtccgcccggctgtccaagtcccggcggctggagaacctgatcgcccagctgcccggcgagaagaagaacggcctgttcggcaacctgatcgccctgtccctgggcctgacccccaacttcaagtccaacttcgacctggccgaggacgccaagctgcagctgtccaaggacacctacgacgacgacctggacaacctgctggcccagatcggcgaccagtacgccgacctgttcctggccgccaagaacctgtccgacgccatcctgctgtccgacatcctgcgggtgaacaccgagatcaccaaggcccccctgtccgcctccatgatcaagcggtacgacgagcaccaccaggacctgaccctgctgaaggccctggtgcggcagcagctgcccgagaagtacaaggagatcttcttcgaccagtccaagaacggctacgccggctacatcgacggcggcgcctcccaggaggagttctacaagttcatcaagcccatcctggagaagatggacggcaccgaggagctgctggtgaagctgaaccgggaggacctgctgcggaagcagcggaccttcgacaacggctccatcccccaccagatccacctgggcgagctgcacgccatcctgcggcggcaggaggacttctaccccttcctgaaggacaaccgggagaagatcgagaagatcctgaccttccggatcccctactacgtgggccccctggcccggggcaactcccggttcgcctggatgacccggaagtccgaggagaccatcaccccctggaacttcgaggaggtggtggacaagggcgcctccgcccagtccttcatcgagcggatgaccaacttcgacaagaacctgcccaacgagaaggtgctgcccaagcactccctgctgtacgagtacttcaccgtgtacaacgagctgaccaaggtgaagtacgtgaccgagggcatgcggaagcccgccttcctgtccggcgagcagaagaaggccatcgtggacctgctgttcaagaccaaccggaaggtgaccgtgaagcagctgaaggaggactacttcaagaagatcgagtgcttcgactccgtggagatctccggcgtggaggaccggttcaacgcctccctgggcacctaccacgacctgctgaagatcatcaaggacaaggacttcctggacaacgaggagaacgaggacatcctggaggacatcgtgctgaccctgaccctgttcgaggaccgggagatgatcgaggagcggctgaagacctacgcccacctgttcgacgacaaggtgatgaagcagctgaagcggcggcggtacaccggctggggccggctgtcccggaagctgatcaacggcatccgggacaagcagtccggcaagaccatcctggacttcctgaagtccgacggcttcgccaaccggaacttcatgcagctgatccacgacgactccctgaccttcaaggaggacatccagaaggcccaggtgtccggccagggcgactccctgcacgagcacatcgccaacctggccggctcccccgccatcaagaagggcatcctgcagaccgtgaaggtggtggacgagctggtgaaggtgatgggccggcacaagcccgagaacatcgtgatcgagatggcccgggagaaccagaccacccagaagggccagaagaactcccgggagcggatgaagcggatcgaggagggcatcaaggagctgggctcccagatcctgaaggagcaccccgtggagaacacccagctgcagaacgagaagctgtacctgtactacctgcagaacggccgggacatgtacgtggaccaggagctggacatcaaccggctgtccgactacgacgtggacgccatcgtgccccagtccttcctgaaggacgactccatcgacaacaaggtgctgacccggtccgacaagaaccggggcaagtccgacaacgtgccctccgaggaggtggtgaagaagatgaagaactactggcggcagctgctgaacgccaagctgatcacccagcggaagttcgacaacctgaccaaggccgagcggggcggcctgtccgagctggacaaggccggcttcatcaagcggcagctggtggagacccggcagatcaccaagcacgtggcccagatcctggactcccggatgaacaccaagtacgacgagaacgacaagctgatccgggaggtgaaggtgatcaccctgaagtccaagctggtgtccgacttccggaaggacttccagttctacaaggtgcgggagatcaacaactaccaccacgcccacgacgcctacctgaacgccgtggtgggcaccgccctgatcaagaagtaccccaagctggagtccgagttcgtgtacggcgactacaaggtgtacgacgtgcggaagatgatcgccaagtccgagcaggagatcggcaaggccaccgccaagtacttcttctactccaacatcatgaacttcttcaagaccgagatcaccctggccaacggcgagatccggaagcggcccctgatcgagaccaacggcgagaccggcgagatcgtgtgggacaagggccgggacttcgccaccgtgcggaaggtgctgtccatgccccaggtgaacatcgtgaagaagaccgaggtgcagaccggcggcttctccaaggagtccatcctgcccaagcggaactccgacaagctgatcgcccggaagaaggactgggaccccaagaagtacggcggcttcgactcccccaccgtggcctactccgtgctggtggtggccaaggtggagaagggcaagtccaagaagctgaagtccgtgaaggagctgctgggcatcaccatcatggagcggtcctccttcgagaagaaccccatcgacttcctggaggccaagggctacaaggaggtgaagaaggacctgatcatcaagctgcccaagtactccctgttcgagctggagaacggccggaagcggatgctggcctccgccggcgagctgcagaagggcaacgagctggccctgccctccaagtacgtgaacttcctgtacctggcctcccactacgagaagctgaagggctcccccgaggacaacgagcagaagcagctgttcgtggagcagcacaagcactacctggacgagatcatcgagcagatctccgagttctccaagcgggtgatcctggccgacgccaacctggacaaggtgctgtccgcctacaacaagcaccgggacaagcccatccgggagcaggccgagaacatcatccacctgttcaccctgaccaacctgggcgcccccgccgccttcaagtacttcgacaccaccatcgaccggaagcggtacacctccaccaaggaggtgctggacgccaccctgatccaccagtccatcaccggcctgtacgagacccggatcgacctgtcccagctgggcggcgactccggcggctcctccggcggctccaagcggaccgccgacggctccgagttcgagtcccccaagaagaagcggaaggtgtccggcggctcctccggcggctccatggactccaccaaggagaagtgcgactcctacaaggacgacctgctgctgcggatgggcctgaacgacaacaaggccggcatggagggcctggacaaggagaagatcaacaagatcatcatggaggccaccaagggctcccggttctacggcaacgagctgaagaaggagaagcaggtgaaccagcggatcgagaacatgatgcagcagaaggcccagatcacctcccagcagctgcggaaggcccagctgcaggtggaccggttcgccatggagctggagcagtcccggaacctgtccaacaccatcgtgcacatcgacatggacgccttctacgccgccgtggagatgcgggacaaccccgagctgaaggacaagcccatcgccgtgggctccatgtccatgctgtccacctccaactaccacgcccggcggttcggcgtgcgggccgccatgcccggcttcatcgccaagcggctgtgcccccagctgatcatcgtgccccccaacttcgacaagtaccgggccgtgtccaaggaggtgaaggagatcctggccgactacgaccccaacttcatggccatgtccctggacgaggcctacctgaacatcaccaagcacctggaggagcggcagaactggcccgaggacaagcggcggtacttcatcaagatgggctcctccgtggagaacgacaaccccggcaaggaggtgaacaagctgtccgagcacgagcggtccatctcccccctgctgttcgaggagtccccctccgacgtgcagccccccggcgaccccttccaggtgaacttcgaggagcagaacaacccccagatcctgcagaactccgtggtgttcggcacctccgcccaggaggtggtgaaggagatccggttccggatcgagcagaagaccaccctgaccgcctccgccggcatcgcccccaacaccatgctggccaaggtgtgctccgacaagaacaagcccaacggccagtaccagatcctgcccaaccggcaggccgtgatggacttcatcaaggacctgcccatccggaaggtgtccggcatcggcaaggtgaccgagaagatgctgaaggccctgggcatcatcacctgcaccgagctgtaccagcagcgggccctgctgtccctgctgttctccgagacctcctggcactacttcctgcacatctccctgggcctgggctccacccacctgacccgggaccgggtgcggaagtccatgtccgtggagcggaccttctccgagatcaacaaggccgaggagcagtactccctgtgccaggagctgtgctccgagctggcccaggacctgcagaaggagcggctgaagggccggaccgtgaccatcaagctgaagaacgtgaacttcgaggtgaagacccgggcctccaccgtgtcctccgtggtgtccaccgccgaggagatcttcgccatcgccaaggagctgctgaagaccgagatcgacgccgacttcccccaccccctgcggctgcggctgatgggcgtgcggatctcctccttccccaacgaggaggaccggaagcaccagcagggcggcggctccggcaagcggaccgccgacggctccggcggcggctcccccaagaagaagcggaaggtgtag

SEQ ID NO: 1373 - protein, 1970 aa, synthetic construct
  REGION 1..1970: note = Synthetic
MGKRTADGSEFESPKKKRKVDKKYSIGLDIGTNSVGWAVITDEYKVPSKKFKVLGNTDRHSIKKNLIGALLFDSGETAEATRLKRTARRRYTRRKNRICYLQEIFSNEMAKVDDSFFHRLEESFLVEEDKKHERHPIFGNIVDEVAYHEKYPTIYHLRKKLVDSTDKADLRLIYLALAHMIKFRGHFLIEGDLNPDNSDVDKLFIQLVQTYNQLFEENPINASGVDAKAILSARLSKSRRLENLIAQLPGEKKNGLFGNLIALSLGLTPNFKSNFDLAEDAKLQLSKDTYDDDLDNLLAQIGDQYADLFLAAKNLSDAILLSDILRVNTEITKAPLSASMIKRYDEHHQDLTLLKALVRQQLPEKYKEIFFDQSKNGYAGYIDGGASQEEFYKFIKPILEKMDGTEELLVKLNREDLLRKQRTFDNGSIPHQIHLGELHAILRRQEDFYPFLKDNREKIEKILTFRIPYYVGPLARGNSRFAWMTRKSEETITPWNFEEVVDKGASAQSFIERMTNFDKNLPNEKVLPKHSLLYEYFTVYNELTKVKYVTEGMRKPAFLSGEQKKAIVDLLFKTNRKVTVKQLKEDYFKKIECFDSVEISGVEDRFNASLGTYHDLLKIIKDKDFLDNEENEDILEDIVLTLTLFEDREMIEERLKTYAHLFDDKVMKQLKRRRYTGWGRLSRKLINGIRDKQSGKTILDFLKSDGFANRNFMQLIHDDSLTFKEDIQKAQVSGQGDSLHEHIANLAGSPAIKKGILQTVKVVDELVKVMGRHKPENIVIEMARENQTTQKGQKNSRERMKRIEEGIKELGSQILKEHPVENTQLQNEKLYLYYLQNGRDMYVDQELDINRLSDYDVDAIVPQSFLKDDSIDNKVLTRSDKNRGKSDNVPSEEVVKKMKNYWRQLLNAKLITQRKFDNLTKAERGGLSELDKAGFIKRQLVETRQITKHVAQILDSRMNTKYDENDKLIREVKVITLKSKLVSDFRKDFQFYKVREINNYHHAHDAYLNAVVGTALIKKYPKLESEFVYGDYKVYDVRKMIAKSEQEIGKATAKYFFYSNIMNFFKTEITLANGEIRKRPLIETNGETGEIVWDKGRDFATVRKVLSMPQVNIVKKTEVQTGGFSKESILPKRNSDKLIARKKDWDPKKYGGFDSPTVAYSVLVVAKVEKGKSKKLKSVKELLGITIMERSSFEKNPIDFLEAKGYKEVKKDLIIKLPKYSLFELENGRKRMLASAGELQKGNELALPSKYVNFLYLASHYEKLKGSPEDNEQKQLFVEQHKHYLDEIIEQISEFSKRVILADANLDKVLSAYNKHRDKPIREQAENIIHLFTLTNLGAPAAFKYFDTTIDRKRYTSTKEVLDATLIHQSITGLYETRIDLSQLGGDSGGSSGGSKRTADGSEFESPKKKRKVSGGSSGGSMDSTKEKCDSYKDDLLLRMGLNDNKAGMEGLDKEKINKIIMEATKGSRFYGNELKKEKQVNQRIENMMQQKAQITSQQLRKAQLQVDRFAMELEQSRNLSNTIVHIDMDAFYAAVEMRDNPELKDKPIAVGSMSMLSTSNYHARRFGVRAAMPGFIAKRLCPQLIIVPPNFDKYRAVSKEVKEILADYDPNFMAMSLDEAYLNITKHLEERQNWPEDKRRYFIKMGSSVENDNPGKEVNKLSEHERSISPLLFEESPSDVQPPGDPFQVNFEEQNNPQILQNSVVFGTSAQEVVKEIRFRIEQKTTLTASAGIAPNTMLAKVCSDKNKPNGQYQILPNRQAVMDFIKDLPIRKVSGIGKVTEKMLKALGIITCTELYQQRALLSLLFSETSWHYFLHISLGLGSTHLTRDRVRKSMSVERTFSEINKAEEQYSLCQELCSELAQDLQKERLKGRTVTIKLKNVNFEVKTRASTVSSVVSTAEEIFAIAKELLKTEIDADFPHPLRLRLMGVRISSFPNEEDRKHQQGGGSGKRTADGSGGGSPKKKRKV

SEQ ID NO: 1374 - RNA, 7486 nt, synthetic construct
  misc_feature 1..7486: note = Synthetic
  source 1..7486: mol_type = other RNA
gggaagctcagaataaacgctcaactttggccggatctgccaccatggacaagaagtactccatcggcctggacatcggcaccaactccgtgggctgggccgtgatcaccgacgagtacaaggtgccctccaagaagttcaaggtgctgggcaacaccgaccggcactccatcaagaagaacctgatcggcgccctgctgttcgactccggcgagaccgccgaggccacccggctgaagcggaccgcccggcggcggtacacccggcggaagaaccggatctgctacctgcaggagatcttctccaacgagatggccaaggtggacgactccttcttccaccggctggaggagtccttcctggtggaggaggacaagaagcacgagcggcaccccatcttcggcaacatcgtggacgaggtggcctaccacgagaagtaccccaccatctaccacctgcggaagaagctggtggactccaccgacaaggccgacctgcggctgatctacctggccctggcccacatgatcaagttccggggccacttcctgatcgagggcgacctgaaccccgacaactccgacgtggacaagctgttcatccagctggtgcagacctacaaccagctgttcgaggagaaccccatcaacgcctccggcgtggacgccaaggccatcctgtccgcccggctgtccaagtcccggcggctggagaacctgatcgcccagctgcccggcgagaagaagaacggcctgttcggcaacctgatcgccctgtccctgggcctgacccccaacttcaagtccaacttcgacctggccgaggacgccaagctgcagctgtccaaggacacctacgacgacgacctggacaacctgctggcccagatcggcgaccagtacgccgacctgttcctggccgccaagaacctgtccgacgccatcctgctgtccgacatcctgcgggtgaacaccgagatcaccaaggcccccctgtccgcctccatgatcaagcggtacgacgagcaccaccaggacctgaccctgctgaaggccctggtgcggcagcagctgcccgagaagtacaaggagatcttcttcgaccagtccaagaacggctacgccggctacatcgacggcggcgcctcccaggaggagttctacaagttcatcaagcccatcctggagaagatggacggcaccgaggagctgctggtgaagctgaaccgggaggacctgctgcggaagcagcggaccttcgacaacggctccatcccccaccagatccacctgggcgagctgcacgccatcctgcggcggcaggaggacttctaccccttcctgaaggacaaccgggagaagatcgagaagatcctgaccttccggatcccctactacgtgggccccctggcccggggcaactcccggttcgcctggatgacccggaagtccgaggagaccatcaccccctggaacttcgaggaggtggtggacaagggcgcctccgcccagtccttcatcgagcggatgaccaacttcgacaagaacctgcccaacgagaaggtgctgcccaagcactccctgctgtacgagtacttcaccgtgtacaacgagctgaccaaggtgaagtacgtgaccgagggcatgcggaagcccgccttcctgtccggcgagcagaagaaggccatcgtggacctgctgttcaagaccaaccggaaggtgaccgtgaagcagctgaaggaggactacttcaagaagatcgagtgcttcgactccgtggagatctccggcgtggaggaccggttcaacgcctccctgggcacctaccacgacctgctgaagatcatcaaggacaaggacttcctggacaacgaggagaacgaggacatcctggaggacatcgtgctgaccctgaccctgttcgaggaccgggagatgatcgaggagcggctgaagacctacgcccacctgttcgacgacaaggtgatgaagcagctgaagcggcggcggtacaccggctggggccggctgtcccggaagctgatcaacggcatccgggacaagcagtccggcaagaccatcctggacttcctgaagtccgacggcttcgccaaccggaacttcatgcagctgatccacgacgactccctgaccttcaaggaggacatccagaaggcccaggtgtccggccagggcgactccctgcacgagcacatcgccaacctggccggctcccccgccatcaagaagggcatcctgcagaccgtgaaggtggtggacgagctggtgaaggtgatgggccggcacaagcccgagaacatcgtgatcgagatggcccgggagaaccagaccacccagaagggccagaagaactcccgggagcggatgaagcggatcgaggagggcatcaaggagctgggctcccagatcctgaaggagcaccccgtggagaacacccagctgcagaacgagaagctgtacctgtactacctgcagaacggccgggacatgtacgtggaccaggagctggacatcaaccggctgtccgactacgacgtggacgccatcgtgccccagtccttcctgaaggacgactccatcgacaacaaggtgctgacccggtccgacaagaaccggggcaagtccgacaacgtgccctccgaggaggtggtgaagaagatgaagaactactggcggcagctgctgaacgccaagctgatcacccagcggaagttcgacaacctgaccaaggccgagcggggcggcctgtccgagctggacaaggccggcttcatcaagcggcagctggtggagacccggcagatcaccaagcacgtggcccagatcctggactcccggatgaacaccaagtacgacgagaacgacaagctgatccgggaggtgaaggtgatcaccctgaagtccaagctggtgtccgacttccggaaggacttccagttctacaaggtgcgggagatcaacaactaccaccacgcccacgacgcctacctgaacgccgtggtgggcaccgccctgatcaagaagtaccccaagctggagtccgagttcgtgtacggcgactacaaggtgtacgacgtgcggaagatgatcgccaagtccgagcaggagatcggcaaggccaccgccaagtacttcttctactccaacatcatgaacttcttcaagaccgagatcaccctggccaacggcgagatccggaagcggcccctgatcgagaccaacggcgagaccggcgagatcgtgtgggacaagggccgggacttcgccaccgtgcggaaggtgctgtccatgccccaggtgaacatcgtgaagaagaccgaggtgcagaccggcggcttctccaaggagtccatcctgcccaagcggaactccgacaagctgatcgcccggaagaaggactgggaccccaagaagtacggcggcttcgactcccccaccgtggcctactccgtgctggtggtggccaaggtggagaagggcaagtccaagaagctgaagtccgtgaaggagctgctgggcatcaccatcatggagcggtcctccttcgagaagaaccccatcgacttcctggaggccaagggctacaaggaggtgaagaaggacctgatcatcaagctgcccaagtactccctgttcgagctggagaacggccggaagcggatgctggcctccgccggcgagctgcagaagggcaacgagctggccctgccctccaagtacgtgaacttcctgtacctggcctcccactacgagaagctgaagggctcccccgaggacaacgagcagaagcagctgttcgtggagcagcacaagcactacctggacgagatcatcgagcagatctccgagttctccaagcgggtgatcctggccgacgccaacctggacaaggtgctgtccgcctacaacaagcaccgggacaagcccatccgggagcaggccgagaacatcatccacctgttcaccctgaccaacctgggcgcccccgccgccttcaagtacttcgacaccaccatcgaccggaagcggtacacctccaccaaggaggtgctggacgccaccctgatccaccagtccatcaccggcctgtacgagacccggatcgacctgtcccagctgggcggcgactccggcggctcctccggcggctccaagcggaccgccgacggctccgagttcgagtcccccaagaagaagcggaaggtgtccggcggctcctccggcggctccatgaagatcgccgtggtggacaaggccctgaacaacacccggtacgacaagcacttccagctgtacggcgaggaggtggacgtgttccacatgtgcaacgagaagctgtccggccggctgctgaagaagcacatcaccatcggcacccccgagaaccccttcgaccccaacgactacgacttcgtgatcctggtgggcgccgagcccttcctgtacttcgccggcaagaagggcatcggcgactacaccggcaagcgggtggagtacaacggctacgccaactggatcgcctccatctcccccgcccagctgcacttcaagcccgagatgaagcccgtgttcgacgccaccgtggagaacatccacgacatcatcaacggccgggagaagatcgccaaggccggcgactaccggcccatcaccgaccccgacgaggccgaggagtacatcaagatggtgtacaacatggtgatcggccccgtggccttcgcctccgccacctccgccctgtactgccgggacggctacctgctgggcgtgtccatctcccaccaggagtaccagggcgtgtacatcgactccgactgcctgaccgaggtggccgtgtactacctgcagaagatcctggactccgagaaccacaccatcgtgttccacaacctgaagttcgacatgcacttctacaagtaccacctgggcctgaccttcgacaaggcccacaaggagcggcggctgcacgacaccatgctgcagcactacgtgctggacgagcggcggggcacccacggcctgaagtccctggccatgaagtacaccgacatgggcgactacgacttcgagctggacaagttcaaggacgactactgcaaggcccacaagatcaagaaggaggacttcacctacgacctgatccccttcgacatcatgtggccctacgccgccaaggacaccgacgccaccatccggctgcacaacttcttcctgcccaagatcgagaagaacgagaagctgtgctccctgtactacgacgtgctgatgcccggctgcgtgttcctgcagcgggtggaggaccggggcgtgcccatctccatcgaccggctgaaggaggcccagtaccagctgacccacaacctgaacaaggcccgggagaagctgtacacctaccccgaggtgaagcagctggagcaggaccagaacgaggccttcaaccccaactccgtgaagcagctgcgggtgctgctgttcgactacgtgggcctgacccccaccggcaagctgaccgacaccggcgccgactccaccgacgccgaggccctgaacgagctggccacccagcaccccatcgccaagaccctgctggagatccggaagctgaccaagctgatctccacctacgtggagaagatcctgctgtccatcgacgccgacggctgcatccggaccggcttccacgagcacatgaccacctccggccggctgtcctcctccggcaagctgaacctgcagcagctgccccgggacgagtccatcatcaagggctgcgtggtggccccccccggctaccgggtgatcgcctgggacctgaccaccgccgaggtgtactacgccgccgtgctgtccggcgaccggaacatgcagcaggtgttcatcaacatgcggaacgagcccgacaagtaccccgacttccactccaacatcgcccacatggtgttcaagctgcagtgcgagccccgggacgtgaagaagctgttccccgccctgcggcaggccgccaaggccatcaccttcggcatcctgtacggctccggccccgccaaggtggcccactccgtgaacgaggccctgctggagcaggccgccaagaccggcgagcccttcgtggagtgcaccgtggccgacgccaaggagtacatcgagacctacttcggccagttcccccagctgaagcggtggatcgacaagtgccacgaccagatcaagaaccacggcttcatctactcccacttcggccggaagcggcggctgcacaacatccactccgaggaccggggcgtgcagggcgaggagatccggtccggcttcaacgccatcatccagtccgcctcctccgactccctgctgctgggcgccgtggacgccgacaacgagatcatctccctgggcctggagcaggagatgaagatcgtgatgctggtgcacgactccgtggtggccatcgtgcgggaggacctgatcgaccagtacaacgagatcctgatccggaacatccagaaggaccggggcatctccatccccggctgccccatcggcatcgactccgactccgaggccggcggctcccgggactactcctgcggcaagatgaagaagcagcacccctccatcgcctgcatcgacgacgacgagtacacccggtacgtgaagggcgtgctgctggacgccgagttcgagtacaagaagctggccgccatggacaaggagcaccccgaccactccaagtacaaggacgacaagttcatcgccgtgtgcaaggacctggacaacgtgaagcggatcctgggcgccggcggcggctccggcaagcggaccgccgacggctccggcggcggctcccccaagaagaagcggaaggtgcccgccgccaagcgcgtgaagctggactccgagtccgccacccccgagtccgtgtccggctggcggctgttcaagaagatctcctagctagcaccagcctcaagaacacccgaatggagtctctaagctacataataccaacttacactttacaaaatgttgtcccccaaaatgtagccattcgtatctgctcctaataaaaagaaagtttcttcacattctctcgagaaaaaaaaaaaatggaaaaaaaaaaaacggaaaaaaaaaaaaggtaaaaaaaaaaaatataaaaaaaaaaaacataaaaaaaaaaaacgaaaaaaaaaaaacgtaaaaaaaaaaaactcaaaaaaaaaaaagataaaaaaaaaaaacctaaaaaaaaaaaatgtaaaaaaaaaaaagggaaaaaaaaaaaacgcaaaaaaaaaaaacacaaaaaaaaaaaatgcaaaaaaaaaaaatcgaaaaaaaaaaaatctaaaaaaaaaaaacgaaaaaaaaaaaacccaaaaaaaaaaaagacaaaaaaaaaaaatagaaaaaaaaaaagttaaaaaaaaaaaactgaaaaaaaaaaaatttaaaaaaaaaaaatctag

SEQ ID NO: 1375 - DNA, 6927 bp, synthetic construct
  misc_feature 1..6927: note = Synthetic
  source 1..6927: mol_type = other DNA
atggacaagaagtactccatcggcctggacatcggcaccaactccgtgggctgggccgtgatcaccgacgagtacaaggtgccctccaagaagttcaaggtgctgggcaacaccgaccggcactccatcaagaagaacctgatcggcgccctgctgttcgactccggcgagaccgccgaggccacccggctgaagcggaccgcccggcggcggtacacccggcggaagaaccggatctgctacctgcaggagatcttctccaacgagatggccaaggtggacgactccttcttccaccggctggaggagtccttcctggtggaggaggacaagaagcacgagcggcaccccatcttcggcaacatcgtggacgaggtggcctaccacgagaagtaccccaccatctaccacctgcggaagaagctggtggactccaccgacaaggccgacctgcggctgatctacctggccctggcccacatgatcaagttccggggccacttcctgatcgagggcgacctgaaccccgacaactccgacgtggacaagctgttcatccagctggtgcagacctacaaccagctgttcgaggagaaccccatcaacgcctccggcgtggacgccaaggccatcctgtccgcccggctgtccaagtcccggcggctggagaacctgatcgcccagctgcccggcgagaagaagaacggcctgttcggcaacctgatcgccctgtccctgggcctgacccccaacttcaagtccaacttcgacctggccgaggacgccaagctgcagctgtccaaggacacctacgacgacgacctggacaacctgctggcccagatcggcgaccagtacgccgacctgttcctggccgccaagaacctgtccgacgccatcctgctgtccgacatcctgcgggtgaacaccgagatcaccaaggcccccctgtccgcctccatgatcaagcggtacgacgagcaccaccaggacctgaccctgctgaaggccctggtgcggcagcagctgcccgagaagtacaaggagatcttcttcgaccagtccaagaacggctacgccggctacatcgacggcggcgcctcccaggaggagttctacaagttcatcaagcccatcctggagaagatggacggcaccgaggagctgctggtgaagctgaaccgggaggacctgctgcggaagcagcggaccttcgacaacggctccatcccccaccagatccacctgggcgagctgcacgccatcctgcggcggcaggaggacttctaccccttcctgaaggacaaccgggagaagatcgagaagatcctgaccttccggatcccctactacgtgggccccctggcccggggcaactcccggttcgcctggatgacccggaagtccgaggagaccatcaccccctggaacttcgaggaggtggtggacaagggcgcctccgcccagtccttcatcgagcggatgaccaacttcgacaagaacctgcccaacgagaaggtgctgcccaagcactccctgctgtacgagtacttcaccgtgtacaacgagctgaccaaggtgaagtacgtgaccgagggcatgcggaagcccgccttcctgtccggcgagcagaagaaggccatcgtggacctgctgttcaagaccaaccggaaggtgaccgtgaagcagctgaaggaggactacttcaagaagatcgagtgcttcgactccgtggagatctccggcgtggaggaccggttcaacgcctccctgggcacctaccacgacctgctgaagatcatcaaggacaaggacttcctggacaacgaggagaacgaggacatcctggaggacatcgtgctgaccctgaccctgttcgaggaccgggagatgatcgaggagcggctgaagacctacgcccacctgttcgacgacaaggtgatgaagcagctgaagcggcggcggtacaccggctggggccggctgtcccggaagctgatcaacggcatccgggacaagcagtccggcaagaccatcctggacttcctgaagtccgacggcttcgccaaccggaacttcatgcagctgatccacgacgactccctgaccttcaaggaggacatccagaaggcccaggtgtccggccagggcgactccctgcacgagcacatcgccaacctggccggctcccccgccatcaagaagggcatcctgcagaccgtgaaggtggtggacgagctggtgaaggtgatgggccggcacaagcccgagaacatcgtgatcgagatggcccgggagaaccagaccacccagaagggccagaagaactcccgggagcggatgaagcggatcgaggagggcatcaaggagctgggctcccagatcctgaaggagcaccccgtggagaacacccagctgcagaacgagaagctgtacctgtactacctgcagaacggccgggacatgtacgtggaccaggagctggacatcaaccggctgtccgactacgacgtggacgccatcgtgccccagtccttcctgaaggacgactccatcgacaacaaggtgctgacccggtccgacaagaaccggggcaagtccgacaacgtgccctccgaggaggtggtgaagaagatgaagaactactggcggcagctgctgaacgccaagctgatcacccagcggaagttcgacaacctgaccaaggccgagcggggcggcctgtccgagctggacaaggccggcttcatcaagcggcagctggtggagacccggcagatcaccaagcacgtggcccagatcctggactcccggatgaacaccaagtacgacgagaacgacaagctgatccgggaggtgaaggtgatcaccctgaagtccaagctggtgtccgacttccggaaggacttccagttctacaaggtgcgggagatcaacaactaccaccacgcccacgacgcctacctgaacgccgtggtgggcaccgccctgatcaagaagtaccccaagctggagtccgagttcgtgtacggcgactacaaggtgtacgacgtgcggaagatgatcgccaagtccgagcaggagatcggcaaggccaccgccaagtacttcttctactccaacatcatgaacttcttcaagaccgagatcaccctggccaacggcgagatccggaagcggcccctgatcgagaccaacggcgagaccggcgagatcgtgtgggacaagggccgggacttcgccaccgtgcggaaggtgctgtccatgccccaggtgaacatcgtgaagaagaccgaggtgcagaccggcggcttctccaaggagtccatcctgcccaagcggaactccgacaagctgatcgcccggaagaaggactgggaccccaagaagtacggcggcttcgactcccccaccgtggcctactccgtgctggtggtggccaaggtggagaagggcaagtccaagaagctgaagtccgtgaaggagctgctgggcatcaccatcatggagcggtcctccttcgagaagaaccccatcgacttcctggaggccaagggctacaaggaggtgaagaaggacctgatcatcaagctgcccaagtactccctgttcgagctggagaacggccggaagcggatgctggcctccgccggcgagctgcagaagggcaacgagctggccctgccctccaagtacgtgaacttcctgtacctggcctcccactacgagaagctgaagggctcccccgaggacaacgagcagaagcagctgttcgtggagcagcacaagcactacctggacgagatcatcgagcagatctccgagttctccaagcgggtgatcctggccgacgccaacctggacaaggtgctgtccgcctacaacaagcaccgggacaagcccatccgggagcaggccgagaacatcatccacctgttcaccctgaccaacctgggcgcccccgccgccttcaagtacttcgacaccaccatcgaccggaagcggtacacctccaccaaggaggtgctggacgccaccctgatccaccagtccatcaccggcctgtacgagacccggatcgacctgtcccagctgggcggcgactccggcggctcctccggcggctccaagcggaccgccgacggctccgagttcgagtcccccaagaagaagcggaaggtgtccggcggctcctccggcggctccatgaagatcgccgtggtggacaaggccctgaacaacacccggtacgacaagcacttccagctgtacggcgaggaggtggacgtgttccacatgtgcaacgagaagctgtccggccggctgctgaagaagcacatcaccatcggcacccccgagaaccccttcgaccccaacgactacgacttcgtgatcctggtgggcgccgagcccttcctgtacttcgccggcaagaagggcatcggcgactacaccggcaagcgggtggagtacaacggctacgccaactggatcgcctccatctcccccgcccagctgcacttcaagcccgagatgaagcccgtgttcgacgccaccgtggagaacatccacgacatcatcaacggccgggagaagatcgccaaggccggcgactaccggcccatcaccgaccccgacgaggccgaggagtacatcaagatggtgtacaacatggtgatcggccccgtggccttcgcctccgccacctccgccctgtactgccgggacggctacctgctgggcgtgtccatctcccaccaggagtaccagggcgtgtacatcgactccgactgcctgaccgaggtggccgtgtactacctgcagaagatcctggactccgagaaccacaccatcgtgttccacaacctgaagttcgacatgcacttctacaagtaccacctgggcctgaccttcgacaaggcccacaaggagcggcggctgcacgacaccatgctgcagcactacgtgctggacgagcggcggggcacccacggcctgaagtccctggccatgaagtacaccgacatgggcgactacgacttcgagctggacaagttcaaggacgactactgcaaggcccacaagatcaagaaggaggacttcacctacgacctgatccccttcgacatcatgtggccctacgccgccaaggacaccgacgccaccatccggctgcacaacttcttcctgcccaagatcgagaagaacgagaagctgtgctccctgtactacgacgtgctgatgcccggctgcgtgttcctgcagcgggtggaggaccggggcgtgcccatctccatcgaccggctgaaggaggcccagtaccagctgacccacaacctgaacaaggcccgggagaagctgtacacctaccccgaggtgaagcagctggagcaggaccagaacgaggccttcaaccccaactccgtgaagcagctgcgggtgctgctgttcgactacgtgggcctgacccccaccggcaagctgaccgacaccggcgccgactccaccgacgccgaggccctgaacgagctggccacccagcaccccatcgccaagaccctgctggagatccggaagctgaccaagctgatctccacctacgtggagaagatcctgctgtccatcgacgccgacggctgcatccggaccggcttccacgagcacatgaccacctccggccggctgtcctcctccggcaagctgaacctgcagcagctgccccgggacgagtccatcatcaagggctgcgtggtggccccccccggctaccgggtgatcgcctgggacctgaccaccgccgaggtgtactacgccgccgtgctgtccggcgaccggaacatgcagcaggtgttcatcaacatgcggaacgagcccgacaagtaccccgacttccactccaacatcgcccacatggtgttcaagctgcagtgcgagccccgggacgtgaagaagctgttccccgccctgcggcaggccgccaaggccatcaccttcggcatcctgtacggctccggccccgccaaggtggcccactccgtgaacgaggccctgctggagcaggccgccaagaccggcgagcccttcgtggagtgcaccgtggccgacgccaaggagtacatcgagacctacttcggccagttcccccagctgaagcggtggatcgacaagtgccacgaccagatcaagaaccacggcttcatctactcccacttcggccggaagcggcggctgcacaacatccactccgaggaccggggcgtgcagggcgaggagatccggtccggcttcaacgccatcatccagtccgcctcctccgactccctgctgctgggcgccgtggacgccgacaacgagatcatctccctgggcctggagcaggagatgaagatcgtgatgctggtgcacgactccgtggtggccatcgtgcgggaggacctgatcgaccagtacaacgagatcctgatccggaacatccagaaggaccggggcatctccatccccggctgccccatcggcatcgactccgactccgaggccggcggctcccgggactactcctgcggcaagatgaagaagcagcacccctccatcgcctgcatcgacgacgacgagtacacccggtacgtgaagggcgtgctgctggacgccgagttcgagtacaagaagctggccgccatggacaaggagcaccccgaccactccaagtacaaggacgacaagttcatcgccgtgtgcaaggacctggacaacgtgaagcggatcctgggcgccggcggcggctccggcaagcggaccgccgacggctccggcggcggctcccccaagaagaagcggaaggtgcccgccgccaagcgcgtgaagctggactccgagtccgccacccccgagtccgtgtccggctggcggctgttcaagaagatctcctag

SEQ ID NO: 1376 - protein, 2308 aa, synthetic construct
  REGION 1..2308: note = Synthetic
MDKKYSIGLDIGTNSVGWAVITDEYKVPSKKFKVLGNTDRHSIKKNLIGALLFDSGETAEATRLKRTARRRYTRRKNRICYLQEIFSNEMAKVDDSFFHRLEESFLVEEDKKHERHPIFGNIVDEVAYHEKYPTIYHLRKKLVDSTDKADLRLIYLALAHMIKFRGHFLIEGDLNPDNSDVDKLFIQLVQTYNQLFEENPINASGVDAKAILSARLSKSRRLENLIAQLPGEKKNGLFGNLIALSLGLTPNFKSNFDLAEDAKLQLSKDTYDDDLDNLLAQIGDQYADLFLAAKNLSDAILLSDILRVNTEITKAPLSASMIKRYDEHHQDLTLLKALVRQQLPEKYKEIFFDQSKNGYAGYIDGGASQEEFYKFIKPILEKMDGTEELLVKLNREDLLRKQRTFDNGSIPHQIHLGELHAILRRQEDFYPFLKDNREKIEKILTFRIPYYVGPLARGNSRFAWMTRKSEETITPWNFEEVVDKGASAQSFIERMTNFDKNLPNEKVLPKHSLLYEYFTVYNELTKVKYVTEGMRKPAFLSGEQKKAIVDLLFKTNRKVTVKQLKEDYFKKIECFDSVEISGVEDRFNASLGTYHDLLKIIKDKDFLDNEENEDILEDIVLTLTLFEDREMIEERLKTYAHLFDDKVMKQLKRRRYTGWGRLSRKLINGIRDKQSGKTILDFLKSDGFANRNFMQLIHDDSLTFKEDIQKAQVSGQGDSLHEHIANLAGSPAIKKGILQTVKVVDELVKVMGRHKPENIVIEMARENQTTQKGQKNSRERMKRIEEGIKELGSQILKEHPVENTQLQNEKLYLYYLQNGRDMYVDQELDINRLSDYDVDAIVPQSFLKDDSIDNKVLTRSDKNRGKSDNVPSEEVVKKMKNYWRQLLNAKLITQRKFDNLTKAERGGLSELDKAGFIKRQLVETRQITKHVAQILDSRMNTKYDENDKLIREVKVITLKSKLVSDFRKDFQFYKVREINNYHHAHDAYLNAVVGTALIKKYPKLESEFVYGDYKVYDVRKMIAKSEQEIGKATAKYFFYSNIMNFFKTEITLANGEIRKRPLIETNGETGEIVWDKGRDFATVRKVLSMPQVNIVKKTEVQTGGFSKESILPKRNSDKLIARKKDWDPKKYGGFDSPTVAYSVLVVAKVEKGKSKKLKSVKELLGITIMERSSFEKNPIDFLEAKGYKEVKKDLIIKLPKYSLFELENGRKRMLASAGELQKGNELALPSKYVNFLYLASHYEKLKGSPEDNEQKQLFVEQHKHYLDEIIEQISEFSKRVILADANLDKVLSAYNKHRDKPIREQAENIIHLFTLTNLGAPAAFKYFDTTIDRKRYTSTKEVLDATLIHQSITGLYETRIDLSQLGGDSGGSSGGSKRTADGSEFESPKKKRKVSGGSSGGSMKIAVVDKALNNTRYDKHFQLYGEEVDVFHMCNEKLSGRLLKKHITIGTPENPFDPNDYDFVILVGAEPFLYFAGKKGIGDYTGKRVEYNGYANWIASISPAQLHFKPEMKPVFDATVENIHDIINGREKIAKAGDYRPITDPDEAEEYIKMVYNMVIGPVAFASATSALYCRDGYLLGVSISHQEYQGVYIDSDCLTEVAVYYLQKILDSENHTIVFHNLKFDMHFYKYHLGLTFDKAHKERRLHDTMLQHYVLDERRGTHGLKSLAMKYTDMGDYDFELDKFKDDYCKAHKIKKEDFTYDLIPFDIMWPYAAKDTDATIRLHNFFLPKIEKNEKLCSLYYDVLMPGCVFLQRVEDRGVPISIDRLKEAQYQLTHNLNKAREKLYTYPEVKQLEQDQNEAFNPNSVKQLRVLLFDYVGLTPTGKLTDTGADSTDAEALNELATQHPIAKTLLEIRKLTKLISTYVEKILLSIDADGCIRTGFHEHMTTSGRLSSSGKLNLQQLPRDESIIKGCVVAPPGYRVIAWDLTTAEVYYAAVLSGDRNMQQVFINMRNEPDKYPDFHSNIAHMVFKLQCEPRDVKKLFPALRQAAKAITFGILYGSGPAKVAHSVNEALLEQAAKTGEPFVECTVADAKEYIETYFGQFPQLKRWIDKCHDQIKNHGFIYSHFGRKRRLHNIHSEDRGVQGEEIRSGFNAIIQSASSDSLLLGAVDADNEIISLGLEQEMKIVMLVHDSVVAIVREDLIDQYNEILIRNIQKDRGISIPGCPIGIDSDSEAGGSRDYSCGKMKKQHPSIACIDDDEYTRYVKGVLLDAEFEYKKLAAMDKEHPDHSKYKDDKFIAVCKDLDNVKRILGAGGGSGKRTADGSGGGSPKKKRKVPAAKRVKLDSESATPESVSGWRLFKKIS

SEQ ID NO: 1377 - RNA, 4990 nt, synthetic construct
  misc_feature 1..4990: note = Synthetic
  source 1..4990: mol_type = other RNA
gggaagctcagaataaacgctcaactttggccggatctgccaccatggacaagaagtactccatcggcctggacatcggcaccaactccgtgggctgggccgtgatcaccgacgagtacaaggtgccctccaagaagttcaaggtgctgggcaacaccgaccggcactccatcaagaagaacctgatcggcgccctgctgttcgactccggcgagaccgccgaggccacccggctgaagcggaccgcccggcggcggtacacccggcggaagaaccggatctgctacctgcaggagatcttctccaacgagatggccaaggtggacgactccttcttccaccggctggaggagtccttcctggtggaggaggacaagaagcacgagcggcaccccatcttcggcaacatcgtggacgaggtggcctaccacgagaagtaccccaccatctaccacctgcggaagaagctggtggactccaccgacaaggccgacctgcggctgatctacctggccctggcccacatgatcaagttccggggccacttcctgatcgagggcgacctgaaccccgacaactccgacgtggacaagctgttcatccagctggtgcagacctacaaccagctgttcgaggagaaccccatcaacgcctccggcgtggacgccaaggccatcctgtccgcccggctgtccaagtcccggcggctggagaacctgatcgcccagctgcccggcgagaagaagaacggcctgttcggcaacctgatcgccctgtccctgggcctgacccccaacttcaagtccaacttcgacctggccgaggacgccaagctgcagctgtccaaggacacctacgacgacgacctggacaacctgctggcccagatcggcgaccagtacgccgacctgttcctggccgccaagaacctgtccgacgccatcctgctgtccgacatcctgcgggtgaacaccgagatcaccaaggcccccctgtccgcctccatgatcaagcggtacgacgagcaccaccaggacctgaccctgctgaaggccctggtgcggcagcagctgcccgagaagtacaaggagatcttcttcgaccagtccaagaacggctacgccggctacatcgacggcggcgcctcccaggaggagttctacaagttcatcaagcccatcctggagaagatggacggcaccgaggagctgctggtgaagctgaaccgggaggacctgctgcggaagcagcggaccttcgacaacggctccatcccccaccagatccacctgggcgagctgcacgccatcctgcggcggcaggaggacttctaccccttcctgaaggacaaccgggagaagatcgagaagatcctgaccttccggatcccctactacgtgggccccctggcccggggcaactcccggttcgcctggatgacccggaagtccgaggagaccatcaccccctggaacttcgaggaggtggtggacaagggcgcctccgcccagtccttcatcgagcggatgaccaacttcgacaagaacctgcccaacgagaaggtgctgcccaagcactccctgctgtacgagtacttcaccgtgtacaacgagctgaccaaggtgaagtacgtgaccgagggcatgcggaagcccgccttcctgtccggcgagcagaagaaggccatcgtggacctgctgttcaagaccaaccggaaggtgaccgtgaagcagctgaaggaggactacttcaagaagatcgagtgcttcgactccgtggagatctccggcgtggaggaccggttcaacgcctccctgggcacctaccacgacctgctgaagatcatcaaggacaaggacttcctggacaacgaggagaacgaggacatcctggaggacatcgtgctgaccctgaccctgttcgaggaccgggagatgatcgaggagcggctgaagacctacgcccacctgttcgacgacaaggtgatgaagcagctgaagcggcggcggtacaccggctggggccggctgtcccggaagctgatcaacggcatccgggacaagcagtccggcaagaccatcctggacttcctgaagtccgacggcttcgccaaccggaacttcatgcagctgatccacgacgactccctgaccttcaaggaggacatccagaaggcccaggtgtccggccagggcgactccctgcacgagcacatcgccaacctggccggctcccccgccatcaagaagggcatcctgcagaccgtgaaggtggtggacgagctggtgaaggtgatgggccggcacaagcccgagaacatcgtgatcgagatggcccgggagaaccagaccacccagaagggccagaagaactcccgggagcggatgaagcggatcgaggagggcatcaaggagctgggctcccagatcctgaaggagcaccccgtggagaacacccagctgcagaacgagaagctgtacctgtactacctgcagaacggccgggacatgtacgtggaccaggagctggacatcaaccggctgtccgactacgacgtggacgccatcgtgccccagtccttcctgaaggacgactccatcgacaacaaggtgctgacccggtccgacaagaaccggggcaagtccgacaacgtgccctccgaggaggtggtgaagaagatgaagaactactggcggcagctgctgaacgccaagctgatcacccagcggaagttcgacaacctgaccaaggccgagcggggcggcctgtccgagctggacaaggccggcttcatcaagcggcagctggtggagacccggcagatcaccaagcacgtggcccagatcctggactcccggatgaacaccaagtacgacgagaacgacaagctgatccgggaggtgaaggtgatcaccctgaagtccaagctggtgtccgacttccggaaggacttccagttctacaaggtgcgggagatcaacaactaccaccacgcccacgacgcctacctgaacgccgtggtgggcaccgccctgatcaagaagtaccccaagctggagtccgagttcgtgtacggcgactacaaggtgtacgacgtgcggaagatgatcgccaagtccgagcaggagatcggcaaggccaccgccaagtacttcttctactccaacatcatgaacttcttcaagaccgagatcaccctggccaacggcgagatccggaagcggcccctgatcgagaccaacggcgagaccggcgagatcgtgtgggacaagggccgggacttcgccaccgtgcggaaggtgctgtccatgccccaggtgaacatcgtgaagaagaccgaggtgcagaccggcggcttctccaaggagtccatcctgcccaagcggaactccgacaagctgatcgcccggaagaaggactgggaccccaagaagtacggcggcttcgactcccccaccgtggcctactccgtgctggtggtggccaaggtggagaagggcaagtccaagaagctgaagtccgtgaaggagctgctgggcatcaccatcatggagcggtcctccttcgagaagaaccccatcgacttcctggaggccaagggctacaaggaggtgaagaaggacctgatcatcaagctgcccaagtactccctgttcgagctggagaacggccggaagcggatgctggcctccgccggcgagctgcagaagggcaacgagctggccctgccctccaagtacgtgaacttcctgtacctggcctcccactacgagaagctgaagggctcccccgaggacaacgagcagaagcagctgttcgtggagcagcacaagcactacctggacgagatcatcgagcagatctccgagttctccaagcgggtgatcctggccgacgccaacctggacaaggtgctgtccgcctacaacaagcaccgggacaagcccatccgggagcaggccgagaacatcatccacctgttcaccctgaccaacctgggcgcccccgccgccttcaagtacttcgacaccaccatcgaccggaagcggtacacctccaccaaggaggtgctggacgccaccctgatccaccagtccatcaccggcctgtacgagacccggatcgacctgtcccagctgggcggcgactccggcggctcccggggcaagtgcctgtcctacgacaccgagatcctgaccgtggagtacggcttcctgcccatcggcaagatcgtggaggagcggatcgagtgcaccgtgtacaccgtggacaagaacggcttcgtgtacacccagcccatcgcccagtggcacaaccgcggcgagcaggaggtgttcgagtactgcctggaggacggctccatcatccgcgccaccaaggaccacaagttcatgaccaccgacggccagatgctgcccatcgacgagatcttcgagcgcggcctggacctgaagcaggtggacggcctgccctagctagcaccagcctcaagaacacccgaatggagtctctaagctacataataccaacttacactttacaaaatgttgtcccccaaaatgtagccattcgtatctgctcctaataaaaagaaagtttcttcacattctctcgagaaaaaaaaaaaatggaaaaaaaaaaaacggaaaaaaaaaaaaggtaaaaaaaaaaaatataaaaaaaaaaaacataaaaaaaaaaaacgaaaaaaaaaaaacgtaaaaaaaaaaaactcaaaaaaaaaaaagataaaaaaaaaaaacctaaaaaaaaaaaatgtaaaaaaaaaaaagggaaaaaaaaaaaacgcaaaaaaaaaaaacacaaaaaaaaaaaatgcaaaaaaaaaaaatcgaaaaaaaaaaaatctaaaaaaaaaaaacgaaaaaaaaaaaacccaaaaaaaaaaaagacaaaaaaaaaaaatagaaaaaaaaaaagttaaaaaaaaaaaactgaaaaaaaaaaaatttaaaaaaaaaaaatctag

SEQ ID NO: 1378 - DNA, 4431 bp, synthetic construct
  misc_feature 1..4431: note = Synthetic
  source 1..4431: mol_type = other DNA
atggacaagaagtactccatcggcctggacatcggcaccaactccgtgggctgggccgtgatcaccgacgagtacaaggtgccctccaagaagttcaaggtgctgggcaacaccgaccggcactccatcaagaagaacctgatcggcgccctgctgttcgactccggcgagaccgccgaggccacccggctgaagcggaccgcccggcggcggtacacccggcggaagaaccggatctgctacctgcaggagatcttctccaacgagatggccaaggtggacgactccttcttccaccggctggaggagtccttcctggtggaggaggacaagaagcacgagcggcaccccatcttcggcaacatcgtggacgaggtggcctaccacgagaagtaccccaccatctaccacctgcggaagaagctggtggactccaccgacaaggccgacctgcggctgatctacctggccctggcccacatgatcaagttccggggccacttcctgatcgagggcgacctgaaccccgacaactccgacgtggacaagctgttcatccagctggtgcagacctacaaccagctgttcgaggagaaccccatcaacgcctccggcgtggacgccaaggccatcctgtccgcccggctgtccaagtcccggcggctggagaacctgatcgcccagctgcccggcgagaagaagaacggcctgttcggcaacctgatcgccctgtccctgggcctgacccccaacttcaagtccaacttcgacctggccgaggacgccaagctgcagctgtccaaggacacctacgacgacgacctggacaacctgctggcccagatcggcgaccagtacgccgacctgttcctggccgccaagaacctgtccgacgccatcctgctgtccgacatcctgcgggtgaacaccgagatcaccaaggcccccctgtccgcctccatgatcaagcggtacgacgagcaccaccaggacctgaccctgctgaaggccctggtgcggcagcagctgcccgagaagtacaaggagatcttcttcgaccagtccaagaacggctacgccggctacatcgacggcggcgcctcccaggaggagttctacaagttcatcaagcccatcctggagaagatggacggcaccgaggagctgctggtgaagctgaaccgggaggacctgctgcggaagcagcggaccttcgacaacggctccatcccccaccagatccacctgggcgagctgcacgccatcctgcggcggcaggaggacttctaccccttcctgaaggacaaccgggagaagatcgagaagatcctgaccttccggatcccctactacgtgggccccctggcccggggcaactcccggttcgcctggatgacccggaagtccgaggagaccatcaccccctggaacttcgaggaggtggtggacaagggcgcctccgcccagtccttcatcgagcggatgaccaacttcgacaagaacctgcccaacgagaaggtgctgcccaagcactccctgctgtacgagtacttcaccgtgtacaacgagctgaccaaggtgaagtacgtgaccgagggcatgcggaagcccgccttcctgtccggcgagcagaagaaggccatcgtggacctgctgttcaagaccaaccggaaggtgaccgtgaagcagctgaaggaggactacttcaagaagatcgagtgcttcgactccgtggagatctccggcgtggaggaccggttcaacgcctccctgggcacctaccacgacctgctgaagatcatcaaggacaaggacttcctggacaacgaggagaacgaggacatcctggaggacatcgtgctgaccctgaccctgttcgaggaccgggagatgatcgaggagcggctgaagacctacgcccacctgttcgacgacaaggtgatgaagcagctgaagcggcggcggtacaccggctggggccggctgtcccggaagctgatcaacggcatccgggacaagcagtccggcaagaccatcctggacttcctgaagtccgacggcttcgccaaccggaacttcatgcagctgatccacgacgactccctgaccttcaaggaggacatccagaaggcccaggtgtccggccagggcgactccctgcacgagcacatcgccaacctggccggctcccccgccatcaagaagggcatcctgcagaccgtgaaggtggtggacgagctggtgaaggtgatgggccggcacaagcccgagaacatcgtgatcgagatggcccgggagaaccagaccacccagaagggccagaagaactcccgggagcggatgaagcggatcgaggagggcatcaaggagctgggctcccagatcctgaaggagcaccccgtggagaacacccagctgcagaacgagaagctgtacctgtactacctgcagaacggccgggacatgtacgtggaccaggagctggacatcaaccggctgtccgactacgacgtggacgccatcgtgccccagtccttcctgaaggacgactccatcgacaacaaggtgctgacccggtccgacaagaaccggggcaagtccgacaacgtgccctccgaggaggtggtgaagaagatgaagaactactggcggcagctgctgaacgccaagctgatcacccagcggaagttcgacaacctgaccaaggccgagcggggcggcctgtccgagctggacaaggccggcttcatcaagcggcagctggtggagacccggcagatcaccaagcacgtggcccagatcctggactcccggatgaacaccaagtacgacgagaacgacaagctgatccgggaggtgaaggtgatcaccctgaagtccaagctggtgtccgacttccggaaggacttccagttctacaaggtgcgggagatcaacaactaccaccacgcccacgacgcctacctgaacgccgtggtgggcaccgccctgatcaagaagtaccccaagctggagtccgagttcgtgtacggcgactacaaggtgtacgacgtgcggaagatgatcgccaagtccgagcaggagatcggcaaggccaccgccaagtacttcttctactccaacatcatgaacttcttcaagaccgagatcaccctggccaacggcgagatccggaagcggcccctgatcgagaccaacggcgagaccggcgagatcgtgtgggacaagggccgggacttcgccaccgtgcggaaggtgctgtccatgccccaggtgaacatcgtgaagaagaccgaggtgcagaccggcggcttctccaaggagtccatcctgcccaagcggaactccgacaagctgatcgcccggaagaaggactgggaccccaagaagtacggcggcttcgactcccccaccgtggcctactccgtgctggtggtggccaaggtggagaagggcaagtccaagaagctgaagtccgtgaaggagctgctgggcatcaccatcatggagcggtcctccttcgagaagaaccccatcgacttcctggaggccaagggctacaaggaggtgaagaaggacctgatcatcaagctgcccaagtactccctgttcgagctggagaacggccggaagcggatgctggcctccgccggcgagctgcagaagggcaacgagctggccctgccctccaagtacgtgaacttcctgtacctggcctcccactacgagaagctgaagggctcccccgaggacaacgagcagaagcagctgttcgtggagcagcacaagcactacctggacgagatcatcgagcagatctccgagttctccaagcgggtgatcctggccgacgccaacctggacaaggtgctgtccgcctacaacaagcaccgggacaagcccatccgggagcaggccgagaacatcatccacctgttcaccctgaccaacctgggcgcccccgccgccttcaagtacttcgacaccaccatcgaccggaagcggtacacctccaccaaggaggtgctggacgccaccctgatccaccagtccatcaccggcctgtacgagacccggatcgacctgtcccagctgggcggcgactccggcggctcccggggcaagtgcctgtcctacgacaccgagatcctgaccgtggagtacggcttcctgcccatcggcaagatcgtggaggagcggatcgagtgcaccgtgtacaccgtggacaagaacggcttcgtgtacacccagcccatcgcccagtggcacaaccgcggcgagcaggaggtgttcgagtactgcctggaggacggctccatcatccgcgccaccaaggaccacaagttcatgaccaccgacggccagatgctgcccatcgacgagatcttcgagcgcggcctggacctgaagcaggtggacggcctgccctag

SEQ ID NO: 1379 - protein, 1476 aa, synthetic construct
  REGION 1..1476: note = Synthetic
MDKKYSIGLDIGTNSVGWAVITDEYKVPSKKFKVLGNTDRHSIKKNLIGALLFDSGETAEATRLKRTARRRYTRRKNRICYLQEIFSNEMAKVDDSFFHRLEESFLVEEDKKHERHPIFGNIVDEVAYHEKYPTIYHLRKKLVDSTDKADLRLIYLALAHMIKFRGHFLIEGDLNPDNSDVDKLFIQLVQTYNQLFEENPINASGVDAKAILSARLSKSRRLENLIAQLPGEKKNGLFGNLIALSLGLTPNFKSNFDLAEDAKLQLSKDTYDDDLDNLLAQIGDQYADLFLAAKNLSDAILLSDILRVNTEITKAPLSASMIKRYDEHHQDLTLLKALVRQQLPEKYKEIFFDQSKNGYAGYIDGGASQEEFYKFIKPILEKMDGTEELLVKLNREDLLRKQRTFDNGSIPHQIHLGELHAILRRQEDFYPFLKDNREKIEKILTFRIPYYVGPLARGNSRFAWMTRKSEETITPWNFEEVVDKGASAQSFIERMTNFDKNLPNEKVLPKHSLLYEYFTVYNELTKVKYVTEGMRKPAFLSGEQKKAIVDLLFKTNRKVTVKQLKEDYFKKIECFDSVEISGVEDRFNASLGTYHDLLKIIKDKDFLDNEENEDILEDIVLTLTLFEDREMIEERLKTYAHLFDDKVMKQLKRRRYTGWGRLSRKLINGIRDKQSGKTILDFLKSDGFANRNFMQLIHDDSLTFKEDIQKAQVSGQGDSLHEHIANLAGSPAIKKGILQTVKVVDELVKVMGRHKPENIVIEMARENQTTQKGQKNSRERMKRIEEGIKELGSQILKEHPVENTQLQNEKLYLYYLQNGRDMYVDQELDINRLSDYDVDAIVPQSFLKDDSIDNKVLTRSDKNRGKSDNVPSEEVVKKMKNYWRQLLNAKLITQRKFDNLTKAERGGLSELDKAGFIKRQLVETRQITKHVAQILDSRMNTKYDENDKLIREVKVITLKSKLVSDFRKDFQFYKVREINNYHHAHDAYLNAVVGTALIKKYPKLESEFVYGDYKVYDVRKMIAKSEQEIGKATAKYFFYSNIMNFFKTEITLANGEIRKRPLIETNGETGEIVWDKGRDFATVRKVLSMPQVNIVKKTEVQTGGFSKESILPKRNSDKLIARKKDWDPKKYGGFDSPTVAYSVLVVAKVEKGKSKKLKSVKELLGITIMERSSFEKNPIDFLEAKGYKEVKKDLIIKLPKYSLFELENGRKRMLASAGELQKGNELALPSKYVNFLYLASHYEKLKGSPEDNEQKQLFVEQHKHYLDEIIEQISEFSKRVILADANLDKVLSAYNKHRDKPIREQAENIIHLFTLTNLGAPAAFKYFDTTIDRKRYTSTKEVLDATLIHQSITGLYETRIDLSQLGGDSGGSRGKCLSYDTEILTVEYGFLPIGKIVEERIECTVYTVDKNGFVYTQPIAQWHNRGEQEVFEYCLEDGSIIRATKDHKFMTTDGQMLPIDEIFERGLDLKQVDGLP

SEQ ID NO: 1380 - RNA, 3490 nt, synthetic construct
  misc_feature 1..3490: note = Synthetic
  source 1..3490: mol_type = other RNA
gggaagctcagaataaacgctcaactttggccggatctgccaccatgggcgtgaagatcatctcccgcaagtccctgggcacccagaacgtgtacgacatcggcgtggagaaggaccacaacttcctgctgaagaacggcctggtggcctccaactgcttcaactccggcggctccaagcggaccgccgacggctccgagttcgagtcccccaagaagaagcggaaggtgtccggcggctcctccggcggctccatgaagatcgccgtggtggacaaggccctgaacaacacccggtacgacaagcacttccagctgtacggcgaggaggtggacgtgttccacatgtgcaacgagaagctgtccggccggctgctgaagaagcacatcaccatcggcacccccgagaaccccttcgaccccaacgactacgacttcgtgatcctggtgggcgccgagcccttcctgtacttcgccggcaagaagggcatcggcgactacaccggcaagcgggtggagtacaacggctacgccaactggatcgcctccatctcccccgcccagctgcacttcaagcccgagatgaagcccgtgttcgacgccaccgtggagaacatccacgacatcatcaacggccgggagaagatcgccaaggccggcgactaccggcccatcaccgaccccgacgaggccgaggagtacatcaagatggtgtacaacatggtgatcggccccgtggccttcgcctccgccacctccgccctgtactgccgggacggctacctgctgggcgtgtccatctcccaccaggagtaccagggcgtgtacatcgactccgactgcctgaccgaggtggccgtgtactacctgcagaagatcctggactccgagaaccacaccatcgtgttccacaacctgaagttcgacatgcacttctacaagtaccacctgggcctgaccttcgacaaggcccacaaggagcggcggctgcacgacaccatgctgcagcactacgtgctggacgagcggcggggcacccacggcctgaagtccctggccatgaagtacaccgacatgggcgactacgacttcgagctggacaagttcaaggacgactactgcaaggcccacaagatcaagaaggaggacttcacctacgacctgatccccttcgacatcatgtggccctacgccgccaaggacaccgacgccaccatccggctgcacaacttcttcctgcccaagatcgagaagaacgagaagctgtgctccctgtactacgacgtgctgatgcccggctgcgtgttcctgcagcgggtggaggaccggggcgtgcccatctccatcgaccggctgaaggaggcccagtaccagctgacccacaacctgaacaaggcccgggagaagctgtacacctaccccgaggtgaagcagctggagcaggaccagaacgaggccttcaaccccaactccgtgaagcagctgcgggtgctgctgttcgactacgtgggcctgacccccaccggcaagctgaccgacaccggcgccgactccaccgacgccgaggccctgaacgagctggccacccagcaccccatcgccaagaccctgctggagatccggaagctgaccaagctgatctccacctacgtggagaagatcctgctgtccatcgacgccgacggctgcatccggaccggcttccacgagcacatgaccacctccggccggctgtcctcctccggcaagctgaacctgcagcagctgccccgggacgagtccatcatcaagggctgcgtggtggccccccccggctaccgggtgatcgcctgggacctgaccaccgccgaggtgtactacgccgccgtgctgtccggcgaccggaacatgcagcaggtgttcatcaacatgcggaacgagcccgacaagtaccccgacttccactccaacatcgcccacatggtgttcaagctgcagtgcgagccccgggacgtgaagaagctgttccccgccctgcggcaggccgccaaggccatcaccttcggcatcctgtacggctccggccccgccaaggtggcccactccgtgaacgaggccctgctggagcaggccgccaagaccggcgagcccttcgtggagtgcaccgtggccgacgccaaggagtacatcgagacctacttcggccagttcccccagctgaagcggtggatcgacaagtgccacgaccagatcaagaaccacggcttcatctactcccacttcggccggaagcggcggctgcacaacatccactccgaggaccggggcgtgcagggcgaggagatccggtccggcttcaacgccatcatccagtccgcctcctccgactccctgctgctgggcgccgtggacgccgacaacgagatcatctccctgggcctggagcaggagatgaagatcgtgatgctggtgcacgactccgtggtggccatcgtgcgggaggacctgatcgaccagtacaacgagatcctgatccggaacatccagaaggaccggggcatctccatccccggctgccccatcggcatcgactccgactccgaggccggcggctcccgggactactcctgcggcaagatgaagaagcagcacccctccatcgcctgcatcgacgacgacgagtacacccggtacgtgaagggcgtgctgctggacgccgagttcgagtacaagaagctggccgccatggacaaggagcaccccgaccactccaagtacaaggacgacaagttcatcgccgtgtgcaaggacctggacaacgtgaagcggatcctgggcgccggcggcggctccggcaagcggaccgccgacggctccggcggcggctcccccaagaagaagcggaaggtgcccgccgccaagcgcgtgaagctggactccgagtccgccacccccgagtccgtgtccggctggcggctgttcaagaagatctcctagctagcaccagcctcaagaacacccgaatggagtctctaagctacataataccaacttacactttacaaaatgttgtcccccaaaatgtagccattcgtatctgctcctaataaaaagaaagtttcttcacattctctcgagaaaaaaaaaaaatggaaaaaaaaaaaacggaaaaaaaaaaaaggtaaaaaaaaaaaatataaaaaaaaaaaacataaaaaaaaaaaacgaaaaaaaaaaaacgtaaaaaaaaaaaactcaaaaaaaaaaaagataaaaaaaaaaaacctaaaaaaaaaaaatgtaaaaaaaaaaaagggaaaaaaaaaaaacgcaaaaaaaaaaaacacaaaaaaaaaaaatgcaaaaaaaaaaaatcgaaaaaaaaaaaatctaaaaaaaaaaaacgaaaaaaaaaaaacccaaaaaaaaaaaagacaaaaaaaaaaaatagaaaaaaaaaaagttaaaaaaaaaaaactgaaaaaaaaaaaatttaaaaaaaaaaaatctag

SEQ ID NO: 1381 - DNA, 2931 bp, synthetic construct
  misc_feature 1..2931: note = Synthetic
  source 1..2931: mol_type = other DNA
atgggcgtgaagatcatctcccgcaagtccctgggcacccagaacgtgtacgacatcggcgtggagaaggaccacaacttcctgctgaagaacggcctggtggcctccaactgcttcaactccggcggctccaagcggaccgccgacggctccgagttcgagtcccccaagaagaagcggaaggtgtccggcggctcctccggcggctccatgaagatcgccgtggtggacaaggccctgaacaacacccggtacgacaagcacttccagctgtacggcgaggaggtggacgtgttccacatgtgcaacgagaagctgtccggccggctgctgaagaagcacatcaccatcggcacccccgagaaccccttcgaccccaacgactacgacttcgtgatcctggtgggcgccgagcccttcctgtacttcgccggcaagaagggcatcggcgactacaccggcaagcgggtggagtacaacggctacgccaactggatcgcctccatctcccccgcccagctgcacttcaagcccgagatgaagcccgtgttcgacgccaccgtggagaacatccacgacatcatcaacggccgggagaagatcgccaaggccggcgactaccggcccatcaccgaccccgacgaggccgaggagtacatcaagatggtgtacaacatggtgatcggccccgtggccttcgcctccgccacctccgccctgtactgccgggacggctacctgctgggcgtgtccatctcccaccaggagtaccagggcgtgtacatcgactccgactgcctgaccgaggtggccgtgtactacctgcagaagatcctggactccgagaaccacaccatcgtgttccacaacctgaagttcgacatgcacttctacaagtaccacctgggcctgaccttcgacaaggcccacaaggagcggcggctgcacgacaccatgctgcagcactacgtgctggacgagcggcggggcacccacggcctgaagtccctggccatgaagtacaccgacatgggcgactacgacttcgagctggacaagttcaaggacgactactgcaaggcccacaagatcaagaaggaggacttcacctacgacctgatccccttcgacatcatgtggccctacgccgccaaggacaccgacgccaccatccggctgcacaacttcttcctgcccaagatcgagaagaacgagaagctgtgctccctgtactacgacgtgctgatgcccggctgcgtgttcctgcagcgggtggaggaccggggcgtgcccatctccatcgaccggctgaaggaggcccagtaccagctgacccacaacctgaacaaggcccgggagaagctgtacacctaccccgaggtgaagcagctggagcaggaccagaacgaggccttcaaccccaactccgtgaagcagctgcgggtgctgctgttcgactacgtgggcctgacccccaccggcaagctgaccgacaccggcgccgactccaccgacgccgaggccctgaacgagctggccacccagcaccccatcgccaagaccctgctggagatccggaagctgaccaagctgatctccacctacgtggagaagatcctgctgtccatcgacgccgacggctgcatccggaccggcttccacgagcacatgaccacctccggccggctgtcctcctccggcaagctgaacctgcagcagctgccccgggacgagtccatcatcaagggctgcgtggtggccccccccggctaccgggtgatcgcctgggacctgaccaccgccgaggtgtactacgccgccgtgctgtccggcgaccggaacatgcagcaggtgttcatcaacatgcggaacgagcccgacaagtaccccgacttccactccaacatcgcccacatggtgttcaagctgcagtgcgagccccgggacgtgaagaagctgttccccgccctgcggcaggccgccaaggccatcaccttcggcatcctgtacggctccggccccgccaaggtggcccactccgtgaacgaggccctgctggagcaggccgccaagaccggcgagcccttcgtggagtgcaccgtggccgacgccaaggagtacatcgagacctacttcggccagttcccccagctgaagcggtggatcgacaagtgccacgaccagatcaagaaccacggcttcatctactcccacttcggccggaagcggcggctgcacaacatccactccgaggaccggggcgtgcagggcgaggagatccggtccggcttcaacgccatcatccagtccgcctcctccgactccctgctgctgggcgccgtggacgccgacaacgagatcatctccctgggcctggagcaggagatgaagatcgtgatgctggtgcacgactccgtggtggccatcgtgcgggaggacctgatcgaccagtacaacgagatcctgatccggaacatccagaaggaccggggcatctccatccccggctgccccatcggcatcgactccgactccgaggccggcggctcccgggactactcctgcggcaagatgaagaagcagcacccctccatcgcctgcatcgacgacgacgagtacacccggtacgtgaagggcgtgctgctggacgccgagttcgagtacaagaagctggccgccatggacaaggagcaccccgaccactccaagtacaaggacgacaagttcatcgccgtgtgcaaggacctggacaacgtgaagcggatcctgggcgccggcggcggctccggcaagcggaccgccgacggctccggcggcggctcccccaagaagaagcggaaggtgcccgccgccaagcgcgtgaagctggactccgagtccgccacccccgagtccgtgtccggctggcggctgttcaagaagatctcctag

SEQ ID NO: 1382 - protein, 976 aa, synthetic construct
  REGION 1..976: note = Synthetic
MGVKIISRKSLGTQNVYDIGVEKDHNFLLKNGLVASNCFNSGGSKRTADGSEFESPKKKRKVSGGSSGGSMKIAVVDKALNNTRYDKHFQLYGEEVDVFHMCNEKLSGRLLKKHITIGTPENPFDPNDYDFVILVGAEPFLYFAGKKGIGDYTGKRVEYNGYANWIASISPAQLHFKPEMKPVFDATVENIHDIINGREKIAKAGDYRPITDPDEAEEYIKMVYNMVIGPVAFASATSALYCRDGYLLGVSISHQEYQGVYIDSDCLTEVAVYYLQKILDSENHTIVFHNLKFDMHFYKYHLGLTFDKAHKERRLHDTMLQHYVLDERRGTHGLKSLAMKYTDMGDYDFELDKFKDDYCKAHKIKKEDFTYDLIPFDIMWPYAAKDTDATIRLHNFFLPKIEKNEKLCSLYYDVLMPGCVFLQRVEDRGVPISIDRLKEAQYQLTHNLNKAREKLYTYPEVKQLEQDQNEAFNPNSVKQLRVLLFDYVGLTPTGKLTDTGADSTDAEALNELATQHPIAKTLLEIRKLTKLISTYVEKILLSIDADGCIRTGFHEHMTTSGRLSSSGKLNLQQLPRDESIIKGCVVAPPGYRVIAWDLTTAEVYYAAVLSGDRNMQQVFINMRNEPDKYPDFHSNIAHMVFKLQCEPRDVKKLFPALRQAAKAITFGILYGSGPAKVAHSVNEALLEQAAKTGEPFVECTVADAKEYIETYFGQFPQLKRWIDKCHDQIKNHGFIYSHFGRKRRLHNIHSEDRGVQGEEIRSGFNAIIQSASSDSLLLGAVDADNEIISLGLEQEMKIVMLVHDSVVAIVREDLIDQYNEILIRNIQKDRGISIPGCPIGIDSDSEAGGSRDYSCGKMKKQHPSIACIDDDEYTRYVKGVLLDAEFEYKKLAAMDKEHPDHSKYKDDKFIAVCKDLDNVKRILGAGGGSGKRTADGSGGGSPKKKRKVPAAKRVKLDSESATPESVSGWRLFKKIS

SEQ ID NO: 1383 - RNA, 2503 nt, synthetic construct
  misc_feature 1..2503: note = Synthetic
  source 1..2503: mol_type = other RNA
gggaagctcagaataaacgctcaactttggccggatctgccaccatgggcgtgaagatcatctcccgcaagtccctgggcacccagaacgtgtacgacatcggcgtggagaaggaccacaacttcctgctgaagaacggcctggtggcctccaactgcttcaactccggcggctccaagcggaccgccgacggctccgagttcgagtcccccaagaagaagcggaaggtgtccggcggctcctccggcggctccatggactccaccaaggagaagtgcgactcctacaaggacgacctgctgctgcggatgggcctgaacgacaacaaggccggcatggagggcctggacaaggagaagatcaacaagatcatcatggaggccaccaagggctcccggttctacggcaacgagctgaagaaggagaagcaggtgaaccagcggatcgagaacatgatgcagcagaaggcccagatcacctcccagcagctgcggaaggcccagctgcaggtggaccggttcgccatggagctggagcagtcccggaacctgtccaacaccatcgtgcacatcgacatggacgccttctacgccgccgtggagatgcgggacaaccccgagctgaaggacaagcccatcgccgtgggctccatgtccatgctgtccacctccaactaccacgcccggcggttcggcgtgcgggccgccatgcccggcttcatcgccaagcggctgtgcccccagctgatcatcgtgccccccaacttcgacaagtaccgggccgtgtccaaggaggtgaaggagatcctggccgactacgaccccaacttcatggccatgtccctggacgaggcctacctgaacatcaccaagcacctggaggagcggcagaactggcccgaggacaagcggcggtacttcatcaagatgggctcctccgtggagaacgacaaccccggcaaggaggtgaacaagctgtccgagcacgagcggtccatctcccccctgctgttcgaggagtccccctccgacgtgcagccccccggcgaccccttccaggtgaacttcgaggagcagaacaacccccagatcctgcagaactccgtggtgttcggcacctccgcccaggaggtggtgaaggagatccggttccggatcgagcagaagaccaccctgaccgcctccgccggcatcgcccccaacaccatgctggccaaggtgtgctccgacaagaacaagcccaacggccagtaccagatcctgcccaaccggcaggccgtgatggacttcatcaaggacctgcccatccggaaggtgtccggcatcggcaaggtgaccgagaagatgctgaaggccctgggcatcatcacctgcaccgagctgtaccagcagcgggccctgctgtccctgctgttctccgagacctcctggcactacttcctgcacatctccctgggcctgggctccacccacctgacccgggaccgggtgcggaagtccatgtccgtggagcggaccttctccgagatcaacaaggccgaggagcagtactccctgtgccaggagctgtgctccgagctggcccaggacctgcagaaggagcggctgaagggccggaccgtgaccatcaagctgaagaacgtgaacttcgaggtgaagacccgggcctccaccgtgtcctccgtggtgtccaccgccgaggagatcttcgccatcgccaaggagctgctgaagaccgagatcgacgccgacttcccccaccccctgcggctgcggctgatgggcgtgcggatctcctccttccccaacgaggaggaccggaagcaccagcagggcggcggctccggcaagcggaccgccgacggctccggcggcggctcccccaagaagaagcggaaggtgcccgccgccaagcgcgtgaagctggactccgagtccgccacccccgagtccgtgtccggctggcggctgttcaagaagatctcctagctagcaccagcctcaagaacacccgaatggagtctctaagctacataataccaacttacactttacaaaatgttgtcccccaaaatgtagccattcgtatctgctcctaataaaaagaaagtttcttcacattctctcgagaaaaaaaaaaaatggaaaaaaaaaaaacggaaaaaaaaaaaaggtaaaaaaaaaaaatataaaaaaaaaaaacataaaaaaaaaaaacgaaaaaaaaaaaacgtaaaaaaaaaaaactcaaaaaaaaaaaagataaaaaaaaaaaacctaaaaaaaaaaaatgtaaaaaaaaaaaagggaaaaaaaaaaaacgcaaaaaaaaaaaacacaaaaaaaaaaaatgcaaaaaaaaaaaatcgaaaaaaaaaaaatctaaaaaaaaaaaacgaaaaaaaaaaaacccaaaaaaaaaaaagacaaaaaaaaaaaatagaaaaaaaaaaagttaaaaaaaaaaaactgaaaaaaaaaaaatttaaaaaaaaaaaatctag

SEQ ID NO: 1384 - DNA, 1944 bp, synthetic construct
  misc_feature 1..1944: note = Synthetic
  source 1..1944: mol_type = other DNA
atgggcgtgaagatcatctcccgcaagtccctgggcacccagaacgtgtacgacatcggcgtggagaaggaccacaacttcctgctgaagaacggcctggtggcctccaactgcttcaactccggcggctccaagcggaccgccgacggctccgagttcgagtcccccaagaagaagcggaaggtgtccggcggctcctccggcggctccatggactccaccaaggagaagtgcgactcctacaaggacgacctgctgctgcggatgggcctgaacgacaacaaggccggcatggagggcctggacaaggagaagatcaacaagatcatcatggaggccaccaagggctcccggttctacggcaacgagctgaagaaggagaagcaggtgaaccagcggatcgagaacatgatgcagcagaaggcccagatcacctcccagcagctgcggaaggcccagctgcaggtggaccggttcgccatggagctggagcagtcccggaacctgtccaacaccatcgtgcacatcgacatggacgccttctacgccgccgtggagatgcgggacaaccccgagctgaaggacaagcccatcgccgtgggctccatgtccatgctgtccacctccaactaccacgcccggcggttcggcgtgcgggccgccatgcccggcttcatcgccaagcggctgtgcccccagctgatcatcgtgccccccaacttcgacaagtaccgggccgtgtccaaggaggtgaaggagatcctggccgactacgaccccaacttcatggccatgtccctggacgaggcctacctgaacatcaccaagcacctggaggagcggcagaactggcccgaggacaagcggcggtacttcatcaagatgggctcctccgtggagaacgacaaccccggcaaggaggtgaacaagctgtccgagcacgagcggtccatctcccccctgctgttcgaggagtccccctccgacgtgcagccccccggcgaccccttccaggtgaacttcgaggagcagaacaacccccagatcctgcagaactccgtggtgttcggcacctccgcccaggaggtggtgaaggagatccggttccggatcgagcagaagaccaccctgaccgcctccgccggcatcgcccccaacaccatgctggccaaggtgtgctccgacaagaacaagcccaacggccagtaccagatcctgcccaaccggcaggccgtgatggacttcatcaaggacctgcccatccggaaggtgtccggcatcggcaaggtgaccgagaagatgctgaaggccctgggcatcatcacctgcaccgagctgtaccagcagcgggccctgctgtccctgctgttctccgagacctcctggcactacttcctgcacatctccctgggcctgggctccacccacctgacccgggaccgggtgcggaagtccatgtccgtggagcggaccttctccgagatcaacaaggccgaggagcagtactccctgtgccaggagctgtgctccgagctggcccaggacctgcagaaggagcggctgaagggccggaccgtgaccatcaagctgaagaacgtgaacttcgaggtgaagacccgggcctccaccgtgtcctccgtggtgtccaccgccgaggagatcttcgccatcgccaaggagctgctgaagaccgagatcgacgccgacttcccccaccccctgcggctgcggctgatgggcgtgcggatctcctccttccccaacgaggaggaccggaagcaccagcagggcggcggctccggcaagcggaccgccgacggctccggcggcggctcccccaagaagaagcggaaggtgcccgccgccaagcgcgtgaagctggactccgagtccgccacccccgagtccgtgtccggctggcggctgttcaagaagatctcctag

SEQ ID NO: 1385 - protein, 647 aa, synthetic construct
  REGION 1..647: note = Synthetic
MGVKIISRKSLGTQNVYDIGVEKDHNFLLKNGLVASNCFNSGGSKRTADGSEFESPKKKRKVSGGSSGGSMDSTKEKCDSYKDDLLLRMGLNDNKAGMEGLDKEKINKIIMEATKGSRFYGNELKKEKQVNQRIENMMQQKAQITSQQLRKAQLQVDRFAMELEQSRNLSNTIVHIDMDAFYAAVEMRDNPELKDKPIAVGSMSMLSTSNYHARRFGVRAAMPGFIAKRLCPQLIIVPPNFDKYRAVSKEVKEILADYDPNFMAMSLDEAYLNITKHLEERQNWPEDKRRYFIKMGSSVENDNPGKEVNKLSEHERSISPLLFEESPSDVQPPGDPFQVNFEEQNNPQILQNSVVFGTSAQEVVKEIRFRIEQKTTLTASAGIAPNTMLAKVCSDKNKPNGQYQILPNRQAVMDFIKDLPIRKVSGIGKVTEKMLKALGIITCTELYQQRALLSLLFSETSWHYFLHISLGLGSTHLTRDRVRKSMSVERTFSEINKAEEQYSLCQELCSELAQDLQKERLKGRTVTIKLKNVNFEVKTRASTVSSVVSTAEEIFAIAKELLKTEIDADFPHPLRLRLMGVRISSFPNEEDRKHQQGGGSGKRTADGSGGGSPKKKRKVPAAKRVKLDSESATPESVSGWRLFKKIS

SEQ ID NO: 1386 - RNA, 6641 nt, synthetic construct
  misc_feature 1..6641: note = Synthetic
  source 1..6641: mol_type = other RNA
aggactcactatttgttttcgcgcccagttgcaaaaagtgtcgaagctcagaataaacgctcaactttggccggatctgccaccatgggcaagcggaccgccgacggctccgagttcgagtcccccaagaagaagcggaaggtggacaagaagtactccatcggcctggacatcggcaccaactccgtgggctgggccgtgatcaccgacgagtacaaggtgccctccaagaagttcaaggtgctgggcaacaccgaccggcactccatcaagaagaacctgatcggcgccctgctgttcgactccggcgagaccgccgaggccacccggctgaagcggaccgcccggcggcggtacacccggcggaagaaccggatctgctacctgcaggagatcttctccaacgagatggccaaggtggacgactccttcttccaccggctggaggagtccttcctggtggaggaggacaagaagcacgagcggcaccccatcttcggcaacatcgtggacgaggtggcctaccacgagaagtaccccaccatctaccacctgcggaagaagctggtggactccaccgacaaggccgacctgcggctgatctacctggccctggcccacatgatcaagttccggggccacttcctgatcgagggcgacctgaaccccgacaactccgacgtggacaagctgttcatccagctggtgcagacctacaaccagctgttcgaggagaaccccatcaacgcctccggcgtggacgccaaggccatcctgtccgcccggctgtccaagtcccggcggctggagaacctgatcgcccagctgcccggcgagaagaagaacggcctgttcggcaacctgatcgccctgtccctgggcctgacccccaacttcaagtccaacttcgacctggccgaggacgccaagctgcagctgtccaaggacacctacgacgacgacctggacaacctgctggcccagatcggcgaccagtacgccgacctgttcctggccgccaagaacctgtccgacgccatcctgctgtccgacatcctgcgggtgaacaccgagatcaccaaggcccccctgtccgcctccatgatcaagcggtacgacgagcaccaccaggacctgaccctgctgaaggccctggtgcggcagcagctgcccgagaagtacaaggagatcttcttcgaccagtccaagaacggctacgccggctacatcgacggcggcgcctcccaggaggagttctacaagttcatcaagcccatcctggagaagatggacggcaccgaggagctgctggtgaagctgaaccgggaggacctgctgcggaagcagcggaccttcgacaacggctccatcccccaccagatccacctgggcgagctgcacgccatcctgcggcggcaggaggacttctaccccttcctgaaggacaaccgggagaagatcgagaagatcctgaccttccggatcccctactacgtgggccccctggcccggggcaactcccggttcgcctggatgacccggaagtccgaggagaccatcaccccctggaacttcgaggaggtggtggacaagggcgcctccgcccagtccttcatcgagcggatgaccaacttcgacaagaacctgcccaacgagaaggtgctgcccaagcactccctgctgtacgagtacttcaccgtgtacaacgagctgaccaaggtgaagtacgtgaccgagggcatgcggaagcccgccttcctgtccggcgagcagaagaaggccatcgtggacctgctgttcaagaccaaccggaaggtgaccgtgaagcagctgaaggaggactacttcaagaagatcgagtgcttcgactccgtggagatctccggcgtggaggaccggttcaacgcctccctgggcacctaccacgacctgctgaagatcatcaaggacaaggacttcctggacaacgaggagaacgaggacatcctggaggacatcgtgctgaccctgaccctgttcgaggaccgggagatgatcgaggagcggctgaagacctacgcccacctgttcgacgacaaggtgatgaagcagctgaagcggcggcggtacaccggctggggccggctgtcccggaagctgatcaacggcatccgggacaagcagtccggcaagaccatcctggacttcctgaagtccgacggcttcgccaaccggaacttcatgcagctgatccacgacgactccctgaccttcaaggaggacatccagaaggcccaggtgtccggccagggcgactccctgcacgagcacatcgccaacctggccggctcccccgccatcaagaagggcatcctgcagaccgtgaaggtggtggacgagctggtgaaggtgatgggccggcacaagcccgagaacatcgtgatcgagatggcccgggagaaccagaccacccagaagggccagaagaactcccgggagcggatgaagcggatcgaggagggcatcaaggagctgggctcccagatcctgaaggagcaccccgtggagaacacccagctgcagaacgagaagctgtacctgtactacctgcagaacggccgggacatgtacgtggaccaggagctggacatcaaccggctgtccgactacgacgtggacgccatcgtgccccagtccttcctgaaggacgactccatcgacaacaaggtgctgacccggtccgacaagaaccggggcaagtccgacaacgtgccctccgaggaggtggtgaagaagatgaagaactactggcggcagctgctgaacgccaagctgatcacccagcggaagttcgacaacctgaccaaggccgagcggggcggcctgtccgagctggacaaggccggcttcatcaagcggcagctggtggagacccggcagatcaccaagcacgtggcccagatcctggactcccggatgaacaccaagtacgacgagaacgacaagctgatccgggaggtgaaggtgatcaccctgaagtccaagctggtgtccgacttccggaaggacttccagttctacaaggtgcgggagatcaacaactaccaccacgcccacgacgcctacctgaacgccgtggtgggcaccgccctgatcaagaagtaccccaagctggagtccgagttcgtgtacggcgactacaaggtgtacgacgtgcggaagatgatcgccaagtccgagcaggagatcggcaaggccaccgccaagtacttcttctactccaacatcatgaacttcttcaagaccgagatcaccctggccaacggcgagatccggaagcggcccctgatcgagaccaacggcgagaccggcgagatcgtgtgggacaagggccgggacttcgccaccgtgcggaaggtgctgtccatgccccaggtgaacatcgtgaagaagaccgaggtgcagaccggcggcttctccaaggagtccatcctgcccaagcggaactccgacaagctgatcgcccggaagaaggactgggaccccaagaagtacggcggcttcgactcccccaccgtggcctactccgtgctggtggtggccaaggtggagaagggcaagtccaagaagctgaagtccgtgaaggagctgctgggcatcaccatcatggagcggtcctccttcgagaagaaccccatcgacttcctggaggccaagggctacaaggaggtgaagaaggacctgatcatcaagctgcccaagtactccctgttcgagctggagaacggccggaagcggatgctggcctccgccggcgagctgcagaagggcaacgagctggccctgccctccaagtacgtgaacttcctgtacctggcctcccactacgagaagctgaagggctcccccgaggacaacgagcagaagcagctgttcgtggagcagcacaagcactacctggacgagatcatcgagcagatctccgagttctccaagcgggtgatcctggccgacgccaacctggacaaggtgctgtccgcctacaacaagcaccgggacaagcccatccgggagcaggccgagaacatcatccacctgttcaccctgaccaacctgggcgcccccgccgccttcaagtacttcgacaccaccatcgaccggaagcggtacacctccaccaaggaggtgctggacgccaccctgatccaccagtccatcaccggcctgtacgagacccggatcgacctgtcccagctgggcggcgactccggcggctcctccggcggctccaagcggaccgccgacggctccgagttcgagtcccccaagaagaagcggaaggtgtccggcggctcctccggcggctccatggactccaccaaggagaagtgcgactcctacaaggacgacctgctgctgcggatgggcctgaacgacaacaaggccggcatggagggcctggacaaggagaagatcaacaagatcatcatggaggccaccaagggctcccggttctacggcaacgagctgaagaaggagaagcaggtgaaccagcggatcgagaacatgatgcagcagaaggcccagatcacctcccagcagctgcggaaggcccagctgcaggtggaccggttcgccatggagctggagcagtcccggaacctgtccaacaccatcgtgcacatcgacatggacgccttctacgccgccgtggagatgcgggacaaccccgagctgaaggacaagcccatcgccgtgggctccatgtccatgctgtccacctccaactaccacgcccggcggttcggcgtgcgggccgccatgcccggcttcatcgccaagcggctgtgcccccagctgatcatcgtgccccccaacttcgacaagtaccgggccgtgtccaaggaggtgaaggagatcctggccgactacgaccccaacttcatggccatgtccctggacgaggcctacctgaacatcaccaagcacctggaggagcggcagaactggcccgaggacaagcggcggtacttcatcaagatgggctcctccgtggagaacgacaaccccggcaaggaggtgaacaagctgtccgagcacgagcggtccatctcccccctgctgttcgaggagtccccctccgacgtgcagccccccggcgaccccttccaggtgaacttcgaggagcagaacaacccccagatcctgcagaactccgtggtgttcggcacctccgcccaggaggtggtgaaggagatccggttccggatcgagcagaagaccaccctgaccgcctccgccggcatcgcccccaacaccatgctggccaaggtgtgctccgacaagaacaagcccaacggccagtaccagatcctgcccaaccggcaggccgtgatggacttcatcaaggacctgcccatccggaaggtgtccggcatcggcaaggtgaccgagaagatgctgaaggccctgggcatcatcacctgcaccgagctgtaccagcagcgggccctgctgtccctgctgttctccgagacctcctggcactacttcctgcacatctccctgggcctgggctccacccacctgacccgggaccgggtgcggaagtccatgtccgtggagcggaccttctccgagatcaacaaggccgaggagcagtactccctgtgccaggagctgtgctccgagctggcccaggacctgcagaaggagcggctgaagggccggaccgtgaccatcaagctgaagaacgtgaacttcgaggtgaagacccgggcctccaccgtgtcctccgtggtgtccaccgccgaggagatcttcgccatcgccaaggagctgctgaagaccgagatcgacgccgacttcccccaccccctgcggctgcggctgatgggcgtgcggatctcctccttccccaacgaggaggaccggaagcaccagcagtccggctccgagacccccggcacctccgagtccgccacccccgagtcccccaagaagaagcggaaggtgtccggctccgagacccccggcacctccgagtccgccacccccgagtccatcgccgccctggagaaggagatcgccgccctggagaaggagaacgccgccctggagtgggagatcgccgccctggagaagtagctagcaccagcctcaagaacacccgaatggagtctctaagctacataataccaacttacactttacaaaatgttgtcccccaaaatgtagccattcgtatctgctcctaataaaaagaaagtttcttcacattctctcgagaaaaaaaaaaaatggaaaaaaaaaaaacggaaaaaaaaaaaaggtaaaaaaaaaaaatataaaaaaaaaaaacataaaaaaaaaaaacgaaaaaaaaaaaacgtaaaaaaaaaaaactcaaaaaaaaaaaagataaaaaaaaaaaacctaaaaaaaaaaaatgtaaaaaaaaaaaagggaaaaaaaaaaaacgcaaaaaaaaaaaacacaaaaaaaaaaaatgcaaaaaaaaaaaatcgaaaaaaaaaaaatctaaaaaaaaaaaacgaaaaaaaaaaaacccaaaaaaaaaaaagacaaaaaaaaaaaatagaaaaaaaaaaagttaaaaaaaaaaaactgaaaaaaaaaaaatttaaaaaaaaaaaatctag

SEQ ID NO: 1387 - DNA, 6042 bp, synthetic construct
  misc_feature 1..6042: note = Synthetic
  source 1..6042: mol_type = other DNA
atgggcaagcggaccgccgacggctccgagttcgagtcccccaagaagaagcggaaggtggacaagaagtactccatcggcctggacatcggcaccaactccgtgggctgggccgtgatcaccgacgagtacaaggtgccctccaagaagttcaaggtgctgggcaacaccgaccggcactccatcaagaagaacctgatcggcgccctgctgttcgactccggcgagaccgccgaggccacccggctgaagcggaccgcccggcggcggtacacccggcggaagaaccggatctgctacctgcaggagatcttctccaacgagatggccaaggtggacgactccttcttccaccggctggaggagtccttcctggtggaggaggacaagaagcacgagcggcaccccatcttcggcaacatcgtggacgaggtggcctaccacgagaagtaccccaccatctaccacctgcggaagaagctggtggactccaccgacaaggccgacctgcggctgatctacctggccctggcccacatgatcaagttccggggccacttcctgatcgagggcgacctgaaccccgacaactccgacgtggacaagctgttcatccagctggtgcagacctacaaccagctgttcgaggagaaccccatcaacgcctccggcgtggacgccaaggccatcctgtccgcccggctgtccaagtcccggcggctggagaacctgatcgcccagctgcccggcgagaagaagaacggcctgttcggcaacctgatcgccctgtccctgggcctgacccccaacttcaagtccaacttcgacctggccgaggacgccaagctgcagctgtccaaggacacctacgacgacgacctggacaacctgctggcccagatcggcgaccagtacgccgacctgttcctggccgccaagaacctgtccgacgccatcctgctgtccgacatcctgcgggtgaacaccgagatcaccaaggcccccctgtccgcctccatgatcaagcggtacgacgagcaccaccaggacctgaccctgctgaaggccctggtgcggcagcagctgcccgagaagtacaaggagatcttcttcgaccagtccaagaacggctacgccggctacatcgacggcggcgcctcccaggaggagttctacaagttcatcaagcccatcctggagaagatggacggcaccgaggagctgctggtgaagctgaaccgggaggacctgctgcggaagcagcggaccttcgacaacggctccatcccccaccagatccacctgggcgagctgcacgccatcctgcggcggcaggaggacttctaccccttcctgaaggacaaccgggagaagatcgagaagatcctgaccttccggatcccctactacgtgggccccctggcccggggcaactcccggttcgcctggatgacccggaagtccgaggagaccatcaccccctggaacttcgaggaggtggtggacaagggcgcctccgcccagtccttcatcgagcggatgaccaacttcgacaagaacctgcccaacgagaaggtgctgcccaagcactccctgctgtacgagtacttcaccgtgtacaacgagctgaccaaggtgaagtacgtgaccgagggcatgcggaagcccgccttcctgtccggcgagcagaagaaggccatcgtggacctgctgttcaagaccaaccggaaggtgaccgtgaagcagctgaaggaggactacttcaagaagatcgagtgcttcgactccgtggagatctccggcgtggaggaccggttcaacgcctccctgggcacctaccacgacctgctgaagatcatcaaggacaaggacttcctggacaacgaggagaacgaggacatcctggaggacatcgtgctgaccctgaccctgttcgaggaccgggagatgatcgaggagcggctgaagacctacgcccacctgttcgacgacaaggtgatgaagcagctgaagcggcggcggtacaccggctggggccggctgtcccggaagctgatcaacggcatccgggacaagcagtccggcaagaccatcctggacttcctgaagtccgacggcttcgccaaccggaacttcatgcagctgatccacgacgactccctgaccttcaaggaggacatccagaaggcccaggtgtccggccagggcgactccctgcacgagcacatcgccaacctggccggctcccccgccatcaagaagggcatcctgcagaccgtgaaggtggtggacgagctggtgaaggtgatgggccggcacaagcccgagaacatcgtgatcgagatggcccgggagaaccagaccacccagaagggccagaagaactcccgggagcggatgaagcggatcgaggagggcatcaaggagctgggctcccagatcctgaaggagcaccccgtggagaacacccagctgcagaacgagaagctgtacctgtactacctgcagaacggccgggacatgtacgtggaccaggagctggacatcaaccggctgtccgactacgacgtggacgccatcgtgccccagtccttcctgaaggacgactccatcgacaacaaggtgctgacccggtccgacaagaaccggggcaagtccgacaacgtgccctccgaggaggtggtgaagaagatgaagaactactggcggcagctgctgaacgccaagctgatcacccagcggaagttcgacaacctgaccaaggccgagcggggcggcctgtccgagctggacaaggccggcttcatcaagcggcagctggtggagacccggcagatcaccaagcacgtggcccagatcctggactcccggatgaacaccaagtacgacgagaacgacaagctgatccgggaggtgaaggtgatcaccctgaagtccaagctggtgtccgacttccggaaggacttccagttctacaaggtgcgggagatcaacaactaccaccacgcccacgacgcctacctgaacgccgtggtgggcaccgccctgatcaagaagtaccccaagctggagtccgagttcgtgtacggcgactacaaggtgtacgacgtgcggaagatgatcgccaagtccgagcaggagatcggcaaggccaccgccaagtacttcttctactccaacatcatgaacttcttcaagaccgagatcaccctggccaacggcgagatccggaagcggcccctgatcgagaccaacggcgagaccggcgagatcgtgtgggacaagggccgggacttcgccaccgtgcggaaggtgctgtccatgccccaggtgaacatcgtgaagaagaccgaggtgcagaccggcggcttctccaaggagtccatcctgcccaagcggaactccgacaagctgatcgcccggaagaaggactgggaccccaagaagtacggcggcttcgactcccccaccgtggcctactccgtgctggtggtggccaaggtggagaagggcaagtccaagaagctgaagtccgtgaaggagctgctgggcatcaccatcatggagcggtcctccttcgagaagaaccccatcgacttcctggaggccaagggctacaaggaggtgaagaaggacctgatcatcaagctgcccaagtactccctgttcgagctggagaacggccggaagcggatgctggcctccgccggcgagctgcagaagggcaacgagctggccctgccctccaagtacgtgaacttcctgtacctggcctcccactacgagaagctgaagggctcccccgaggacaacgagcagaagcagctgttcgtggagcagcacaagcactacctggacgagatcatcgagcagatctccgagttctccaagcgggtgatcctggccgacgccaacctggacaaggtgctgtccgcctacaacaagcaccgggacaagcccatccgggagcaggccgagaacatcatccacctgttcaccctgaccaacctgggcgcccccgccgccttcaagtacttcgacaccaccatcgaccggaagcggtacacctccaccaaggaggtgctggacgccaccctgatccaccagtccatcaccggcctgtacgagacccggatcgacctgtcccagctgggcggcgactccggcggctcctccggcggctccaagcggaccgccgacggctccgagttcgagtcccccaagaagaagcggaaggtgtccggcggctcctccggcggctccatggactccaccaaggagaagtgcgactcctacaaggacgacctgctgctgcggatgggcctgaacgacaacaaggccggcatggagggcctggacaaggagaagatcaacaagatcatcatggaggccaccaagggctcccggttctacggcaacgagctgaagaaggagaagcaggtgaaccagcggatcgagaacatgatgcagcagaaggcccagatcacctcccagcagctgcggaaggcccagctgcaggtggaccggttcgccatggagctggagcagtcccggaacctgtccaacaccatcgtgcacatcgacatggacgccttctacgccgccgtggagatgcgggacaaccccgagctgaaggacaagcccatcgccgtgggctccatgtccatgctgtccacctccaactaccacgcccggcggttcggcgtgcgggccgccatgcccggcttcatcgccaagcggctgtgcccccagctgatcatcgtgccccccaacttcgacaagtaccgggccgtgtccaaggaggtgaaggagatcctggccgactacgaccccaacttcatggccatgtccctggacgaggcctacctgaacatcaccaagcacctggaggagcggcagaactggcccgaggacaagcggcggtacttcatcaagatgggctcctccgtggagaacgacaaccccggcaaggaggtgaacaagctgtccgagcacgagcggtccatctcccccctgctgttcgaggagtccccctccgacgtgcagccccccggcgaccccttccaggtgaacttcgaggagcagaacaacccccagatcctgcagaactccgtggtgttcggcacctccgcccaggaggtggtgaaggagatccggttccggatcgagcagaagaccaccctgaccgcctccgccggcatcgcccccaacaccatgctggccaaggtgtgctccgacaagaacaagcccaacggccagtaccagatcctgcccaaccggcaggccgtgatggacttcatcaaggacctgcccatccggaaggtgtccggcatcggcaaggtgaccgagaagatgctgaaggccctgggcatcatcacctgcaccgagctgtaccagcagcgggccctgctgtccctgctgttctccgagacctcctggcactacttcctgcacatctccctgggcctgggctccacccacctgacccgggaccgggtgcggaagtccatgtccgtggagcggaccttctccgagatcaacaaggccgaggagcagtactccctgtgccaggagctgtgctccgagctggcccaggacctgcagaaggagcggctgaagggccggaccgtgaccatcaagctgaagaacgtgaacttcgaggtgaagacccgggcctccaccgtgtcctccgtggtgtccaccgccgaggagatcttcgccatcgccaaggagctgctgaagaccgagatcgacgccgacttcccccaccccctgcggctgcggctgatgggcgtgcggatctcctccttccccaacgaggaggaccggaagcaccagcagtccggctccgagacccccggcacctccgagtccgccacccccgagtcccccaagaagaagcggaaggtgtccggctccgagacccccggcacctccgagtccgccacccccgagtccatcgccgccctggagaaggagatcgccgccctggagaaggagaacgccgccctggagtgggagatcgccgccctggagaagtag

SEQ ID NO: 1388 - protein, 2013 aa, synthetic construct
  REGION 1..2013: note = Synthetic
MGKRTADGSEFESPKKKRKVDKKYSIGLDIGTNSVGWAVITDEYKVPSKKFKVLGNTDRHSIKKNLIGALLFDSGETAEATRLKRTARRRYTRRKNRICYLQEIFSNEMAKVDDSFFHRLEESFLVEEDKKHERHPIFGNIVDEVAYHEKYPTIYHLRKKLVDSTDKADLRLIYLALAHMIKFRGHFLIEGDLNPDNSDVDKLFIQLVQTYNQLFEENPINASGVDAKAILSARLSKSRRLENLIAQLPGEKKNGLFGNLIALSLGLTPNFKSNFDLAEDAKLQLSKDTYDDDLDNLLAQIGDQYADLFLAAKNLSDAILLSDILRVNTEITKAPLSASMIKRYDEHHQDLTLLKALVRQQLPEKYKEIFFDQSKNGYAGYIDGGASQEEFYKFIKPILEKMDGTEELLVKLNREDLLRKQRTFDNGSIPHQIHLGELHAILRRQEDFYPFLKDNREKIEKILTFRIPYYVGPLARGNSRFAWMTRKSEETITPWNFEEVVDKGASAQSFIERMTNFDKNLPNEKVLPKHSLLYEYFTVYNELTKVKYVTEGMRKPAFLSGEQKKAIVDLLFKTNRKVTVKQLKEDYFKKIECFDSVEISGVEDRFNASLGTYHDLLKIIKDKDFLDNEENEDILEDIVLTLTLFEDREMIEERLKTYAHLFDDKVMKQLKRRRYTGWGRLSRKLINGIRDKQSGKTILDFLKSDGFANRNFMQLIHDDSLTFKEDIQKAQVSGQGDSLHEHIANLAGSPAIKKGILQTVKVVDELVKVMGRHKPENIVIEMARENQTTQKGQKNSRERMKRIEEGIKELGSQILKEHPVENTQLQNEKLYLYYLQNGRDMYVDQELDINRLSDYDVDAIVPQSFLKDDSIDNKVLTRSDKNRGKSDNVPSEEVVKKMKNYWRQLLNAKLITQRKFDNLTKAERGGLSELDKAGFIKRQLVETRQITKHVAQILDSRMNTKYDENDKLIREVKVITLKSKLVSDFRKDFQFYKVREINNYHHAHDAYLNAVVGTALIKKYPKLESEFVYGDYKVYDVRKMIAKSEQEIGKATAKYFFYSNIMNFFKTEITLANGEIRKRPLIETNGETGEIVWDKGRDFATVRKVLSMPQVNIVKKTEVQTGGFSKESILPKRNSDKLIARKKDWDPKKYGGFDSPTVAYSVLVVAKVEKGKSKKLKSVKELLGITIMERSSFEKNPIDFLEAKGYKEVKKDLIIKLPKYSLFELENGRKRMLASAGELQKGNELALPSKYVNFLYLASHYEKLKGSPEDNEQKQLFVEQHKHYLDEIIEQISEFSKRVILADANLDKVLSAYNKHRDKPIREQAENIIHLFTLTNLGAPAAFKYFDTTIDRKRYTSTKEVLDATLIHQSITGLYETRIDLSQLGGDSGGSSGGSKRTADGSEFESPKKKRKVSGGSSGGSMDSTKEKCDSYKDDLLLRMGLNDNKAGMEGLDKEKINKIIMEATKGSRFYGNELKKEKQVNQRIENMMQQKAQITSQQLRKAQLQVDRFAMELEQSRNLSNTIVHIDMDAFYAAVEMRDNPELKDKPIAVGSMSMLSTSNYHARRFGVRAAMPGFIAKRLCPQLIIVPPNFDKYRAVSKEVKEILADYDPNFMAMSLDEAYLNITKHLEERQNWPEDKRRYFIKMGSSVENDNPGKEVNKLSEHERSISPLLFEESPSDVQPPGDPFQVNFEEQNNPQILQNSVVFGTSAQEVVKEIRFRIEQKTTLTASAGIAPNTMLAKVCSDKNKPNGQYQILPNRQAVMDFIKDLPIRKVSGIGKVTEKMLKALGIITCTELYQQRALLSLLFSETSWHYFLHISLGLGSTHLTRDRVRKSMSVERTFSEINKAEEQYSLCQELCSELAQDLQKERLKGRTVTIKLKNVNFEVKTRASTVSSVVSTAEEIFAIAKELLKTEIDADFPHPLRLRLMGVRISSFPNEEDRKHQQSGSETPGTSESATPESPKKKRKVSGSETPGTSESATPESIAALEKEIAALEKENAALEWEIAALEK

SEQ ID NO: 1389 - DNA, 1902 bp, synthetic construct
  misc_feature 1..1902: note = Synthetic
  source 1..1902: mol_type = other DNA
atgggctcccacttccactacatcaagtccatcgagaagaccggcaagaccaagatgcggtgcatccaggtggactccccctcccggctgtacctggccggcaagtccatgatccccacccacaactgcttcaactccggcggctccaagcggaccgccgacggctccgagttcgagtcccccaagaagaagcggaaggtgtccggcggctcctccggcggctccatggactccaccaaggagaagtgcgactcctacaaggacgacctgctgctgcggatgggcctgaacgacaacaaggccggcatggagggcctggacaaggagaagatcaacaagatcatcatggaggccaccaagggctcccggttctacggcaacgagctgaagaaggagaagcaggtgaaccagcggatcgagaacatgatgcagcagaaggcccagatcacctcccagcagctgcggaaggcccagctgcaggtggaccggttcgccatggagctggagcagtcccggaacctgtccaacaccatcgtgcacatcgacatggacgccttctacgccgccgtggagatgcgggacaaccccgagctgaaggacaagcccatcgccgtgggctccatgtccatgctgtccacctccaactaccacgcccggcggttcggcgtgcgggccgccatgcccggcttcatcgccaagcggctgtgcccccagctgatcatcgtgccccccaacttcgacaagtaccgggccgtgtccaaggaggtgaaggagatcctggccgactacgaccccaacttcatggccatgtccctggacgaggcctacctgaacatcaccaagcacctggaggagcggcagaactggcccgaggacaagcggcggtacttcatcaagatgggctcctccgtggagaacgacaaccccggcaaggaggtgaacaagctgtccgagcacgagcggtccatctcccccctgctgttcgaggagtccccctccgacgtgcagccccccggcgaccccttccaggtgaacttcgaggagcagaacaacccccagatcctgcagaactccgtggtgttcggcacctccgcccaggaggtggtgaaggagatccggttccggatcgagcagaagaccaccctgaccgcctccgccggcatcgcccccaacaccatgctggccaaggtgtgctccgacaagaacaagcccaacggccagtaccagatcctgcccaaccggcaggccgtgatggacttcatcaaggacctgcccatccggaaggtgtccggcatcggcaaggtgaccgagaagatgctgaaggccctgggcatcatcacctgcaccgagctgtaccagcagcgggccctgctgtccctgctgttctccgagacctcctggcactacttcctgcacatctccctgggcctgggctccacccacctgacccgggaccgggtgcggaagtccatgtccgtggagcggaccttctccgagatcaacaaggccgaggagcagtactccctgtgccaggagctgtgctccgagctggcccaggacctgcagaaggagcggctgaagggccggaccgtgaccatcaagctgaagaacgtgaacttcgaggtgaagacccgggcctccaccgtgtcctccgtggtgtccaccgccgaggagatcttcgccatcgccaaggagctgctgaagaccgagatcgacgccgacttcccccaccccctgcggctgcggctgatgggcgtgcggatctcctccttccccaacgaggaggaccggaagcaccagcagggcggcggctccggcaagcggaccgccgacggctccggcggcggctcccccaagaagaagcggaaggtgcccgccgccaagcgcgtgaagctggactag

SEQ ID NO: 1390 - protein, 633 aa, synthetic construct
  REGION 1..633: note = Synthetic
MGSHFHYIKSIEKTGKTKMRCIQVDSPSRLYLAGKSMIPTHNCFNSGGSKRTADGSEFESPKKKRKVSGGSSGGSMDSTKEKCDSYKDDLLLRMGLNDNKAGMEGLDKEKINKIIMEATKGSRFYGNELKKEKQVNQRIENMMQQKAQITSQQLRKAQLQVDRFAMELEQSRNLSNTIVHIDMDAFYAAVEMRDNPELKDKPIAVGSMSMLSTSNYHARRFGVRAAMPGFIAKRLCPQLIIVPPNFDKYRAVSKEVKEILADYDPNFMAMSLDEAYLNITKHLEERQNWPEDKRRYFIKMGSSVENDNPGKEVNKLSEHERSISPLLFEESPSDVQPPGDPFQVNFEEQNNPQILQNSVVFGTSAQEVVKEIRFRIEQKTTLTASAGIAPNTMLAKVCSDKNKPNGQYQILPNRQAVMDFIKDLPIRKVSGIGKVTEKMLKALGIITCTELYQQRALLSLLFSETSWHYFLHISLGLGSTHLTRDRVRKSMSVERTFSEINKAEEQYSLCQELCSELAQDLQKERLKGRTVTIKLKNVNFEVKTRASTVSSVVSTAEEIFAIAKELLKTEIDADFPHPLRLRLMGVRISSFPNEEDRKHQQGGGSGKRTADGSGGGSPKKKRKVPAAKRVKLD

SEQ ID NO: 1391 - DNA, 4497 bp, synthetic construct
  misc_feature 1..4497: note = Synthetic
  source 1..4497: mol_type = other DNA
atgggcaagcggcccgccgccaccaagaaggccggccaggccaagaagaagaaggacaagaagtactccatcggcctggacatcggcaccaactccgtgggctgggccgtgatcaccgacgagtacaaggtgccctccaagaagttcaaggtgctgggcaacaccgaccggcactccatcaagaagaacctgatcggcgccctgctgttcgactccggcgagaccgccgaggccacccggctgaagcggaccgcccggcggcggtacacccggcggaagaaccggatctgctacctgcaggagatcttctccaacgagatggccaaggtggacgactccttcttccaccggctggaggagtccttcctggtggaggaggacaagaagcacgagcggcaccccatcttcggcaacatcgtggacgaggtggcctaccacgagaagtaccccaccatctaccacctgcggaagaagctggtggactccaccgacaaggccgacctgcggctgatctacctggccctggcccacatgatcaagttccggggccacttcctgatcgagggcgacctgaaccccgacaactccgacgtggacaagctgttcatccagctggtgcagacctacaaccagctgttcgaggagaaccccatcaacgcctccggcgtggacgccaaggccatcctgtccgcccggctgtccaagtcccggcggctggagaacctgatcgcccagctgcccggcgagaagaagaacggcctgttcggcaacctgatcgccctgtccctgggcctgacccccaacttcaagtccaacttcgacctggccgaggacgccaagctgcagctgtccaaggacacctacgacgacgacctggacaacctgctggcccagatcggcgaccagtacgccgacctgttcctggccgccaagaacctgtccgacgccatcctgctgtccgacatcctgcgggtgaacaccgagatcaccaaggcccccctgtccgcctccatgatcaagcggtacgacgagcaccaccaggacctgaccctgctgaaggccctggtgcggcagcagctgcccgagaagtacaaggagatcttcttcgaccagtccaagaacggctacgccggctacatcgacggcggcgcctcccaggaggagttctacaagttcatcaagcccatcctggagaagatggacggcaccgaggagctgctggtgaagctgaaccgggaggacctgctgcggaagcagcggaccttcgacaacggctccatcccccaccagatccacctgggcgagctgcacgccatcctgcggcggcaggaggacttctaccccttcctgaaggacaaccgggagaagatcgagaagatcctgaccttccggatcccctactacgtgggccccctggcccggggcaactcccggttcgcctggatgacccggaagtccgaggagaccatcaccccctggaacttcgaggaggtggtggacaagggcgcctccgcccagtccttcatcgagcggatgaccaacttcgacaagaacctgcccaacgagaaggtgctgcccaagcactccctgctgtacgagtacttcaccgtgtacaacgagctgaccaaggtgaagtacgtgaccgagggcatgcggaagcccgccttcctgtccggcgagcagaagaaggccatcgtggacctgctgttcaagaccaaccggaaggtgaccgtgaagcagctgaaggaggactacttcaagaagatcgagtgcttcgactccgtggagatctccggcgtggaggaccggttcaacgcctccctgggcacctaccacgacctgctgaagatcatcaaggacaaggacttcctggacaacgaggagaacgaggacatcctggaggacatcgtgctgaccctgaccctgttcgaggaccgggagatgatcgaggagcggctgaagacctacgcccacctgttcgacgacaaggtgatgaagcagctgaagcggcggcggtacaccggctggggccggctgtcccggaagctgatcaacggcatccgggacaagcagtccggcaagaccatcctggacttcctgaagtccgacggcttcgccaaccggaacttcatgcagctgatccacgacgactccctgaccttcaaggaggacatccagaaggcccaggtgtccggccagggcgactccctgcacgagcacatcgccaacctggccggctcccccgccatcaagaagggcatcctgcagaccgtgaaggtggtggacgagctggtgaaggtgatgggccggcacaagcccgagaacatcgtgatcgagatggcccgggagaaccagaccacccagaagggccagaagaactcccgggagcggatgaagcggatcgaggagggcatcaaggagctgggctcccagatcctgaaggagcaccccgtggagaacacccagctgcagaacgagaagctgtacctgtactacctgcagaacggccgggacatgtacgtggaccaggagctggacatcaaccggctgtccgactacgacgtggacgccatcgtgccccagtccttcctgaaggacgactccatcgacaacaaggtgctgacccggtccgacaagaaccggggcaagtccgacaacgtgccctccgaggaggtggtgaagaagatgaagaactactggcggcagctgctgaacgccaagctgatcacccagcggaagttcgacaacctgaccaaggccgagcggggcggcctgtccgagctggacaaggccggcttcatcaagcggcagctggtggagacccggcagatcaccaagcacgtggcccagatcctggactcccggatgaacaccaagtacgacgagaacgacaagctgatccgggaggtgaaggtgatcaccctgaagtccaagctggtgtccgacttccggaaggacttccagttctacaaggtgcgggagatcaacaactaccaccacgcccacgacgcctacctgaacgccgtggtgggcaccgccctgatcaagaagtaccccaagctggagtccgagttcgtgtacggcgactacaaggtgtacgacgtgcggaagatgatcgccaagtccgagcaggagatcggcaaggccaccgccaagtacttcttctactccaacatcatgaacttcttcaagaccgagatcaccctggccaacggcgagatccggaagcggcccctgatcgagaccaacggcgagaccggcgagatcgtgtgggacaagggccgggacttcgccaccgtgcggaaggtgctgtccatgccccaggtgaacatcgtgaagaagaccgaggtgcagaccggcggcttctccaaggagtccatcctgcccaagcggaactccgacaagctgatcgcccggaagaaggactgggaccccaagaagtacggcggcttcgactcccccaccgtggcctactccgtgctggtggtggccaaggtggagaagggcaagtccaagaagctgaagtccgtgaaggagctgctgggcatcaccatcatggagcggtcctccttcgagaagaaccccatcgacttcctggaggccaagggctacaaggaggtgaagaaggacctgatcatcaagctgcccaagtactccctgttcgagctggagaacggccggaagcggatgctggcctccgccggcgagctgcagaagggcaacgagctggccctgccctccaagtacgtgaacttcctgtacctggcctcccactacgagaagctgaagggctcccccgaggacaacgagcagaagcagctgttcgtggagcagcacaagcactacctggacgagatcatcgagcagatctccgagttctccaagcgggtgatcctggccgacgccaacctggacaaggtgctgtccgcctacaacaagcaccgggacaagcccatccgggagcaggccgagaacatcatccacctgttcaccctgaccaacctgggcgcccccgccgccttcaagtacttcgacaccaccatcgaccggaagcggtacacctccaccaaggaggtgctggacgccaccctgatccaccagtccatcaccggcctgtacgagacccggatcgacctgtcccagctgggcggcgactccggcggctcccggggcaagtgcctgaccggcgacgccaagatcgacgtgctgatcgacaacatccccatctcccagatctccctggaggaggtggtgaacctgttcaacgagggcaaggagatctacgtgctgtcctacaacatcgacaccaaggaggtggagtacaaggagatctccgacgccggcctgatctccgagtccgccgaggtgctggagatcatcgacgaggagaccggccagaagatcgtgtgcacccccgaccacaaggtgtacaccctgaaccggggctacgtgtccgccaaggacctgaaggaggacgacgagctggtgttctcctag

SEQ ID NO: 1392 - protein, 1498 aa, synthetic construct
  REGION 1..1498: note = Synthetic
MGKRPAATKKAGQAKKKKDKKYSIGLDIGTNSVGWAVITDEYKVPSKKFKVLGNTDRHSIKKNLIGALLFDSGETAEATRLKRTARRRYTRRKNRICYLQEIFSNEMAKVDDSFFHRLEESFLVEEDKKHERHPIFGNIVDEVAYHEKYPTIYHLRKKLVDSTDKADLRLIYLALAHMIKFRGHFLIEGDLNPDNSDVDKLFIQLVQTYNQLFEENPINASGVDAKAILSARLSKSRRLENLIAQLPGEKKNGLFGNLIALSLGLTPNFKSNFDLAEDAKLQLSKDTYDDDLDNLLAQIGDQYADLFLAAKNLSDAILLSDILRVNTEITKAPLSASMIKRYDEHHQDLTLLKALVRQQLPEKYKEIFFDQSKNGYAGYIDGGASQEEFYKFIKPILEKMDGTEELLVKLNREDLLRKQRTFDNGSIPHQIHLGELHAILRRQEDFYPFLKDNREKIEKILTFRIPYYVGPLARGNSRFAWMTRKSEETITPWNFEEVVDKGASAQSFIERMTNFDKNLPNEKVLPKHSLLYEYFTVYNELTKVKYVTEGMRKPAFLSGEQKKAIVDLLFKTNRKVTVKQLKEDYFKKIECFDSVEISGVEDRFNASLGTYHDLLKIIKDKDFLDNEENEDILEDIVLTLTLFEDREMIEERLKTYAHLFDDKVMKQLKRRRYTGWGRLSRKLINGIRDKQSGKTILDFLKSDGFANRNFMQLIHDDSLTFKEDIQKAQVSGQGDSLHEHIANLAGSPAIKKGILQTVKVVDELVKVMGRHKPENIVIEMARENQTTQKGQKNSRERMKRIEEGIKELGSQILKEHPVENTQLQNEKLYLYYLQNGRDMYVDQELDINRLSDYDVDAIVPQSFLKDDSIDNKVLTRSDKNRGKSDNVPSEEVVKKMKNYWRQLLNAKLITQRKFDNLTKAERGGLSELDKAGFIKRQLVETRQITKHVAQILDSRMNTKYDENDKLIREVKVITLKSKLVSDFRKDFQFYKVREINNYHHAHDAYLNAVVGTALIKKYPKLESEFVYGDYKVYDVRKMIAKSEQEIGKATAKYFFYSNIMNFFKTEITLANGEIRKRPLIETNGETGEIVWDKGRDFATVRKVLSMPQVNIVKKTEVQTGGFSKESILPKRNSDKLIARKKDWDPKKYGGFDSPTVAYSVLVVAKVEKGKSKKLKSVKELLGITIMERSSFEKNPIDFLEAKGYKEVKKDLIIKLPKYSLFELENGRKRMLASAGELQKGNELALPSKYVNFLYLASHYEKLKGSPEDNEQKQLFVEQHKHYLDEIIEQISEFSKRVILADANLDKVLSAYNKHRDKPIREQAENIIHLFTLTNLGAPAAFKYFDTTIDRKRYTSTKEVLDATLIHQSITGLYETRIDLSQLGGDSGGSRGKCLTGDAKIDVLIDNIPISQISLEEVVNLFNEGKEIYVLSYNIDTKEVEYKEISDAGLISESAEVLEIIDEETGQKIVCTPDHKVYTLNRGYVSAKDLKEDDELVFS

SEQ ID NO: 1393 - DNA, 1881 bp, synthetic construct
  misc_feature 1..1881: note = Synthetic
  source 1..1881: mol_type = other DNA
atgggcggcctgaagatcatcaagcgggagtccaaggagcccgtgttcgacatcaccgtgaaggacaactccaacttcttcgccaacaacatcctggtgcacaactgcttcaactccggcggctccaagcggaccgccgacggctccgagttcgagtcccccaagaagaagcggaaggtgtccggcggctcctccggcggctccatggactccaccaaggagaagtgcgactcctacaaggacgacctgctgctgcggatgggcctgaacgacaacaaggccggcatggagggcctggacaaggagaagatcaacaagatcatcatggaggccaccaagggctcccggttctacggcaacgagctgaagaaggagaagcaggtgaaccagcggatcgagaacatgatgcagcagaaggcccagatcacctcccagcagctgcggaaggcccagctgcaggtggaccggttcgccatggagctggagcagtcccggaacctgtccaacaccatcgtgcacatcgacatggacgccttctacgccgccgtggagatgcgggacaaccccgagctgaaggacaagcccatcgccgtgggctccatgtccatgctgtccacctccaactaccacgcccggcggttcggcgtgcgggccgccatgcccggcttcatcgccaagcggctgtgcccccagctgatcatcgtgccccccaacttcgacaagtaccgggccgtgtccaaggaggtgaaggagatcctggccgactacgaccccaacttcatggccatgtccctggacgaggcctacctgaacatcaccaagcacctggaggagcggcagaactggcccgaggacaagcggcggtacttcatcaagatgggctcctccgtggagaacgacaaccccggcaaggaggtgaacaagctgtccgagcacgagcggtccatctcccccctgctgttcgaggagtccccctccgacgtgcagccccccggcgaccccttccaggtgaacttcgaggagcagaacaacccccagatcctgcagaactccgtggtgttcggcacctccgcccaggaggtggtgaaggagatccggttccggatcgagcagaagaccaccctgaccgcctccgccggcatcgcccccaacaccatgctggccaaggtgtgctccgacaagaacaagcccaacggccagtaccagatcctgcccaaccggcaggccgtgatggacttcatcaaggacctgcccatccggaaggtgtccggcatcggcaaggtgaccgagaagatgctgaaggccctgggcatcatcacctgcaccgagctgtaccagcagcgggccctgctgtccctgctgttctccgagacctcctggcactacttcctgcacatctccctgggcctgggctccacccacctgacccgggaccgggtgcggaagtccatgtccgtggagcggaccttctccgagatcaacaaggccgaggagcagtactccctgtgccaggagctgtgctccgagctggcccaggacctgcagaaggagcggctgaagggccggaccgtgaccatcaagctgaagaacgtgaacttcgaggtgaagacccgggcctccaccgtgtcctccgtggtgtccaccgccgaggagatcttcgccatcgccaaggagctgctgaagaccgagatcgacgccgacttcccccaccccctgcggctgcggctgatgggcgtgcggatctcctccttccccaacgaggaggaccggaagcaccagcagggcggcggctccggcaagcggaccgccgacggctccggcggcggctcccccaagaagaagcggaaggtgcccgccgccaagcgcgtgaagctggactag

SEQ ID NO: 1394 - protein, 626 aa, synthetic construct
  REGION 1..626: note = Synthetic
MGGLKIIKRESKEPVFDITVKDNSNFFANNILVHNCFNSGGSKRTADGSEFESPKKKRKVSGGSSGGSMDSTKEKCDSYKDDLLLRMGLNDNKAGMEGLDKEKINKIIMEATKGSRFYGNELKKEKQVNQRIENMMQQKAQITSQQLRKAQLQVDRFAMELEQSRNLSNTIVHIDMDAFYAAVEMRDNPELKDKPIAVGSMSMLSTSNYHARRFGVRAAMPGFIAKRLCPQLIIVPPNFDKYRAVSKEVKEILADYDPNFMAMSLDEAYLNITKHLEERQNWPEDKRRYFIKMGSSVENDNPGKEVNKLSEHERSISPLLFEESPSDVQPPGDPFQVNFEEQNNPQILQNSVVFGTSAQEVVKEIRFRIEQKTTLTASAGIAPNTMLAKVCSDKNKPNGQYQILPNRQAVMDFIKDLPIRKVSGIGKVTEKMLKALGIITCTELYQQRALLSLLFSETSWHYFLHISLGLGSTHLTRDRVRKSMSVERTFSEINKAEEQYSLCQELCSELAQDLQKERLKGRTVTIKLKNVNFEVKTRASTVSSVVSTAEEIFAIAKELLKTEIDADFPHPLRLRLMGVRISSFPNEEDRKHQQGGGSGKRTADGSGGGSPKKKRKVPAAKRVKLD

SEQ ID NO: 1395 - DNA, 4560 bp, synthetic construct
  misc_feature 1..4560: note = Synthetic
  source 1..4560: mol_type = other DNA
atgggcaagcggcccgccgccaccaagaaggccggccaggccaagaagaagaaggacaagaagtactccatcggcctggacatcggcaccaactccgtgggctgggccgtgatcaccgacgagtacaaggtgccctccaagaagttcaaggtgctgggcaacaccgaccggcactccatcaagaagaacctgatcggcgccctgctgttcgactccggcgagaccgccgaggccacccggctgaagcggaccgcccggcggcggtacacccggcggaagaaccggatctgctacctgcaggagatcttctccaacgagatggccaaggtggacgactccttcttccaccggctggaggagtccttcctggtggaggaggacaagaagcacgagcggcaccccatcttcggcaacatcgtggacgaggtggcctaccacgagaagtaccccaccatctaccacctgcggaagaagctggtggactccaccgacaaggccgacctgcggctgatctacctggccctggcccacatgatcaagttccggggccacttcctgatcgagggcgacctgaaccccgacaactccgacgtggacaagctgttcatccagctggtgcagacctacaaccagctgttcgaggagaaccccatcaacgcctccggcgtggacgccaaggccatcctgtccgcccggctgtccaagtcccggcggctggagaacctgatcgcccagctgcccggcgagaagaagaacggcctgttcggcaacctgatcgccctgtccctgggcctgacccccaacttcaagtccaacttcgacctggccgaggacgccaagctgcagctgtccaaggacacctacgacgacgacctggacaacctgctggcccagatcggcgaccagtacgccgacctgttcctggccgccaagaacctgtccgacgccatcctgctgtccgacatcctgcgggtgaacaccgagatcaccaaggcccccctgtccgcctccatgatcaagcggtacgacgagcaccaccaggacctgaccctgctgaaggccctggtgcggcagcagctgcccgagaagtacaaggagatcttcttcgaccagtccaagaacggctacgccggctacatcgacggcggcgcctcccaggaggagttctacaagttcatcaagcccatcctggagaagatggacggcaccgaggagctgctggtgaagctgaaccgggaggacctgctgcggaagcagcggaccttcgacaacggctccatcccccaccagatccacctgggcgagctgcacgccatcctgcggcggcaggaggacttctaccccttcctgaaggacaaccgggagaagatcgagaagatcctgaccttccggatcccctactacgtgggccccctggcccggggcaactcccggttcgcctggatgacccggaagtccgaggagaccatcaccccctggaacttcgaggaggtggtggacaagggcgcctccgcccagtccttcatcgagcggatgaccaacttcgacaagaacctgcccaacgagaaggtgctgcccaagcactccctgctgtacgagtacttcaccgtgtacaacgagctgaccaaggtgaagtacgtgaccgagggcatgcggaagcccgccttcctgtccggcgagcagaagaaggccatcgtggacctgctgttcaagaccaaccggaaggtgaccgtgaagcagctgaaggaggactacttcaagaagatcgagtgcttcgactccgtggagatctccggcgtggaggaccggttcaacgcctccctgggcacctaccacgacctgctgaagatcatcaaggacaaggacttcctggacaacgaggagaacgaggacatcctggaggacatcgtgctgaccctgaccctgttcgaggaccgggagatgatcgaggagcggctgaagacctacgcccacctgttcgacgacaaggtgatgaagcagctgaagcggcggcggtacaccggctggggccggctgtcccggaagctgatcaacggcatccgggacaagcagtccggcaagaccatcctggacttcctgaagtccgacggcttcgccaaccggaacttcatgcagctgatccacgacgactccctgaccttcaaggaggacatccagaaggcccaggtgtccggccagggcgactccctgcacgagcacatcgccaacctggccggctcccccgccatcaagaagggcatcctgcagaccgtgaaggtggtggacgagctggtgaaggtgatgggccggcacaagcccgagaacatcgtgatcgagatggcccgggagaaccagaccacccagaagggccagaagaactcccgggagcggatgaagcggatcgaggagggcatcaaggagctgggctcccagatcctgaaggagcaccccgtggagaacacccagctgcagaacgagaagctgtacctgtactacctgcagaacggccgggacatgtacgtggaccaggagctggacatcaaccggctgtccgactacgacgtggacgccatcgtgccccagtccttcctgaaggacgactccatcgacaacaaggtgctgacccggtccgacaagaaccggggcaagtccgacaacgtgccctccgaggaggtggtgaagaagatgaagaactactggcggcagctgctgaacgccaagctgatcacccagcggaagttcgacaacctgaccaaggccgagcggggcggcctgtccgagctggacaaggccggcttcatcaagcggcagctggtggagacccggcagatcaccaagcacgtggcccagatcctggactcccggatgaacaccaagtacgacgagaacgacaagctgatccgggaggtgaaggtgatcaccctgaagtccaagctggtgtccgacttccggaaggacttccagttctacaaggtgcgggagatcaacaactaccaccacgcccacgacgcctacctgaacgccgtggtgggcaccgccctgatcaagaagtaccccaagctggagtccgagttcgtgtacggcgactacaaggtgtacgacgtgcggaagatgatcgccaagtccgagcaggagatcggcaaggccaccgccaagtacttcttctactccaacatcatgaacttcttcaagaccgagatcaccctggccaacggcgagatccggaagcggcccctgatcgagaccaacggcgagaccggcgagatcgtgtgggacaagggccgggacttcgccaccgtgcggaaggtgctgtccatgccccaggtgaacatcgtgaagaagaccgaggtgcagaccggcggcttctccaaggagtccatcctgcccaagcggaactccgacaagctgatcgcccggaagaaggactgggaccccaagaagtacggcggcttcgactcccccaccgtggcctactccgtgctggtggtggccaaggtggagaagggcaagtccaagaagctgaagtccgtgaaggagctgctgggcatcaccatcatggagcggtcctccttcgagaagaaccccatcgacttcctggaggccaagggctacaaggaggtgaagaaggacctgatcatcaagctgcccaagtactccctgttcgagctggagaacggccggaagcggatgctggcctccgccggcgagctgcagaagggcaacgagctggccctgccctccaagtacgtgaacttcctgtacctggcctcccactacgagaagctgaagggctcccccgaggacaacgagcagaagcagctgttcgtggagcagcacaagcactacctggacgagatcatcgagcagatctccgagttctccaagcgggtgatcctggccgacgccaacctggacaaggtgctgtccgcctacaacaagcaccgggacaagcccatccgggagcaggccgagaacatcatccacctgttcaccctgaccaacctgggcgcccccgccgccttcaagtacttcgacaccaccatcgaccggaagcggtacacctccaccaaggaggtgctggacgccaccctgatccaccagtccatcaccggcctgtacgagacccggatcgacctgtcccagctgggcggcgactccggcggctcccggggcaaggccctggcctacgacgagcccatctacctgtccgacggcaacatcatcaacatcggcgagttcgtggacaagttcttcaagaagtacaagaactccatcaagaaggaggacaacggcttcggctggatcgacatcggcaacgagaacatctacatcaagtccttcaacaagctgtccctgatcatcgaggacaagcggatcctgcgggtgtggcggaagaagtactccggcaagctgatcaagatcaccaccaagaaccggcgggagatcaccctgacccacgaccaccccgtgtacatctccaagaccggcgaggtgctggagatcaacgccgagatggtgaaggtgggcgactacatctacatccccaagaacaacacctag

SEQ ID NO: 1396 - protein, 1519 aa, synthetic construct
  REGION 1..1519: note = Synthetic
MGKRPAATKKAGQAKKKKDKKYSIGLDIGTNSVGWAVITDEYKVPSKKFKVLGNTDRHSIKKNLIGALLFDSGETAEATRLKRTARRRYTRRKNRICYLQEIFSNEMAKVDDSFFHRLEESFLVEEDKKHERHPIFGNIVDEVAYHEKYPTIYHLRKKLVDSTDKADLRLIYLALAHMIKFRGHFLIEGDLNPDNSDVDKLFIQLVQTYNQLFEENPINASGVDAKAILSARLSKSRRLENLIAQLPGEKKNGLFGNLIALSLGLTPNFKSNFDLAEDAKLQLSKDTYDDDLDNLLAQIGDQYADLFLAAKNLSDAILLSDILRVNTEITKAPLSASMIKRYDEHHQDLTLLKALVRQQLPEKYKEIFFDQSKNGYAGYIDGGASQEEFYKFIKPILEKMDGTEELLVKLNREDLLRKQRTFDNGSIPHQIHLGELHAILRRQEDFYPFLKDNREKIEKILTFRIPYYVGPLARGNSRFAWMTRKSEETITPWNFEEVVDKGASAQSFIERMTNFDKNLPNEKVLPKHSLLYEYFTVYNELTKVKYVTEGMRKPAFLSGEQKKAIVDLLFKTNRKVTVKQLKEDYFKKIECFDSVEISGVEDRFNASLGTYHDLLKIIKDKDFLDNEENEDILEDIVLTLTLFEDREMIEERLKTYAHLFDDKVMKQLKRRRYTGWGRLSRKLINGIRDKQSGKTILDFLKSDGFANRNFMQLIHDDSLTFKEDIQKAQVSGQGDSLHEHIANLAGSPAIKKGILQTVKVVDELVKVMGRHKPENIVIEMARENQTTQKGQKNSRERMKRIEEGIKELGSQILKEHPVENTQLQNEKLYLYYLQNGRDMYVDQELDINRLSDYDVDAIVPQSFLKDDSIDNKVLTRSDKNRGKSDNVPSEEVVKKMKNYWRQLLNAKLITQRKFDNLTKAERGGLSELDKAGFIKRQLVETRQITKHVAQILDSRMNTKYDENDKLIREVKVITLKSKLVSDFRKDFQFYKVREINNYHHAHDAYLNAVVGTALIKKYPKLESEFVYGDYKVYDVRKMIAKSEQEIGKATAKYFFYSNIMNFFKTEITLANGEIRKRPLIETNGETGEIVWDKGRDFATVRKVLSMPQVNIVKKTEVQTGGFSKESILPKRNSDKLIARKKDWDPKKYGGFDSPTVAYSVLVVAKVEKGKSKKLKSVKELLGITIMERSSFEKNPIDFLEAKGYKEVKKDLIIKLPKYSLFELENGRKRMLASAGELQKGNELALPSKYVNFLYLASHYEKLKGSPEDNEQKQLFVEQHKHYLDEIIEQISEFSKRVILADANLDKVLSAYNKHRDKPIREQAENIIHLFTLTNLGAPAAFKYFDTTIDRKRYTSTKEVLDATLIHQSITGLYETRIDLSQLGGDSGGSRGKALAYDEPIYLSDGNIINIGEFVDKFFKKYKNSIKKEDNGFGWIDIGNENIYIKSFNKLSLIIEDKRILRVWRKKYSGKLIKITTKNRREITLTHDHPVYISKTGEVLEINAEMVKVGDYIYIPKNNT

SEQ ID NO: 1397 - DNA, 1905 bp, synthetic construct
  misc_feature 1..1905: note = Synthetic
  source 1..1905: mol_type = other DNA
atgggcatcaacctggacgaggtgatcaaggtggagaccgtggactacaacggccacatctacgacctgaccgtggaggacaaccacacctacatcgccggcaagaacgagggcttcgccgtgtccaactgcttcaactccggcggctccaagcggaccgccgacggctccgagttcgagtcccccaagaagaagcggaaggtgtccggcggctcctccggcggctccatggactccaccaaggagaagtgcgactcctacaaggacgacctgctgctgcggatgggcctgaacgacaacaaggccggcatggagggcctggacaaggagaagatcaacaagatcatcatggaggccaccaagggctcccggttctacggcaacgagctgaagaaggagaagcaggtgaaccagcggatcgagaacatgatgcagcagaaggcccagatcacctcccagcagctgcggaaggcccagctgcaggtggaccggttcgccatggagctggagcagtcccggaacctgtccaacaccatcgtgcacatcgacatggacgccttctacgccgccgtggagatgcgggacaaccccgagctgaaggacaagcccatcgccgtgggctccatgtccatgctgtccacctccaactaccacgcccggcggttcggcgtgcgggccgccatgcccggcttcatcgccaagcggctgtgcccccagctgatcatcgtgccccccaacttcgacaagtaccgggccgtgtccaaggaggtgaaggagatcctggccgactacgaccccaacttcatggccatgtccctggacgaggcctacctgaacatcaccaagcacctggaggagcggcagaactggcccgaggacaagcggcggtacttcatcaagatgggctcctccgtggagaacgacaaccccggcaaggaggtgaacaagctgtccgagcacgagcggtccatctcccccctgctgttcgaggagtccccctccgacgtgcagccccccggcgaccccttccaggtgaacttcgaggagcagaacaacccccagatcctgcagaactccgtggtgttcggcacctccgcccaggaggtggtgaaggagatccggttccggatcgagcagaagaccaccctgaccgcctccgccggcatcgcccccaacaccatgctggccaaggtgtgctccgacaagaacaagcccaacggccagtaccagatcctgcccaaccggcaggccgtgatggacttcatcaaggacctgcccatccggaaggtgtccggcatcggcaaggtgaccgagaagatgctgaaggccctgggcatcatcacctgcaccgagctgtaccagcagcgggccctgctgtccctgctgttctccgagacctcctggcactacttcctgcacatctccctgggcctgggctccacccacctgacccgggaccgggtgcggaagtccatgtccgtggagcggaccttctccgagatcaacaaggccgaggagcagtactccctgtgccaggagctgtgctccgagctggcccaggacctgcagaaggagcggctgaagggccggaccgtgaccatcaagctgaagaacgtgaacttcgaggtgaagacccgggcctccaccgtgtcctccgtggtgtccaccgccgaggagatcttcgccatcgccaaggagctgctgaagaccgagatcgacgccgacttcccccaccccctgcggctgcggctgatgggcgtgcggatctcctccttccccaacgaggaggaccggaagcaccagcagggcggcggctccggcaagcggaccgccgacggctccggcggcggctcccccaagaagaagcggaaggtgcccgccgccaagcgcgtgaagctggactag

SEQ ID NO: 1398 - protein, 634 aa, synthetic construct
  REGION 1..634: note = Synthetic
MGINLDEVIKVETVDYNGHIYDLTVEDNHTYIAGKNEGFAVSNCFNSGGSKRTADGSEFESPKKKRKVSGGSSGGSMDSTKEKCDSYKDDLLLRMGLNDNKAGMEGLDKEKINKIIMEATKGSRFYGNELKKEKQVNQRIENMMQQKAQITSQQLRKAQLQVDRFAMELEQSRNLSNTIVHIDMDAFYAAVEMRDNPELKDKPIAVGSMSMLSTSNYHARRFGVRAAMPGFIAKRLCPQLIIVPPNFDKYRAVSKEVKEILADYDPNFMAMSLDEAYLNITKHLEERQNWPEDKRRYFIKMGSSVENDNPGKEVNKLSEHERSISPLLFEESPSDVQPPGDPFQVNFEEQNNPQILQNSVVFGTSAQEVVKEIRFRIEQKTTLTASAGIAPNTMLAKVCSDKNKPNGQYQILPNRQAVMDFIKDLPIRKVSGIGKVTEKMLKALGIITCTELYQQRALLSLLFSETSWHYFLHISLGLGSTHLTRDRVRKSMSVERTFSEINKAEEQYSLCQELCSELAQDLQKERLKGRTVTIKLKNVNFEVKTRASTVSSVVSTAEEIFAIAKELLKTEIDADFPHPLRLRLMGVRISSFPNEEDRKHQQGGGSGKRTADGSGGGSPKKKRKVPAAKRVKLD

SEQ ID NO: 1399 - DNA, 4215 bp, synthetic construct
  misc_feature 1..4215: note = Synthetic
  source 1..4215: mol_type = other DNA
atgggcaagcggcccgccgccaccaagaaggccggccaggccaagaagaagaaggacaagaagtactccatcggcctggacatcggcaccaactccgtgggctgggccgtgatcaccgacgagtacaaggtgccctccaagaagttcaaggtgctgggcaacaccgaccggcactccatcaagaagaacctgatcggcgccctgctgttcgactccggcgagaccgccgaggccacccggctgaagcggaccgcccggcggcggtacacccggcggaagaaccggatctgctacctgcaggagatcttctccaacgagatggccaaggtggacgactccttcttccaccggctggaggagtccttcctggtggaggaggacaagaagcacgagcggcaccccatcttcggcaacatcgtggacgaggtggcctaccacgagaagtaccccaccatctaccacctgcggaagaagctggtggactccaccgacaaggccgacctgcggctgatctacctggccctggcccacatgatcaagttccggggccacttcctgatcgagggcgacctgaaccccgacaactccgacgtggacaagctgttcatccagctggtgcagacctacaaccagctgttcgaggagaaccccatcaacgcctccggcgtggacgccaaggccatcctgtccgcccggctgtccaagtcccggcggctggagaacctgatcgcccagctgcccggcgagaagaagaacggcctgttcggcaacctgatcgccctgtccctgggcctgacccccaacttcaagtccaacttcgacctggccgaggacgccaagctgcagctgtccaaggacacctacgacgacgacctggacaacctgctggcccagatcggcgaccagtacgccgacctgttcctggccgccaagaacctgtccgacgccatcctgctgtccgacatcctgcgggtgaacaccgagatcaccaaggcccccctgtccgcctccatgatcaagcggtacgacgagcaccaccaggacctgaccctgctgaaggccctggtgcggcagcagctgcccgagaagtacaaggagatcttcttcgaccagtccaagaacggctacgccggctacatcgacggcggcgcctcccaggaggagttctacaagttcatcaagcccatcctggagaagatggacggcaccgaggagctgctggtgaagctgaaccgggaggacctgctgcggaagcagcggaccttcgacaacggctccatcccccaccagatccacctgggcgagctgcacgccatcctgcggcggcaggaggacttctaccccttcctgaaggacaaccgggagaagatcgagaagatcctgaccttccggatcccctactacgtgggccccctggcccggggcaactcccggttcgcctggatgacccggaagtccgaggagaccatcaccccctggaacttcgaggaggtggtggacaagggcgcctccgcccagtccttcatcgagcggatgaccaacttcgacaagaacctgcccaacgagaaggtgctgcccaagcactccctgctgtacgagtacttcaccgtgtacaacgagctgaccaaggtgaagtacgtgaccgagggcatgcggaagcccgccttcctgtccggcgagcagaagaaggccatcgtggacctgctgttcaagaccaaccggaaggtgaccgtgaagcagctgaaggaggactacttcaagaagatcgagtgcttcgactccgtggagatctccggcgtggaggaccggttcaacgcctccctgggcacctaccacgacctgctgaagatcatcaaggacaaggacttcctggacaacgaggagaacgaggacatcctggaggacatcgtgctgaccctgaccctgttcgaggaccgggagatgatcgaggagcggctgaagacctacgcccacctgttcgacgacaaggtgatgaagcagctgaagcggcggcggtacaccggctggggccggctgtcccggaagctgatcaacggcatccgggacaagcagtccggcaagaccatcctggacttcctgaagtccgacggcttcgccaaccggaacttcatgcagctgatccacgacgactccctgaccttcaaggaggacatccagaaggcccaggtgtccggccagggcgactccctgcacgagcacatcgccaacctggccggctcccccgccatcaagaagggcatcctgcagaccgtgaaggtggtggacgagctggtgaaggtgatgggccggcacaagcccgagaacatcgtgatcgagatggcccgggagaaccagaccacccagaagggccagaagaactcccgggagcggatgaagcggatcgaggagggcatcaaggagctgggctcccagatcctgaaggagcaccccgtggagaacacccagctgcagaacgagaagctgtacctgtactacctgcagaacggccgggacatgtacgtggaccaggagctggacatcaaccggctgtccgactacgacgtggacgccatcgtgccccagtccttcctgaaggacgactccatcgacaacaaggtgctgacccggtccgacaagaaccggggcaagtccgacaacgtgccctccgaggaggtggtgaagaagatgaagaactactggcggcagctgctgaacgccaagctgatcacccagcggaagttcgacaacctgaccaaggccgagcggggcggcctgtccgagctggacaaggccggcttcatcaagcggcagctggtggagacccggcagatcaccaagcacgtggcccagatcctggactcccggatgaacaccaagtacgacgagaacgacaagctgatccgggaggtgaaggtgatcaccctgaagtccaagctggtgtccgacttccggaaggacttccagttctacaaggtgcgggagatcaacaactaccaccacgcccacgacgcctacctgaacgccgtggtgggcaccgccctgatcaagaagtaccccaagctggagtccgagttcgtgtacggcgactacaaggtgtacgacgtgcggaagatgatcgccaagtccgagcaggagatcggcaaggccaccgccaagtacttcttctactccaacatcatgaacttcttcaagaccgagatcaccctggccaacggcgagatccggaagcggcccctgatcgagaccaacggcgagaccggcgagatcgtgtgggacaagggccgggacttcgccaccgtgcggaaggtgctgtccatgccccaggtgaacatcgtgaagaagaccgaggtgcagaccggcggcttctccaaggagtccatcctgcccaagcggaactccgacaagctgatcgcccggaagaaggactgggaccccaagaagtacggcggcttcgactcccccaccgtggcctactccgtgctggtggtggccaaggtggagaagggcaagtccaagaagctgaagtccgtgaaggagctgctgggcatcaccatcatggagcggtcctccttcgagaagaaccccatcgacttcctggaggccaagggctacaaggaggtgaagaaggacctgatcatcaagctgcccaagtactccctgttcgagctggagaacggccggaagcggatgctggcctccgccggcgagctgcagaagggcaacgagctggccctgccctccaagtacgtgaacttcctgtacctggcctcccactacgagaagctgaagggctcccccgaggacaacgagcagaagcagctgttcgtggagcagcacaagcactacctggacgagatcatcgagcagatctccgagttctccaagcgggtgatcctggccgacgccaacctggacaaggtgctgtccgcctacaacaagcaccgggacaagcccatccgggagcaggccgagaacatcatccacctgttcaccctgaccaacctgggcgcccccgccgccttcaagtacttcgacaccaccatcgaccggaagcggtacacctccaccaaggaggtgctggacgccaccctgatccaccagtccatcaccggcctgtacgagacccggatcgacctgtcccagctgggcggcgactccggcggctcccggggcaagtgcctggccggcgacaccctgatcaccctggcctcctag

SEQ ID NO: 1400 - protein, 1404 aa, synthetic construct
  REGION 1..1404: note = Synthetic
MGKRPAATKKAGQAKKKKDKKYSIGLDIGTNSVGWAVITDEYKVPSKKFKVLGNTDRHSIKKNLIGALLFDSGETAEATRLKRTARRRYTRRKNRICYLQEIFSNEMAKVDDSFFHRLEESFLVEEDKKHERHPIFGNIVDEVAYHEKYPTIYHLRKKLVDSTDKADLRLIYLALAHMIKFRGHFLIEGDLNPDNSDVDKLFIQLVQTYNQLFEENPINASGVDAKAILSARLSKSRRLENLIAQLPGEKKNGLFGNLIALSLGLTPNFKSNFDLAEDAKLQLSKDTYDDDLDNLLAQIGDQYADLFLAAKNLSDAILLSDILRVNTEITKAPLSASMIKRYDEHHQDLTLLKALVRQQLPEKYKEIFFDQSKNGYAGYIDGGASQEEFYKFIKPILEKMDGTEELLVKLNREDLLRKQRTFDNGSIPHQIHLGELHAILRRQEDFYPFLKDNREKIEKILTFRIPYYVGPLARGNSRFAWMTRKSEETITPWNFEEVVDKGASAQSFIERMTNFDKNLPNEKVLPKHSLLYEYFTVYNELTKVKYVTEGMRKPAFLSGEQKKAIVDLLFKTNRKVTVKQLKEDYFKKIECFDSVEISGVEDRFNASLGTYHDLLKIIKDKDFLDNEENEDILEDIVLTLTLFEDREMIEERLKTYAHLFDDKVMKQLKRRRYTGWGRLSRKLINGIRDKQSGKTILDFLKSDGFANRNFMQLIHDDSLTFKEDIQKAQVSGQGDSLHEHIANLAGSPAIKKGILQTVKVVDELVKVMGRHKPENIVIEMARENQTTQKGQKNSRERMKRIEEGIKELGSQILKEHPVENTQLQNEKLYLYYLQNGRDMYVDQELDINRLSDYDVDAIVPQSFLKDDSIDNKVLTRSDKNRGKSDNVPSEEVVKKMKNYWRQLLNAKLITQRKFDNLTKAERGGLSELDKAGFIKRQLVETRQITKHVAQILDSRMNTKYDENDKLIREVKVITLKSKLVSDFRKDFQFYKVREINNYHHAHDAYLNAVVGTALIKKYPKLESEFVYGDYKVYDVRKMIAKSEQEIGKATAKYFFYSNIMNFFKTEITLANGEIRKRPLIETNGETGEIVWDKGRDFATVRKVLSMPQVNIVKKTEVQTGGFSKESILPKRNSDKLIARKKDWDPKKYGGFDSPTVAYSVLVVAKVEKGKSKKLKSVKELLGITIMERSSFEKNPIDFLEAKGYKEVKKDLIIKLPKYSLFELENGRKRMLASAGELQKGNELALPSKYVNFLYLASHYEKLKGSPEDNEQKQLFVEQHKHYLDEIIEQISEFSKRVILADANLDKVLSAYNKHRDKPIREQAENIIHLFTLTNLGAPAAFKYFDTTIDRKRYTSTKEVLDATLIHQSITGLYETRIDLSQLGGDSGGSRGKCLAGDTLITLAS

SEQ ID NO: 1401 - DNA, 2199 bp, synthetic construct
  misc_feature 1..2199: note = Synthetic
  source 1..2199: mol_type = other DNA
atgggcatggacggccggcgggtgcccatccgggagctggtgtcccagcagaacttctccgtgtgggccctgaacccccagacctaccggctggagcgggcccgggtgtcccgggccttctgcaccggcatcaagcccgtgtaccggctgaccacccggctgggccggtccatccgggccaccgccaaccaccggttcctgaccccccagggctggaagcgggtggacgagctgcagcccggcgactacctggccctgccccggcggatcccctccccccgggtgctggcctccatggccgcccagtccgacgtgtactgggaccccatcgtgtccatcgagcccgacggcgtggaggaggtgttcgacctgaccgtgcccggcccccacaacttcgtggccaacgacatcatcgcccacaactgcttcaactccggcggctccaagcggaccgccgacggctccgagttcgagtcccccaagaagaagcggaaggtgtccggcggctcctccggcggctccatggactccaccaaggagaagtgcgactcctacaaggacgacctgctgctgcggatgggcctgaacgacaacaaggccggcatggagggcctggacaaggagaagatcaacaagatcatcatggaggccaccaagggctcccggttctacggcaacgagctgaagaaggagaagcaggtgaaccagcggatcgagaacatgatgcagcagaaggcccagatcacctcccagcagctgcggaaggcccagctgcaggtggaccggttcgccatggagctggagcagtcccggaacctgtccaacaccatcgtgcacatcgacatggacgccttctacgccgccgtggagatgcgggacaaccccgagctgaaggacaagcccatcgccgtgggctccatgtccatgctgtccacctccaactaccacgcccggcggttcggcgtgcgggccgccatgcccggcttcatcgccaagcggctgtgcccccagctgatcatcgtgccccccaacttcgacaagtaccgggccgtgtccaaggaggtgaaggagatcctggccgactacgaccccaacttcatggccatgtccctggacgaggcctacctgaacatcaccaagcacctggaggagcggcagaactggcccgaggacaagcggcggtacttcatcaagatgggctcctccgtggagaacgacaaccccggcaaggaggtgaacaagctgtccgagcacgagcggtccatctcccccctgctgttcgaggagtccccctccgacgtgcagccccccggcgaccccttccaggtgaacttcgaggagcagaacaacccccagatcctgcagaactccgtggtgttcggcacctccgcccaggaggtggtgaaggagatccggttccggatcgagcagaagaccaccctgaccgcctccgccggcatcgcccccaacaccatgctggccaaggtgtgctccgacaagaacaagcccaacggccagtaccagatcctgcccaaccggcaggccgtgatggacttcatcaaggacctgcccatccggaaggtgtccggcatcggcaaggtgaccgagaagatgctgaaggccctgggcatcatcacctgcaccgagctgtaccagcagcgggccctgctgtccctgctgttctccgagacctcctggcactacttcctgcacatctccctgggcctgggctccacccacctgacccgggaccgggtgcggaagtccatgtccgtggagcggaccttctccgagatcaacaaggccgaggagcagtactccctgtgccaggagctgtgctccgagctggcccaggacctgcagaaggagcggctgaagggccggaccgtgaccatcaagctgaagaacgtgaacttcgaggtgaagacccgggcctccaccgtgtcctccgtggtgtccaccgccgaggagatcttcgccatcgccaaggagctgctgaagaccgagatcgacgccgacttcccccaccccctgcggctgcggctgatgggcgtgcggatctcctccttccccaacgaggaggaccggaagcaccagcagggcggcggctccggcaagcggaccgccgacggctccggcggcggctcccccaagaagaagcggaaggtgcccgccgccaagcgcgtgaagctggactag

SEQ ID NO: 1402 - protein, 732 aa, synthetic construct
  REGION 1..732: note = Synthetic
MGMDGRRVPIRELVSQQNFSVWALNPQTYRLERARVSRAFCTGIKPVYRLTTRLGRSIRATANHRFLTPQGWKRVDELQPGDYLALPRRIPSPRVLASMAAQSDVYWDPIVSIEPDGVEEVFDLTVPGPHNFVANDIIAHNCFNSGGSKRTADGSEFESPKKKRKVSGGSSGGSMDSTKEKCDSYKDDLLLRMGLNDNKAGMEGLDKEKINKIIMEATKGSRFYGNELKKEKQVNQRIENMMQQKAQITSQQLRKAQLQVDRFAMELEQSRNLSNTIVHIDMDAFYAAVEMRDNPELKDKPIAVGSMSMLSTSNYHARRFGVRAAMPGFIAKRLCPQLIIVPPNFDKYRAVSKEVKEILADYDPNFMAMSLDEAYLNITKHLEERQNWPEDKRRYFIKMGSSVENDNPGKEVNKLSEHERSISPLLFEESPSDVQPPGDPFQVNFEEQNNPQILQNSVVFGTSAQEVVKEIRFRIEQKTTLTASAGIAPNTMLAKVCSDKNKPNGQYQILPNRQAVMDFIKDLPIRKVSGIGKVTEKMLKALGIITCTELYQQRALLSLLFSETSWHYFLHISLGLGSTHLTRDRVRKSMSVERTFSEINKAEEQYSLCQELCSELAQDLQKERLKGRTVTIKLKNVNFEVKTRASTVSSVVSTAEEIFAIAKELLKTEIDADFPHPLRLRLMGVRISSFPNEEDRKHQQGGGSGKRTADGSGGGSPKKKRKVPAAKRVKLD

SEQ ID NO: 1403 - DNA, 4599 bp, synthetic construct
  misc_feature 1..4599: note = Synthetic
  source 1..4599: mol_type = other DNA
atgggcaagcggcccgccgccaccaagaaggccggccaggccaagaagaagaaggacaagaagtactccatcggcctggacatcggcaccaactccgtgggctgggccgtgatcaccgacgagtacaaggtgccctccaagaagttcaaggtgctgggcaacaccgaccggcactccatcaagaagaacctgatcggcgccctgctgttcgactccggcgagaccgccgaggccacccggctgaagcggaccgcccggcggcggtacacccggcggaagaaccggatctgctacctgcaggagatcttctccaacgagatggccaaggtggacgactccttcttccaccggctggaggagtccttcctggtggaggaggacaagaagcacgagcggcaccccatcttcggcaacatcgtggacgaggtggcctaccacgagaagtaccccaccatctaccacctgcggaagaagctggtggactccaccgacaaggccgacctgcggctgatctacctggccctggcccacatgatcaagttccggggccacttcctgatcgagggcgacctgaaccccgacaactccgacgtggacaagctgttcatccagctggtgcagacctacaaccagctgttcgaggagaaccccatcaacgcctccggcgtggacgccaaggccatcctgtccgcccggctgtccaagtcccggcggctggagaacctgatcgcccagctgcccggcgagaagaagaacggcctgttcggcaacctgatcgccctgtccctgggcctgacccccaacttcaagtccaacttcgacctggccgaggacgccaagctgcagctgtccaaggacacctacgacgacgacctggacaacctgctggcccagatcggcgaccagtacgccgacctgttcctggccgccaagaacctgtccgacgccatcctgctgtccgacatcctgcgggtgaacaccgagatcaccaaggcccccctgtccgcctccatgatcaagcggtacgacgagcaccaccaggacctgaccctgctgaaggccctggtgcggcagcagctgcccgagaagtacaaggagatcttcttcgaccagtccaagaacggctacgccggctacatcgacggcggcgcctcccaggaggagttctacaagttcatcaagcccatcctggagaagatggacggcaccgaggagctgctggtgaagctgaaccgggaggacctgctgcggaagcagcggaccttcgacaacggctccatcccccaccagatccacctgggcgagctgcacgccatcctgcggcggcaggaggacttctaccccttcctgaaggacaaccgggagaagatcgagaagatcctgaccttccggatcccctactacgtgggccccctggcccggggcaactcccggttcgcctggatgacccggaagtccgaggagaccatcaccccctggaacttcgaggaggtggtggacaagggcgcctccgcccagtccttcatcgagcggatgaccaacttcgacaagaacctgcccaacgagaaggtgctgcccaagcactccctgctgtacgagtacttcaccgtgtacaacgagctgaccaaggtgaagtacgtgaccgagggcatgcggaagcccgccttcctgtccggcgagcagaagaaggccatcgtggacctgctgttcaagaccaaccggaaggtgaccgtgaagcagctgaaggaggactacttcaagaagatcgagtgcttcgactccgtggagatctccggcgtggaggaccggttcaacgcctccctgggcacctaccacgacctgctgaagatcatcaaggacaaggacttcctggacaacgaggagaacgaggacatcctggaggacatcgtgctgaccctgaccctgttcgaggaccgggagatgatcgaggagcggctgaagacctacgcccacctgttcgacgacaaggtgatgaagcagctgaagcggcggcggtacaccggctggggccggctgtcccggaagctgatcaacggcatccgggacaagcagtccggcaagaccatcctggacttcctgaagtccgacggcttcgccaaccggaacttcatgcagctgatccacgacgactccctgaccttcaaggaggacatccagaaggcccaggtgtccggccagggcgactccctgcacgagcacatcgccaacctggccggctcccccgccatcaagaagggcatcctgcagaccgtgaaggtggtggacgagctggtgaaggtgatgggccggcacaagcccgagaacatcgtgatcgagatggcccgggagaaccagaccacccagaagggccagaagaactcccgggagcggatgaagcggatcgaggagggcatcaaggagctgggctcccagatcctgaaggagcaccccgtggagaacacccagctgcagaacgagaagctgtacctgtactacctgcagaacggccgggacatgtacgtggaccaggagctggacatcaaccggctgtccgactacgacgtggacgccatcgtgccccagtccttcctgaaggacgactccatcgacaacaaggtgctgacccggtccgacaagaaccggggcaagtccgacaacgtgccctccgaggaggtggtgaagaagatgaagaactactggcggcagctgctgaacgccaagctgatcacccagcggaagttcgacaacctgaccaaggccgagcggggcggcctgtccgagctggacaaggccggcttcatcaagcggcagctggtggagacccggcagatcaccaagcacgtggcccagatcctggactcccggatgaacaccaagtacgacgagaacgacaagctgatccgggaggtgaaggtgatcaccctgaagtccaagctggtgtccgacttccggaaggacttccagttctacaaggtgcgggagatcaacaactaccaccacgcccacgacgcctacctgaacgccgtggtgggcaccgccctgatcaagaagtaccccaagctggagtccgagttcgtgtacggcgactacaaggtgtacgacgtgcggaagatgatcgccaagtccgagcaggagatcggcaaggccaccgccaagtacttcttctactccaacatcatgaacttcttcaagaccgagatcaccctggccaacggcgagatccggaagcggcccctgatcgagaccaacggcgagaccggcgagatcgtgtgggacaagggccgggacttcgccaccgtgcggaaggtgctgtccatgccccaggtgaacatcgtgaagaagaccgaggtgcagaccggcggcttctccaaggagtccatcctgcccaagcggaactccgacaagctgatcgcccggaagaaggactgggaccccaagaagtacggcggcttcgactcccccaccgtggcctactccgtgctggtggtggccaaggtggagaagggcaagtccaagaagctgaagtccgtgaaggagctgctgggcatcaccatcatggagcggtcctccttcgagaagaaccccatcgacttcctggaggccaagggctacaaggaggtgaagaaggacctgatcatcaagctgcccaagtactccctgttcgagctggagaacggccggaagcggatgctggcctccgccggcgagctgcagaagggcaacgagctggccctgccctccaagtacgtgaacttcctgtacctggcctcccactacgagaagctgaagggctcccccgaggacaacgagcagaagcagctgttcgtggagcagcacaagcactacctggacgagatcatcgagcagatctccgagttctccaagcgggtgatcctggccgacgccaacctggacaaggtgctgtccgcctacaacaagcaccgggacaagcccatccgggagcaggccgagaacatcatccacctgttcaccctgaccaacctgggcgcccccgccgccttcaagtacttcgacaccaccatcgaccggaagcggtacacctccaccaaggaggtgctggacgccaccctgatccaccagtccatcaccggcctgtacgagacccggatcgacctgtcccagctgggcggcgactccggcggctcccggggcaagtgcctgacctacgagaccgagatcatgaccgtggagtacggccccctgcccatcggcaagatcgtggagtaccggatcgagtgcaccgtgtacaccgtggacaagaacggctacatctacacccagcccatcgcccagtggcacaaccggggcatgcaggaggtgtacgagtactccctggaggacggcaccgtgatccgggccacccccgagcacaagttcatgaccgaggacggccagatgctgcccatcgacgagatcttcgagcggaacctggacctgaagtgcctgggcaccctggagctggaggcctccggcggcggctccggctccgtgaagatcgtgtcccggaagctggccaagaccgagaacgtgtacgacatcggcgtgaccaaggaccacaacttcgtgctggccaactag

SEQ ID NO: 1404 - protein, 1532 aa, synthetic construct
  REGION 1..1532: note = Synthetic
MGKRPAATKKAGQAKKKKDKKYSIGLDIGTNSVGWAVITDEYKVPSKKFKVLGNTDRHSIKKNLIGALLFDSGETAEATRLKRTARRRYTRRKNRICYLQEIFSNEMAKVDDSFFHRLEESFLVEEDKKHERHPIFGNIVDEVAYHEKYPTIYHLRKKLVDSTDKADLRLIYLALAHMIKFRGHFLIEGDLNPDNSDVDKLFIQLVQTYNQLFEENPINASGVDAKAILSARLSKSRRLENLIAQLPGEKKNGLFGNLIALSLGLTPNFKSNFDLAEDAKLQLSKDTYDDDLDNLLAQIGDQYADLFLAAKNLSDAILLSDILRVNTEITKAPLSASMIKRYDEHHQDLTLLKALVRQQLPEKYKEIFFDQSKNGYAGYIDGGASQEEFYKFIKPILEKMDGTEELLVKLNREDLLRKQRTFDNGSIPHQIHLGELHAILRRQEDFYPFLKDNREKIEKILTFRIPYYVGPLARGNSRFAWMTRKSEETITPWNFEEVVDKGASAQSFIERMTNFDKNLPNEKVLPKHSLLYEYFTVYNELTKVKYVTEGMRKPAFLSGEQKKAIVDLLFKTNRKVTVKQLKEDYFKKIECFDSVEISGVEDRFNASLGTYHDLLKIIKDKDFLDNEENEDILEDIVLTLTLFEDREMIEERLKTYAHLFDDKVMKQLKRRRYTGWGRLSRKLINGIRDKQSGKTILDFLKSDGFANRNFMQLIHDDSLTFKEDIQKAQVSGQGDSLHEHIANLAGSPAIKKGILQTVKVVDELVKVMGRHKPENIVIEMARENQTTQKGQKNSRERMKRIEEGIKELGSQILKEHPVENTQLQNEKLYLYYLQNGRDMYVDQELDINRLSDYDVDAIVPQSFLKDDSIDNKVLTRSDKNRGKSDNVPSEEVVKKMKNYWRQLLNAKLITQRKFDNLTKAERGGLSELDKAGFIKRQLVETRQITKHVAQILDSRMNTKYDENDKLIREVKVITLKSKLVSDFRKDFQFYKVREINNYHHAHDAYLNAVVGTALIKKYPKLESEFVYGDYKVYDVRKMIAKSEQEIGKATAKYFFYSNIMNFFKTEITLANGEIRKRPLIETNGETGEIVWDKGRDFATVRKVLSMPQVNIVKKTEVQTGGFSKESILPKRNSDKLIARKKDWDPKKYGGFDSPTVAYSVLVVAKVEKGKSKKLKSVKELLGITIMERSSFEKNPIDFLEAKGYKEVKKDLIIKLPKYSLFELENGRKRMLASAGELQKGNELALPSKYVNFLYLASHYEKLKGSPEDNEQKQLFVEQHKHYLDEIIEQISEFSKRVILADANLDKVLSAYNKHRDKPIREQAENIIHLFTLTNLGAPAAFKYFDTTIDRKRYTSTKEVLDATLIHQSITGLYETRIDLSQLGGDSGGSRGKCLTYETEIMTVEYGPLPIGKIVEYRIECTVYTVDKNGYIYTQPIAQWHNRGMQEVYEYSLEDGTVIRATPEHKFMTEDGQMLPIDEIFERNLDLKCLGTLELEASGGGSGSVKIVSRKLAKTENVYDIGVTKDHNFVLAN

SEQ ID NO: 1405 - DNA, 1800 bp, synthetic construct
  misc_feature 1..1800: note = Synthetic
  source 1..1800: mol_type = other DNA
atgggcggcctgatcgcctccaactgcttcaactccggcggctccaagcggaccgccgacggctccgagttcgagtcccccaagaagaagcggaaggtgtccggcggctcctccggcggctccatggactccaccaaggagaagtgcgactcctacaaggacgacctgctgctgcggatgggcctgaacgacaacaaggccggcatggagggcctggacaaggagaagatcaacaagatcatcatggaggccaccaagggctcccggttctacggcaacgagctgaagaaggagaagcaggtgaaccagcggatcgagaacatgatgcagcagaaggcccagatcacctcccagcagctgcggaaggcccagctgcaggtggaccggttcgccatggagctggagcagtcccggaacctgtccaacaccatcgtgcacatcgacatggacgccttctacgccgccgtggagatgcgggacaaccccgagctgaaggacaagcccatcgccgtgggctccatgtccatgctgtccacctccaactaccacgcccggcggttcggcgtgcgggccgccatgcccggcttcatcgccaagcggctgtgcccccagctgatcatcgtgccccccaacttcgacaagtaccgggccgtgtccaaggaggtgaaggagatcctggccgactacgaccccaacttcatggccatgtccctggacgaggcctacctgaacatcaccaagcacctggaggagcggcagaactggcccgaggacaagcggcggtacttcatcaagatgggctcctccgtggagaacgacaaccccggcaaggaggtgaacaagctgtccgagcacgagcggtccatctcccccctgctgttcgaggagtccccctccgacgtgcagccccccggcgaccccttccaggtgaacttcgaggagcagaacaacccccagatcctgcagaactccgtggtgttcggcacctccgcccaggaggtggtgaaggagatccggttccggatcgagcagaagaccaccctgaccgcctccgccggcatcgcccccaacaccatgctggccaaggtgtgctccgacaagaacaagcccaacggccagtaccagatcctgcccaaccggcaggccgtgatggacttcatcaaggacctgcccatccggaaggtgtccggcatcggcaaggtgaccgagaagatgctgaaggccctgggcatcatcacctgcaccgagctgtaccagcagcgggccctgctgtccctgctgttctccgagacctcctggcactacttcctgcacatctccctgggcctgggctccacccacctgacccgggaccgggtgcggaagtccatgtccgtggagcggaccttctccgagatcaacaaggccgaggagcagtactccctgtgccaggagctgtgctccgagctggcccaggacctgcagaaggagcggctgaagggccggaccgtgaccatcaagctgaagaacgtgaacttcgaggtgaagacccgggcctccaccgtgtcctccgtggtgtccaccgccgaggagatcttcgccatcgccaaggagctgctgaagaccgagatcgacgccgacttcccccaccccctgcggctgcggctgatgggcgtgcggatctcctccttccccaacgaggaggaccggaagcaccagcagggcggcggctccggcaagcggaccgccgacggctccggcggcggctcccccaagaagaagcggaaggtgcccgccgccaagcgcgtgaagctggactag

SEQ ID NO: 1406 - protein, 599 aa, synthetic construct
  REGION 1..599: note = Synthetic
MGGLIASNCFNSGGSKRTADGSEFESPKKKRKVSGGSSGGSMDSTKEKCDSYKDDLLLRMGLNDNKAGMEGLDKEKINKIIMEATKGSRFYGNELKKEKQVNQRIENMMQQKAQITSQQLRKAQLQVDRFAMELEQSRNLSNTIVHIDMDAFYAAVEMRDNPELKDKPIAVGSMSMLSTSNYHARRFGVRAAMPGFIAKRLCPQLIIVPPNFDKYRAVSKEVKEILADYDPNFMAMSLDEAYLNITKHLEERQNWPEDKRRYFIKMGSSVENDNPGKEVNKLSEHERSISPLLFEESPSDVQPPGDPFQVNFEEQNNPQILQNSVVFGTSAQEVVKEIRFRIEQKTTLTASAGIAPNTMLAKVCSDKNKPNGQYQILPNRQAVMDFIKDLPIRKVSGIGKVTEKMLKALGIITCTELYQQRALLSLLFSETSWHYFLHISLGLGSTHLTRDRVRKSMSVERTFSEINKAEEQYSLCQELCSELAQDLQKERLKGRTVTIKLKNVNFEVKTRASTVSSVVSTAEEIFAIAKELLKTEIDADFPHPLRLRLMGVRISSFPNEEDRKHQQGGGSGKRTADGSGGGSPKKKRKVPAAKRVKLD

SEQ ID NO: 1407 - DNA, 4539 bp, synthetic construct
  misc_feature 1..4539: note = Synthetic
  source 1..4539: mol_type = other DNA
atgggcaagcggcccgccgccaccaagaaggccggccaggccaagaagaagaaggacaagaagtactccatcggcctggacatcggcaccaactccgtgggctgggccgtgatcaccgacgagtacaaggtgccctccaagaagttcaaggtgctgggcaacaccgaccggcactccatcaagaagaacctgatcggcgccctgctgttcgactccggcgagaccgccgaggccacccggctgaagcggaccgcccggcggcggtacacccggcggaagaaccggatctgctacctgcaggagatcttctccaacgagatggccaaggtggacgactccttcttccaccggctggaggagtccttcctggtggaggaggacaagaagcacgagcggcaccccatcttcggcaacatcgtggacgaggtggcctaccacgagaagtaccccaccatctaccacctgcggaagaagctggtggactccaccgacaaggccgacctgcggctgatctacctggccctggcccacatgatcaagttccggggccacttcctgatcgagggcgacctgaaccccgacaactccgacgtggacaagctgttcatccagctggtgcagacctacaaccagctgttcgaggagaaccccatcaacgcctccggcgtggacgccaaggccatcctgtccgcccggctgtccaagtcccggcggctggagaacctgatcgcccagctgcccggcgagaagaagaacggcctgttcggcaacctgatcgccctgtccctgggcctgacccccaacttcaagtccaacttcgacctggccgaggacgccaagctgcagctgtccaaggacacctacgacgacgacctggacaacctgctggcccagatcggcgaccagtacgccgacctgttcctggccgccaagaacctgtccgacgccatcctgctgtccgacatcctgcgggtgaacaccgagatcaccaaggcccccctgtccgcctccatgatcaagcggtacgacgagcaccaccaggacctgaccctgctgaaggccctggtgcggcagcagctgcccgagaagtacaaggagatcttcttcgaccagtccaagaacggctacgccggctacatcgacggcggcgcctcccaggaggagttctacaagttcatcaagcccatcctggagaagatggacggcaccgaggagctgctggtgaagctgaaccgggaggacctgctgcggaagcagcggaccttcgacaacggctccatcccccaccagatccacctgggcgagctgcacgccatcctgcggcggcaggaggacttctaccccttcctgaaggacaaccgggagaagatcgagaagatcctgaccttccggatcccctactacgtgggccccctggcccggggcaactcccggttcgcctggatgacccggaagtccgaggagaccatcaccccctggaacttcgaggaggtggtggacaagggcgcctccgcccagtccttcatcgagcggatgaccaacttcgacaagaacctgcccaacgagaaggtgctgcccaagcactccctgctgtacgagtacttcaccgtgtacaacgagctgaccaaggtgaagtacgtgaccgagggcatgcggaagcccgccttcctgtccggcgagcagaagaaggccatcgtggacctgctgttcaagaccaaccggaaggtgaccgtgaagcagctgaaggaggactacttcaagaagatcgagtgcttcgactccgtggagatctccggcgtggaggaccggttcaacgcctccctgggcacctaccacgacctgctgaagatcatcaaggacaaggacttcctggacaacgaggagaacgaggacatcctggaggacatcgtgctgaccctgaccctgttcgaggaccgggagatgatcgaggagcggctgaagacctacgcccacctgttcgacgacaaggtgatgaagcagctgaagcggcggcggtacaccggctggggccggctgtcccggaagctgatcaacggcatccgggacaagcagtccggcaagaccatcctggacttcctgaagtccgacggcttcgccaaccggaacttcatgcagctgatccacgacgactccctgaccttcaaggaggacatccagaaggcccaggtgtccggccagggcgactccctgcacgagcacatcgccaacctggccggctcccccgccatcaagaagggcatcctgcagaccgtgaaggtggtggacgagctggtgaaggtgatgggccggcacaagcccgagaacatcgtgatcgagatggcccgggagaaccagaccacccagaagggccagaagaactcccgggagcggatgaagcggatcgaggagggcatcaaggagctgggctcccagatcctgaaggagcaccccgtggagaacacccagctgcagaacgagaagctgtacctgtactacctgcagaacggccgggacatgtacgtggaccaggagctggacatcaaccggctgtccgactacgacgtggacgccatcgtgccccagtccttcctgaaggacgactccatcgacaacaaggtgctgacccggtccgacaagaaccggggcaagtccgacaacgtgccctccgaggaggtggtgaagaagatgaagaactactggcggcagctgctgaacgccaagctgatcacccagcggaagttcgacaacctgaccaaggccgagcggggcggcctgtccgagctggacaaggccggcttcatcaagcggcagctggtggagacccggcagatcaccaagcacgtggcccagatcctggactcccggatgaacaccaagtacgacgagaacgacaagctgatccgggaggtgaaggtgatcaccctgaagtccaagctggtgtccgacttccggaaggacttccagttctacaaggtgcgggagatcaacaactaccaccacgcccacgacgcctacctgaacgccgtggtgggcaccgccctgatcaagaagtaccccaagctggagtccgagttcgtgtacggcgactacaaggtgtacgacgtgcggaagatgatcgccaagtccgagcaggagatcggcaaggccaccgccaagtacttcttctactccaacatcatgaacttcttcaagaccgagatcaccctggccaacggcgagatccggaagcggcccctgatcgagaccaacggcgagaccggcgagatcgtgtgggacaagggccgggacttcgccaccgtgcggaaggtgctgtccatgccccaggtgaacatcgtgaagaagaccgaggtgcagaccggcggcttctccaaggagtccatcctgcccaagcggaactccgacaagctgatcgcccggaagaaggactgggaccccaagaagtacggcggcttcgactcccccaccgtggcctactccgtgctggtggtggccaaggtggagaagggcaagtccaagaagctgaagtccgtgaaggagctgctgggcatcaccatcatggagcggtcctccttcgagaagaaccccatcgacttcctggaggccaagggctacaaggaggtgaagaaggacctgatcatcaagctgcccaagtactccctgttcgagctggagaacggccggaagcggatgctggcctccgccggcgagctgcagaagggcaacgagctggccctgccctccaagtacgtgaacttcctgtacctggcctcccactacgagaagctgaagggctcccccgaggacaacgagcagaagcagctgttcgtggagcagcacaagcactacctggacgagatcatcgagcagatctccgagttctccaagcgggtgatcctggccgacgccaacctggacaaggtgctgtccgcctacaacaagcaccgggacaagcccatccgggagcaggccgagaacatcatccacctgttcaccctgaccaacctgggcgcccccgccgccttcaagtacttcgacaccaccatcgaccggaagcggtacacctccaccaaggaggtgctggacgccaccctgatccaccagtccatcaccggcctgtacgagacccggatcgacctgtcccagctgggcggcgactccggcggctcccggggcaagtgcctggccggcgacaccctgatcaccctggccgacggccggcgggtgcccatccgggagctggtgtcccagcagaacttctccgtgtgggccctgaacccccagacctaccggctggagcgggcccgggtgtcccgggccttctgcaccggcatcaagcccgtgtaccggctgaccacccggctgggccggtccatccgggccaccgccaaccaccggttcctgaccccccagggctggaagcgggtggacgagctgcagcccggcgactacctggccctgccccggcggatccccaccgcctccacccccaccctgaccgaggccgagctggccctgctgggccacctgatcggcgactag

SEQ ID NO: 1408 - protein, 1512 aa, synthetic construct
  REGION 1..1512: note = Synthetic
MGKRPAATKKAGQAKKKKDKKYSIGLDIGTNSVGWAVITDEYKVPSKKFKVLGNTDRHSIKKNLIGALLFDSGETAEATRLKRTARRRYTRRKNRICYLQEIFSNEMAKVDDSFFHRLEESFLVEEDKKHERHPIFGNIVDEVAYHEKYPTIYHLRKKLVDSTDKADLRLIYLALAHMIKFRGHFLIEGDLNPDNSDVDKLFIQLVQTYNQLFEENPINASGVDAKAILSARLSKSRRLENLIAQLPGEKKNGLFGNLIALSLGLTPNFKSNFDLAEDAKLQLSKDTYDDDLDNLLAQIGDQYADLFLAAKNLSDAILLSDILRVNTEITKAPLSASMIKRYDEHHQDLTLLKALVRQQLPEKYKEIFFDQSKNGYAGYIDGGASQEEFYKFIKPILEKMDGTEELLVKLNREDLLRKQRTFDNGSIPHQIHLGELHAILRRQEDFYPFLKDNREKIEKILTFRIPYYVGPLARGNSRFAWMTRKSEETITPWNFEEVVDKGASAQSFIERMTNFDKNLPNEKVLPKHSLLYEYFTVYNELTKVKYVTEGMRKPAFLSGEQKKAIVDLLFKTNRKVTVKQLKEDYFKKIECFDSVEISGVEDRFNASLGTYHDLLKIIKDKDFLDNEENEDILEDIVLTLTLFEDREMIEERLKTYAHLFDDKVMKQLKRRRYTGWGRLSRKLINGIRDKQSGKTILDFLKSDGFANRNFMQLIHDDSLTFKEDIQKAQVSGQGDSLHEHIANLAGSPAIKKGILQTVKVVDELVKVMGRHKPENIVIEMARENQTTQKGQKNSRERMKRIEEGIKELGSQILKEHPVENTQLQNEKLYLYYLQNGRDMYVDQELDINRLSDYDVDAIVPQSFLKDDSIDNKVLTRSDKNRGKSDNVPSEEVVKKMKNYWRQLLNAKLITQRKFDNLTKAERGGLSELDKAGFIKRQLVETRQITKHVAQILDSRMNTKYDENDKLIREVKVITLKSKLVSDFRKDFQFYKVREINNYHHAHDAYLNAVVGTALIKKYPKLESEFVYGDYKVYDVRKMIAKSEQEIGKATAKYFFYSNIMNFFKTEITLANGEIRKRPLIETNGETGEIVWDKGRDFATVRKVLSMPQVNIVKKTEVQTGGFSKESILPKRNSDKLIARKKDWDPKKYGGFDSPTVAYSVLVVAKVEKGKSKKLKSVKELLGITIMERSSFEKNPIDFLEAKGYKEVKKDLIIKLPKYSLFELENGRKRMLASAGELQKGNELALPSKYVNFLYLASHYEKLKGSPEDNEQKQLFVEQHKHYLDEIIEQISEFSKRVILADANLDKVLSAYNKHRDKPIREQAENIIHLFTLTNLGAPAAFKYFDTTIDRKRYTSTKEVLDATLIHQSITGLYETRIDLSQLGGDSGGSRGKCLAGDTLITLADGRRVPIRELVSQQNFSVWALNPQTYRLERARVSRAFCTGIKPVYRLTTRLGRSIRATANHRFLTPQGWKRVDELQPGDYLALPRRIPTASTPTLTEAELALLGHLIGD

SEQ ID NO: 1409 - DNA, 1890 bp, synthetic construct
  misc_feature 1..1890: note = Synthetic
  source 1..1890: mol_type = other DNA
atgggctgggaccccatcgtgtccatcgagcccgacggcgtggaggaggtgttcgacctgaccgtgcccggcccccacaacttcgtggccaacgacatcatcgcccacaactcctgcttcaactccggcggctccaagcggaccgccgacggctccgagttcgagtcccccaagaagaagcggaaggtgtccggcggctcctccggcggctccatggactccaccaaggagaagtgcgactcctacaaggacgacctgctgctgcggatgggcctgaacgacaacaaggccggcatggagggcctggacaaggagaagatcaacaagatcatcatggaggccaccaagggctcccggttctacggcaacgagctgaagaaggagaagcaggtgaaccagcggatcgagaacatgatgcagcagaaggcccagatcacctcccagcagctgcggaaggcccagctgcaggtggaccggttcgccatggagctggagcagtcccggaacctgtccaacaccatcgtgcacatcgacatggacgccttctacgccgccgtggagatgcgggacaaccccgagctgaaggacaagcccatcgccgtgggctccatgtccatgctgtccacctccaactaccacgcccggcggttcggcgtgcgggccgccatgcccggcttcatcgccaagcggctgtgcccccagctgatcatcgtgccccccaacttcgacaagtaccgggccgtgtccaaggaggtgaaggagatcctggccgactacgaccccaacttcatggccatgtccctggacgaggcctacctgaacatcaccaagcacctggaggagcggcagaactggcccgaggacaagcggcggtacttcatcaagatgggctcctccgtggagaacgacaaccccggcaaggaggtgaacaagctgtccgagcacgagcggtccatctcccccctgctgttcgaggagtccccctccgacgtgcagccccccggcgaccccttccaggtgaacttcgaggagcagaacaacccccagatcctgcagaactccgtggtgttcggcacctccgcccaggaggtggtgaaggagatccggttccggatcgagcagaagaccaccctgaccgcctccgccggcatcgcccccaacaccatgctggccaaggtgtgctccgacaagaacaagcccaacggccagtaccagatcctgcccaaccggcaggccgtgatggacttcatcaaggacctgcccatccggaaggtgtccggcatcggcaaggtgaccgagaagatgctgaaggccctgggcatcatcacctgcaccgagctgtaccagcagcgggccctgctgtccctgctgttctccgagacctcctggcactacttcctgcacatctccctgggcctgggctccacccacctgacccgggaccgggtgcggaagtccatgtccgtggagcggaccttctccgagatcaacaaggccgaggagcagtactccctgtgccaggagctgtgctccgagctggcccaggacctgcagaaggagcggctgaagggccggaccgtgaccatcaagctgaagaacgtgaacttcgaggtgaagacccgggcctccaccgtgtcctccgtggtgtccaccgccgaggagatcttcgccatcgccaaggagctgctgaagaccgagatcgacgccgacttcccccaccccctgcggctgcggctgatgggcgtgcggatctcctccttccccaacgaggaggaccggaagcaccagcagggcggcggctccggcaagcggaccgccgacggctccggcggcggctcccccaagaagaagcggaaggtgcccgccgccaagcgcgtgaagctggactag

SEQ ID NO: 1410 - protein, 629 aa, synthetic construct
  REGION 1..629: note = Synthetic
MGWDPIVSIEPDGVEEVFDLTVPGPHNFVANDIIAHNSCFNSGGSKRTADGSEFESPKKKRKVSGGSSGGSMDSTKEKCDSYKDDLLLRMGLNDNKAGMEGLDKEKINKIIMEATKGSRFYGNELKKEKQVNQRIENMMQQKAQITSQQLRKAQLQVDRFAMELEQSRNLSNTIVHIDMDAFYAAVEMRDNPELKDKPIAVGSMSMLSTSNYHARRFGVRAAMPGFIAKRLCPQLIIVPPNFDKYRAVSKEVKEILADYDPNFMAMSLDEAYLNITKHLEERQNWPEDKRRYFIKMGSSVENDNPGKEVNKLSEHERSISPLLFEESPSDVQPPGDPFQVNFEEQNNPQILQNSVVFGTSAQEVVKEIRFRIEQKTTLTASAGIAPNTMLAKVCSDKNKPNGQYQILPNRQAVMDFIKDLPIRKVSGIGKVTEKMLKALGIITCTELYQQRALLSLLFSETSWHYFLHISLGLGSTHLTRDRVRKSMSVERTFSEINKAEEQYSLCQELCSELAQDLQKERLKGRTVTIKLKNVNFEVKTRASTVSSVVSTAEEIFAIAKELLKTEIDADFPHPLRLRLMGVRISSFPNEEDRKHQQGGGSGKRTADGSGGGSPKKKRKVPAAKRVKLD

SEQ ID NO: 1411 - DNA, 4479 bp, synthetic construct
  misc_feature 1..4479: note = Synthetic
  source 1..4479: mol_type = other DNA
atgggcaagcggcccgccgccaccaagaaggccggccaggccaagaagaagaaggacaagaagtactccatcggcctggacatcggcaccaactccgtgggctgggccgtgatcaccgacgagtacaaggtgccctccaagaagttcaaggtgctgggcaacaccgaccggcactccatcaagaagaacctgatcggcgccctgctgttcgactccggcgagaccgccgaggccacccggctgaagcggaccgcccggcggcggtacacccggcggaagaaccggatctgctacctgcaggagatcttctccaacgagatggccaaggtggacgactccttcttccaccggctggaggagtccttcctggtggaggaggacaagaagcacgagcggcaccccatcttcggcaacatcgtggacgaggtggcctaccacgagaagtaccccaccatctaccacctgcggaagaagctggtggactccaccgacaaggccgacctgcggctgatctacctggccctggcccacatgatcaagttccggggccacttcctgatcgagggcgacctgaaccccgacaactccgacgtggacaagctgttcatccagctggtgcagacctacaaccagctgttcgaggagaaccccatcaacgcctccggcgtggacgccaaggccatcctgtccgcccggctgtccaagtcccggcggctggagaacctgatcgcccagctgcccggcgagaagaagaacggcctgttcggcaacctgatcgccctgtccctgggcctgacccccaacttcaagtccaacttcgacctggccgaggacgccaagctgcagctgtccaaggacacctacgacgacgacctggacaacctgctggcccagatcggcgaccagtacgccgacctgttcctggccgccaagaacctgtccgacgccatcctgctgtccgacatcctgcgggtgaacaccgagatcaccaaggcccccctgtccgcctccatgatcaagcggtacgacgagcaccaccaggacctgaccctgctgaaggccctggtgcggcagcagctgcccgagaagtacaaggagatcttcttcgaccagtccaagaacggctacgccggctacatcgacggcggcgcctcccaggaggagttctacaagttcatcaagcccatcctggagaagatggacggcaccgaggagctgctggtgaagctgaaccgggaggacctgctgcggaagcagcggaccttcgacaacggctccatcccccaccagatccacctgggcgagctgcacgccatcctgcggcggcaggaggacttctaccccttcctgaaggacaaccgggagaagatcgagaagatcctgaccttccggatcccctactacgtgggccccctggcccggggcaactcccggttcgcctggatgacccggaagtccgaggagaccatcaccccctggaacttcgaggaggtggtggacaagggcgcctccgcccagtccttcatcgagcggatgaccaacttcgacaagaacctgcccaacgagaaggtgctgcccaagcactccctgctgtacgagtacttcaccgtgtacaacgagctgaccaaggtgaagtacgtgaccgagggcatgcggaagcccgccttcctgtccggcgagcagaagaaggccatcgtggacctgctgttcaagaccaaccggaaggtgaccgtgaagcagctgaaggaggactacttcaagaagatcgagtgcttcgactccgtggagatctccggcgtggaggaccggttcaacgcctccctgggcacctaccacgacctgctgaagatcatcaaggacaaggacttcctggacaacgaggagaacgaggacatcctggaggacatcgtgctgaccctgaccctgttcgaggaccgggagatgatcgaggagcggctgaagacctacgcccacctgttcgacgacaaggtgatgaagcagctgaagcggcggcggtacaccggctggggccggctgtcccggaagctgatcaacggcatccgggacaagcagtccggcaagaccatcctggacttcctgaagtccgacggcttcgccaaccggaacttcatgcagctgatccacgacgactccctgaccttcaaggaggacatccagaaggcccaggtgtccggccagggcgactccctgcacgagcacatcgccaacctggccggctcccccgccatcaagaagggcatcctgcagaccgtgaaggtggtggacgagctggtgaaggtgatgggccggcacaagcccgagaacatcgtgatcgagatggcccgggagaaccagaccacccagaagggccagaagaactcccgggagcggatgaagcggatcgaggagggcatcaaggagctgggctcccagatcctgaaggagcaccccgtggagaacacccagctgcagaacgagaagctgtacctgtactacctgcagaacggccgggacatgtacgtggaccaggagctggacatcaaccggctgtccgactacgacgtggacgccatcgtgccccagtccttcctgaaggacgactccatcgacaacaaggtgctgacccggtccgacaagaaccggggcaagtccgacaacgtgccctccgaggaggtggtgaagaagatgaagaactactggcggcagctgctgaacgccaagctgatcacccagcggaagttcgacaacctgaccaaggccgagcggggcggcctgtccgagctggacaaggccggcttcatcaagcggcagctggtggagacccggcagatcaccaagcacgtggcccagatcctggactcccggatgaacaccaagtacgacgagaacgacaagctgatccgggaggtgaaggtgatcaccctgaagtccaagctggtgtccgacttccggaaggacttccagttctacaaggtgcgggagatcaacaactaccaccacgcccacgacgcctacctgaacgccgtggtgggcaccgccctgatcaagaagtaccccaagctggagtccgagttcgtgtacggcgactacaaggtgtacgacgtgcggaagatgatcgccaagtccgagcaggagatcggcaaggccaccgccaagtacttcttctactccaacatcatgaacttcttcaagaccgagatcaccctggccaacggcgagatccggaagcggcccctgatcgagaccaacggcgagaccggcgagatcgtgtgggacaagggccgggacttcgccaccgtgcggaaggtgctgtccatgccccaggtgaacatcgtgaagaagaccgaggtgcagaccggcggcttctccaaggagtccatcctgcccaagcggaactccgacaagctgatcgcccggaagaaggactgggaccccaagaagtacggcggcttcgactcccccaccgtggcctactccgtgctggtggtggccaaggtggagaagggcaagtccaagaagctgaagtccgtgaaggagctgctgggcatcaccatcatggagcggtcctccttcgagaagaaccccatcgacttcctggaggccaagggctacaaggaggtgaagaaggacctgatcatcaagctgcccaagtactccctgttcgagctggagaacggccggaagcggatgctggcctccgccggcgagctgcagaagggcaacgagctggccctgccctccaagtacgtgaacttcctgtacctggcctcccactacgagaagctgaagggctcccccgaggacaacgagcagaagcagctgttcgtggagcagcacaagcactacctggacgagatcatcgagcagatctccgagttctccaagcgggtgatcctggccgacgccaacctggacaaggtgctgtccgcctacaacaagcaccgggacaagcccatccgggagcaggccgagaacatcatccacctgttcaccctgaccaacctgggcgcccccgccgccttcaagtacttcgacaccaccatcgaccggaagcggtacacctccaccaaggaggtgctggacgccaccctgatccaccagtccatcaccggcctgtacgagacccggatcgacctgtcccagctgggcggcgactccggcggctcccggggcaagtgcatctccggcgactccctgatctccctggcctccaccggcaagcgggtgcccatcaaggacctgctgggcgagaaggacttcgagatctgggccatcaacgagcagaccatgaagctggagtccgccaaggtgtcccgggtgttctgcaccggcaagaagctggtgtacaccctgaagacccggctgggccggaccatcaaggccaccgccaaccaccggttcctgaccatcgacggctggaagcggctggacgagctgtccctgaaggagcacatcgccctgccccggaagctggagtag

SEQ ID NO: 1412 - protein, 1492 aa, synthetic construct
  REGION 1..1492: note = Synthetic
MGKRPAATKKAGQAKKKKDKKYSIGLDIGTNSVGWAVITDEYKVPSKKFKVLGNTDRHSIKKNLIGALLFDSGETAEATRLKRTARRRYTRRKNRICYLQEIFSNEMAKVDDSFFHRLEESFLVEEDKKHERHPIFGNIVDEVAYHEKYPTIYHLRKKLVDSTDKADLRLIYLALAHMIKFRGHFLIEGDLNPDNSDVDKLFIQLVQTYNQLFEENPINASGVDAKAILSARLSKSRRLENLIAQLPGEKKNGLFGNLIALSLGLTPNFKSNFDLAEDAKLQLSKDTYDDDLDNLLAQIGDQYADLFLAAKNLSDAILLSDILRVNTEITKAPLSASMIKRYDEHHQDLTLLKALVRQQLPEKYKEIFFDQSKNGYAGYIDGGASQEEFYKFIKPILEKMDGTEELLVKLNREDLLRKQRTFDNGSIPHQIHLGELHAILRRQEDFYPFLKDNREKIEKILTFRIPYYVGPLARGNSRFAWMTRKSEETITPWNFEEVVDKGASAQSFIERMTNFDKNLPNEKVLPKHSLLYEYFTVYNELTKVKYVTEGMRKPAFLSGEQKKAIVDLLFKTNRKVTVKQLKEDYFKKIECFDSVEISGVEDRFNASLGTYHDLLKIIKDKDFLDNEENEDILEDIVLTLTLFEDREMIEERLKTYAHLFDDKVMKQLKRRRYTGWGRLSRKLINGIRDKQSGKTILDFLKSDGFANRNFMQLIHDDSLTFKEDIQKAQVSGQGDSLHEHIANLAGSPAIKKGILQTVKVVDELVKVMGRHKPENIVIEMARENQTTQKGQKNSRERMKRIEEGIKELGSQILKEHPVENTQLQNEKLYLYYLQNGRDMYVDQELDINRLSDYDVDAIVPQSFLKDDSIDNKVLTRSDKNRGKSDNVPSEEVVKKMKNYWRQLLNAKLITQRKFDNLTKAERGGLSELDKAGFIKRQLVETRQITKHVAQILDSRMNTKYDENDKLIREVKVITLKSKLVSDFRKDFQFYKVREINNYHHAHDAYLNAVVGTALIKKYPKLESEFVYGDYKVYDVRKMIAKSEQEIGKATAKYFFYSNIMNFFKTEITLANGEIRKRPLIETNGETGEIVWDKGRDFATVRKVLSMPQVNIVKKTEVQTGGFSKESILPKRNSDKLIARKKDWDPKKYGGFDSPTVAYSVLVVAKVEKGKSKKLKSVKELLGITIMERSSFEKNPIDFLEAKGYKEVKKDLIIKLPKYSLFELENGRKRMLASAGELQKGNELALPSKYVNFLYLASHYEKLKGSPEDNEQKQLFVEQHKHYLDEIIEQISEFSKRVILADANLDKVLSAYNKHRDKPIREQAENIIHLFTLTNLGAPAAFKYFDTTIDRKRYTSTKEVLDATLIHQSITGLYETRIDLSQLGGDSGGSRGKCISGDSLISLASTGKRVPIKDLLGEKDFEIWAINEQTMKLESAKVSRVFCTGKKLVYTLKTRLGRTIKATANHRFLTIDGWKRLDELSLKEHIALPRKLE

SEQ ID NO: 1413 - DNA, 1944 bp, synthetic construct
  misc_feature 1..1944: note = Synthetic
  source 1..1944: mol_type = other DNA
atgggctcctcctccctgcagctggcccccgagatcgagaagctgccccagtccgacatctactgggaccccatcgtgtccatcaccgagaccggcgtggaggaggtgttcgacctgaccgtgcccggcctgcggaacttcgtggccaacgacatcatcgtgcacaactgcttcaactccggcggctccaagcggaccgccgacggctccgagttcgagtcccccaagaagaagcggaaggtgtccggcggctcctccggcggctccatggactccaccaaggagaagtgcgactcctacaaggacgacctgctgctgcggatgggcctgaacgacaacaaggccggcatggagggcctggacaaggagaagatcaacaagatcatcatggaggccaccaagggctcccggttctacggcaacgagctgaagaaggagaagcaggtgaaccagcggatcgagaacatgatgcagcagaaggcccagatcacctcccagcagctgcggaaggcccagctgcaggtggaccggttcgccatggagctggagcagtcccggaacctgtccaacaccatcgtgcacatcgacatggacgccttctacgccgccgtggagatgcgggacaaccccgagctgaaggacaagcccatcgccgtgggctccatgtccatgctgtccacctccaactaccacgcccggcggttcggcgtgcgggccgccatgcccggcttcatcgccaagcggctgtgcccccagctgatcatcgtgccccccaacttcgacaagtaccgggccgtgtccaaggaggtgaaggagatcctggccgactacgaccccaacttcatggccatgtccctggacgaggcctacctgaacatcaccaagcacctggaggagcggcagaactggcccgaggacaagcggcggtacttcatcaagatgggctcctccgtggagaacgacaaccccggcaaggaggtgaacaagctgtccgagcacgagcggtccatctcccccctgctgttcgaggagtccccctccgacgtgcagccccccggcgaccccttccaggtgaacttcgaggagcagaacaacccccagatcctgcagaactccgtggtgttcggcacctccgcccaggaggtggtgaaggagatccggttccggatcgagcagaagaccaccctgaccgcctccgccggcatcgcccccaacaccatgctggccaaggtgtgctccgacaagaacaagcccaacggccagtaccagatcctgcccaaccggcaggccgtgatggacttcatcaaggacctgcccatccggaaggtgtccggcatcggcaaggtgaccgagaagatgctgaaggccctgggcatcatcacctgcaccgagctgtaccagcagcgggccctgctgtccctgctgttctccgagacctcctggcactacttcctgcacatctccctgggcctgggctccacccacctgacccgggaccgggtgcggaagtccatgtccgtggagcggaccttctccgagatcaacaaggccgaggagcagtactccctgtgccaggagctgtgctccgagctggcccaggacctgcagaaggagcggctgaagggccggaccgtgaccatcaagctgaagaacgtgaacttcgaggtgaagacccgggcctccaccgtgtcctccgtggtgtccaccgccgaggagatcttcgccatcgccaaggagctgctgaagaccgagatcgacgccgacttcccccaccccctgcggctgcggctgatgggcgtgcggatctcctccttccccaacgaggaggaccggaagcaccagcagggcggcggctccggcaagcggaccgccgacggctccggcggcggctcccccaagaagaagcggaaggtgcccgccgccaagcgcgtgaagctggactag

SEQ ID NO: 1414 - protein, 647 aa, synthetic construct
  REGION 1..647: note = Synthetic
MGSSSLQLAPEIEKLPQSDIYWDPIVSITETGVEEVFDLTVPGLRNFVANDIIVHNCFNSGGSKRTADGSEFESPKKKRKVSGGSSGGSMDSTKEKCDSYKDDLLLRMGLNDNKAGMEGLDKEKINKIIMEATKGSRFYGNELKKEKQVNQRIENMMQQKAQITSQQLRKAQLQVDRFAMELEQSRNLSNTIVHIDMDAFYAAVEMRDNPELKDKPIAVGSMSMLSTSNYHARRFGVRAAMPGFIAKRLCPQLIIVPPNFDKYRAVSKEVKEILADYDPNFMAMSLDEAYLNITKHLEERQNWPEDKRRYFIKMGSSVENDNPGKEVNKLSEHERSISPLLFEESPSDVQPPGDPFQVNFEEQNNPQILQNSVVFGTSAQEVVKEIRFRIEQKTTLTASAGIAPNTMLAKVCSDKNKPNGQYQILPNRQAVMDFIKDLPIRKVSGIGKVTEKMLKALGIITCTELYQQRALLSLLFSETSWHYFLHISLGLGSTHLTRDRVRKSMSVERTFSEINKAEEQYSLCQELCSELAQDLQKERLKGRTVTIKLKNVNFEVKTRASTVSSVVSTAEEIFAIAKELLKTEIDADFPHPLRLRLMGVRISSFPNEEDRKHQQGGGSGKRTADGSGGGSPKKKRKVPAAKRVKLD

SEQ ID NO: 1415 - DNA, 4578 bp, synthetic construct
  misc_feature 1..4578: note = Synthetic
  source 1..4578: mol_type = other DNA
atgggcaagcggcccgccgccaccaagaaggccggccaggccaagaagaagaaggacaagaagtactccatcggcctggacatcggcaccaactccgtgggctgggccgtgatcaccgacgagtacaaggtgccctccaagaagttcaaggtgctgggcaacaccgaccggcactccatcaagaagaacctgatcggcgccctgctgttcgactccggcgagaccgccgaggccacccggctgaagcggaccgcccggcggcggtacacccggcggaagaaccggatctgctacctgcaggagatcttctccaacgagatggccaaggtggacgactccttcttccaccggctggaggagtccttcctggtggaggaggacaagaagcacgagcggcaccccatcttcggcaacatcgtggacgaggtggcctaccacgagaagtaccccaccatctaccacctgcggaagaagctggtggactccaccgacaaggccgacctgcggctgatctacctggccctggcccacatgatcaagttccggggccacttcctgatcgagggcgacctgaaccccgacaactccgacgtggacaagctgttcatccagctggtgcagacctacaaccagctgttcgaggagaaccccatcaacgcctccggcgtggacgccaaggccatcctgtccgcccggctgtccaagtcccggcggctggagaacctgatcgcccagctgcccggcgagaagaagaacggcctgttcggcaacctgatcgccctgtccctgggcctgacccccaacttcaagtccaacttcgacctggccgaggacgccaagctgcagctgtccaaggacacctacgacgacgacctggacaacctgctggcccagatcggcgaccagtacgccgacctgttcctggccgccaagaacctgtccgacgccatcctgctgtccgacatcctgcgggtgaacaccgagatcaccaaggcccccctgtccgcctccatgatcaagcggtacgacgagcaccaccaggacctgaccctgctgaaggccctggtgcggcagcagctgcccgagaagtacaaggagatcttcttcgaccagtccaagaacggctacgccggctacatcgacggcggcgcctcccaggaggagttctacaagttcatcaagcccatcctggagaagatggacggcaccgaggagctgctggtgaagctgaaccgggaggacctgctgcggaagcagcggaccttcgacaacggctccatcccccaccagatccacctgggcgagctgcacgccatcctgcggcggcaggaggacttctaccccttcctgaaggacaaccgggagaagatcgagaagatcctgaccttccggatcccctactacgtgggccccctggcccggggcaactcccggttcgcctggatgacccggaagtccgaggagaccatcaccccctggaacttcgaggaggtggtggacaagggcgcctccgcccagtccttcatcgagcggatgaccaacttcgacaagaacctgcccaacgagaaggtgctgcccaagcactccctgctgtacgagtacttcaccgtgtacaacgagctgaccaaggtgaagtacgtgaccgagggcatgcggaagcccgccttcctgtccggcgagcagaagaaggccatcgtggacctgctgttcaagaccaaccggaaggtgaccgtgaagcagctgaaggaggactacttcaagaagatcgagtgcttcgactccgtggagatctccggcgtggaggaccggttcaacgcctccctgggcacctaccacgacctgctgaagatcatcaaggacaaggacttcctggacaacgaggagaacgaggacatcctggaggacatcgtgctgaccctgaccctgttcgaggaccgggagatgatcgaggagcggctgaagacctacgcccacctgttcgacgacaaggtgatgaagcagctgaagcggcggcggtacaccggctggggccggctgtcccggaagctgatcaacggcatccgggacaagcagtccggcaagaccatcctggacttcctgaagtccgacggcttcgccaaccggaacttcatgcagctgatccacgacgactccctgaccttcaaggaggacatccagaaggcccaggtgtccggccagggcgactccctgcacgagcacatcgccaacctggccggctcccccgccatcaagaagggcatcctgcagaccgtgaaggtggtggacgagctggtgaaggtgatgggccggcacaagcccgagaacatcgtgatcgagatggcccgggagaaccagaccacccagaagggccagaagaactcccgggagcggatgaagcggatcgaggagggcatcaaggagctgggctcccagatcctgaaggagcaccccgtggagaacacccagctgcagaacgagaagctgtacctgtactacctgcagaacggccgggacatgtacgtggaccaggagctggacatcaaccggctgtccgactacgacgtggacgccatcgtgccccagtccttcctgaaggacgactccatcgacaacaaggtgctgacccggtccgacaagaaccggggcaagtccgacaacgtgccctccgaggaggtggtgaagaagatgaagaactactggcggcagctgctgaacgccaagctgatcacccagcggaagttcgacaacctgaccaaggccgagcggggcggcctgtccgagctggacaaggccggcttcatcaagcggcagctggtggagacccggcagatcaccaagcacgtggcccagatcctggactcccggatgaacaccaagtacgacgagaacgacaagctgatccgggaggtgaaggtgatcaccctgaagtccaagctggtgtccgacttccggaaggacttccagttctacaaggtgcgggagatcaacaactaccaccacgcccacgacgcctacctgaacgccgtggtgggcaccgccctgatcaagaagtaccccaagctggagtccgagttcgtgtacggcgactacaaggtgtacgacgtgcggaagatgatcgccaagtccgagcaggagatcggcaaggccaccgccaagtacttcttctactccaacatcatgaacttcttcaagaccgagatcaccctggccaacggcgagatccggaagcggcccctgatcgagaccaacggcgagaccggcgagatcgtgtgggacaagggccgggacttcgccaccgtgcggaaggtgctgtccatgccccaggtgaacatcgtgaagaagaccgaggtgcagaccggcggcttctccaaggagtccatcctgcccaagcggaactccgacaagctgatcgcccggaagaaggactgggaccccaagaagtacggcggcttcgactcccccaccgtggcctactccgtgctggtggtggccaaggtggagaagggcaagtccaagaagctgaagtccgtgaaggagctgctgggcatcaccatcatggagcggtcctccttcgagaagaaccccatcgacttcctggaggccaagggctacaaggaggtgaagaaggacctgatcatcaagctgcccaagtactccctgttcgagctggagaacggccggaagcggatgctggcctccgccggcgagctgcagaagggcaacgagctggccctgccctccaagtacgtgaacttcctgtacctggcctcccactacgagaagctgaagggctcccccgaggacaacgagcagaagcagctgttcgtggagcagcacaagcactacctggacgagatcatcgagcagatctccgagttctccaagcgggtgatcctggccgacgccaacctggacaaggtgctgtccgcctacaacaagcaccgggacaagcccatccgggagcaggccgagaacatcatccacctgttcaccctgaccaacctgggcgcccccgccgccttcaagtacttcgacaccaccatcgaccggaagcggtacacctccaccaaggaggtgctggacgccaccctgatccaccagtccatcaccggcctgtacgagacccggatcgacctgtcccagctgggcggcgactccggcggctcccggggcaagtgcctgtcctacgagaccgagatcctgaccgtggagtacggctccctgcccatcggcaagatcgtggagaagcggatcgagtgcaccgtgtactccgtggacaacaacggcaacatctacacccagcccgtggcccagtggcacgaccggggcgagcaggaggtgttcgagtactgcctggaggacggctccctgatccgggccaccaaggaccacaagttcatgaccgtggacggccagatgctgcccatcgacgagatcttcgagcgggagctggacctgatgcgggtggacaacctgcccaacggctccgccggctccgccgccggctccggcgtgaaggtgatcggccggcggtccctgggcgtgcagcggatcttcgacatcggcctgcggcagtag

SEQ ID NO: 1416 - protein, 1525 aa, synthetic construct
  REGION 1..1525: note = Synthetic
MGKRPAATKKAGQAKKKKDKKYSIGLDIGTNSVGWAVITDEYKVPSKKFKVLGNTDRHSIKKNLIGALLFDSGETAEATRLKRTARRRYTRRKNRICYLQEIFSNEMAKVDDSFFHRLEESFLVEEDKKHERHPIFGNIVDEVAYHEKYPTIYHLRKKLVDSTDKADLRLIYLALAHMIKFRGHFLIEGDLNPDNSDVDKLFIQLVQTYNQLFEENPINASGVDAKAILSARLSKSRRLENLIAQLPGEKKNGLFGNLIALSLGLTPNFKSNFDLAEDAKLQLSKDTYDDDLDNLLAQIGDQYADLFLAAKNLSDAILLSDILRVNTEITKAPLSASMIKRYDEHHQDLTLLKALVRQQLPEKYKEIFFDQSKNGYAGYIDGGASQEEFYKFIKPILEKMDGTEELLVKLNREDLLRKQRTFDNGSIPHQIHLGELHAILRRQEDFYPFLKDNREKIEKILTFRIPYYVGPLARGNSRFAWMTRKSEETITPWNFEEVVDKGASAQSFIERMTNFDKNLPNEKVLPKHSLLYEYFTVYNELTKVKYVTEGMRKPAFLSGEQKKAIVDLLFKTNRKVTVKQLKEDYFKKIECFDSVEISGVEDRFNASLGTYHDLLKIIKDKDFLDNEENEDILEDIVLTLTLFEDREMIEERLKTYAHLFDDKVMKQLKRRRYTGWGRLSRKLINGIRDKQSGKTILDFLKSDGFANRNFMQLIHDDSLTFKEDIQKAQVSGQGDSLHEHIANLAGSPAIKKGILQTVKVVDELVKVMGRHKPENIVIEMARENQTTQKGQKNSRERMKRIEEGIKELGSQILKEHPVENTQLQNEKLYLYYLQNGRDMYVDQELDINRLSDYDVDAIVPQSFLKDDSIDNKVLTRSDKNRGKSDNVPSEEVVKKMKNYWRQLLNAKLITQRKFDNLTKAERGGLSELDKAGFIKRQLVETRQITKHVAQILDSRMNTKYDENDKLIREVKVITLKSKLVSDFRKDFQFYKVREINNYHHAHDAYLNAVVGTALIKKYPKLESEFVYGDYKVYDVRKMIAKSEQEIGKATAKYFFYSNIMNFFKTEITLANGEIRKRPLIETNGETGEIVWDKGRDFATVRKVLSMPQVNIVKKTEVQTGGFSKESILPKRNSDKLIARKKDWDPKKYGGFDSPTVAYSVLVVAKVEKGKSKKLKSVKELLGITIMERSSFEKNPIDFLEAKGYKEVKKDLIIKLPKYSLFELENGRKRMLASAGELQKGNELALPSKYVNFLYLASHYEKLKGSPEDNEQKQLFVEQHKHYLDEIIEQISEFSKRVILADANLDKVLSAYNKHRDKPIREQAENIIHLFTLTNLGAPAAFKYFDTTIDRKRYTSTKEVLDATLIHQSITGLYETRIDLSQLGGDSGGSRGKCLSYETEILTVEYGSLPIGKIVEKRIECTVYSVDNNGNIYTQPVAQWHDRGEQEVFEYCLEDGSLIRATKDHKFMTVDGQMLPIDEIFERELDLMRVDNLPNGSAGSAAGSGVKVIGRRSLGVQRIFDIGLRQ

SEQ ID NO: 1417 - DNA, 1824 bp, synthetic construct
  misc_feature 1..1824: note = Synthetic
  source 1..1824: mol_type = other DNA
atgggcgaccacaacttcctgctggccaacggcgccatcgccgccaactgcttcaactccggcggctccaagcggaccgccgacggctccgagttcgagtcccccaagaagaagcggaaggtgtccggcggctcctccggcggctccatggactccaccaaggagaagtgcgactcctacaaggacgacctgctgctgcggatgggcctgaacgacaacaaggccggcatggagggcctggacaaggagaagatcaacaagatcatcatggaggccaccaagggctcccggttctacggcaacgagctgaagaaggagaagcaggtgaaccagcggatcgagaacatgatgcagcagaaggcccagatcacctcccagcagctgcggaaggcccagctgcaggtggaccggttcgccatggagctggagcagtcccggaacctgtccaacaccatcgtgcacatcgacatggacgccttctacgccgccgtggagatgcgggacaaccccgagctgaaggacaagcccatcgccgtgggctccatgtccatgctgtccacctccaactaccacgcccggcggttcggcgtgcgggccgccatgcccggcttcatcgccaagcggctgtgcccccagctgatcatcgtgccccccaacttcgacaagtaccgggccgtgtccaaggaggtgaaggagatcctggccgactacgaccccaacttcatggccatgtccctggacgaggcctacctgaacatcaccaagcacctggaggagcggcagaactggcccgaggacaagcggcggtacttcatcaagatgggctcctccgtggagaacgacaaccccggcaaggaggtgaacaagctgtccgagcacgagcggtccatctcccccctgctgttcgaggagtccccctccgacgtgcagccccccggcgaccccttccaggtgaacttcgaggagcagaacaacccccagatcctgcagaactccgtggtgttcggcacctccgcccaggaggtggtgaaggagatccggttccggatcgagcagaagaccaccctgaccgcctccgccggcatcgcccccaacaccatgctggccaaggtgtgctccgacaagaacaagcccaacggccagtaccagatcctgcccaaccggcaggccgtgatggacttcatcaaggacctgcccatccggaaggtgtccggcatcggcaaggtgaccgagaagatgctgaaggccctgggcatcatcacctgcaccgagctgtaccagcagcgggccctgctgtccctgctgttctccgagacctcctggcactacttcctgcacatctccctgggcctgggctccacccacctgacccgggaccgggtgcggaagtccatgtccgtggagcggaccttctccgagatcaacaaggccgaggagcagtactccctgtgccaggagctgtgctccgagctggcccaggacctgcagaaggagcggctgaagggccggaccgtgaccatcaagctgaagaacgtgaacttcgaggtgaagacccgggcctccaccgtgtcctccgtggtgtccaccgccgaggagatcttcgccatcgccaaggagctgctgaagaccgagatcgacgccgacttcccccaccccctgcggctgcggctgatgggcgtgcggatctcctccttccccaacgaggaggaccggaagcaccagcagggcggcggctccggcaagcggaccgccgacggctccggcggcggctcccccaagaagaagcggaaggtgcccgccgccaagcgcgtgaagctggactag

SEQ ID NO: 1418 - protein, 607 aa, synthetic construct
  REGION 1..607: note = Synthetic
MGDHNFLLANGAIAANCFNSGGSKRTADGSEFESPKKKRKVSGGSSGGSMDSTKEKCDSYKDDLLLRMGLNDNKAGMEGLDKEKINKIIMEATKGSRFYGNELKKEKQVNQRIENMMQQKAQITSQQLRKAQLQVDRFAMELEQSRNLSNTIVHIDMDAFYAAVEMRDNPELKDKPIAVGSMSMLSTSNYHARRFGVRAAMPGFIAKRLCPQLIIVPPNFDKYRAVSKEVKEILADYDPNFMAMSLDEAYLNITKHLEERQNWPEDKRRYFIKMGSSVENDNPGKEVNKLSEHERSISPLLFEESPSDVQPPGDPFQVNFEEQNNPQILQNSVVFGTSAQEVVKEIRFRIEQKTTLTASAGIAPNTMLAKVCSDKNKPNGQYQILPNRQAVMDFIKDLPIRKVSGIGKVTEKMLKALGIITCTELYQQRALLSLLFSETSWHYFLHISLGLGSTHLTRDRVRKSMSVERTFSEINKAEEQYSLCQELCSELAQDLQKERLKGRTVTIKLKNVNFEVKTRASTVSSVVSTAEEIFAIAKELLKTEIDADFPHPLRLRLMGVRISSFPNEEDRKHQQGGGSGKRTADGSGGGSPKKKRKVPAAKRVKLD

SEQ ID NO: 1419 - DNA, 4443 bp, synthetic construct
  misc_feature 1..4443: note = Synthetic
  source 1..4443: mol_type = other DNA
atgggcaagcggcccgccgccaccaagaaggccggccaggccaagaagaagaaggacaagaagtactccatcggcctggacatcggcaccaactccgtgggctgggccgtgatcaccgacgagtacaaggtgccctccaagaagttcaaggtgctgggcaacaccgaccggcactccatcaagaagaacctgatcggcgccctgctgttcgactccggcgagaccgccgaggccacccggctgaagcggaccgcccggcggcggtacacccggcggaagaaccggatctgctacctgcaggagatcttctccaacgagatggccaaggtggacgactccttcttccaccggctggaggagtccttcctggtggaggaggacaagaagcacgagcggcaccccatcttcggcaacatcgtggacgaggtggcctaccacgagaagtaccccaccatctaccacctgcggaagaagctggtggactccaccgacaaggccgacctgcggctgatctacctggccctggcccacatgatcaagttccggggccacttcctgatcgagggcgacctgaaccccgacaactccgacgtggacaagctgttcatccagctggtgcagacctacaaccagctgttcgaggagaaccccatcaacgcctccggcgtggacgccaaggccatcctgtccgcccggctgtccaagtcccggcggctggagaacctgatcgcccagctgcccggcgagaagaagaacggcctgttcggcaacctgatcgccctgtccctgggcctgacccccaacttcaagtccaacttcgacctggccgaggacgccaagctgcagctgtccaaggacacctacgacgacgacctggacaacctgctggcccagatcggcgaccagtacgccgacctgttcctggccgccaagaacctgtccgacgccatcctgctgtccgacatcctgcgggtgaacaccgagatcaccaaggcccccctgtccgcctccatgatcaagcggtacgacgagcaccaccaggacctgaccctgctgaaggccctggtgcggcagcagctgcccgagaagtacaaggagatcttcttcgaccagtccaagaacggctacgccggctacatcgacggcggcgcctcccaggaggagttctacaagttcatcaagcccatcctggagaagatggacggcaccgaggagctgctggtgaagctgaaccgggaggacctgctgcggaagcagcggaccttcgacaacggctccatcccccaccagatccacctgggcgagctgcacgccatcctgcggcggcaggaggacttctaccccttcctgaaggacaaccgggagaagatcgagaagatcctgaccttccggatcccctactacgtgggccccctggcccggggcaactcccggttcgcctggatgacccggaagtccgaggagaccatcaccccctggaacttcgaggaggtggtggacaagggcgcctccgcccagtccttcatcgagcggatgaccaacttcgacaagaacctgcccaacgagaaggtgctgcccaagcactccctgctgtacgagtacttcaccgtgtacaacgagctgaccaaggtgaagtacgtgaccgagggcatgcggaagcccgccttcctgtccggcgagcagaagaaggccatcgtggacctgctgttcaagaccaaccggaaggtgaccgtgaagcagctgaaggaggactacttcaagaagatcgagtgcttcgactccgtggagatctccggcgtggaggaccggttcaacgcctccctgggcacctaccacgacctgctgaagatcatcaaggacaaggacttcctggacaacgaggagaacgaggacatcctggaggacatcgtgctgaccctgaccctgttcgaggaccgggagatgatcgaggagcggctgaagacctacgcccacctgttcgacgacaaggtgatgaagcagctgaagcggcggcggtacaccggctggggccggctgtcccggaagctgatcaacggcatccgggacaagcagtccggcaagaccatcctggacttcctgaagtccgacggcttcgccaaccggaacttcatgcagctgatccacgacgactccctgaccttcaaggaggacatccagaaggcccaggtgtccggccagggcgactccctgcacgagcacatcgccaacctggccggctcccccgccatcaagaagggcatcctgcagaccgtgaaggtggtggacgagctggtgaaggtgatgggccggcacaagcccgagaacatcgtgatcgagatggcccgggagaaccagaccacccagaagggccagaagaactcccgggagcggatgaagcggatcgaggagggcatcaaggagctgggctcccagatcctgaaggagcaccccgtggagaacacccagctgcagaacgagaagctgtacctgtactacctgcagaacggccgggacatgtacgtggaccaggagctggacatcaaccggctgtccgactacgacgtggacgccatcgtgccccagtccttcctgaaggacgactccatcgacaacaaggtgctgacccggtccgacaagaaccggggcaagtccgacaacgtgccctccgaggaggtggtgaagaagatgaagaactactggcggcagctgctgaacgccaagctgatcacccagcggaagttcgacaacctgaccaaggccgagcggggcggcctgtccgagctggacaaggccggcttcatcaagcggcagctggtggagacccggcagatcaccaagcacgtggcccagatcctggactcccggatgaacaccaagtacgacgagaacgacaagctgatccgggaggtgaaggtgatcaccctgaagtccaagctggtgtccgacttccggaaggacttccagttctacaaggtgcgggagatcaacaactaccaccacgcccacgacgcctacctgaacgccgtggtgggcaccgccctgatcaagaagtaccccaagctggagtccgagttcgtgtacggcgactacaaggtgtacgacgtgcggaagatgatcgccaagtccgagcaggagatcggcaaggccaccgccaagtacttcttctactccaacatcatgaacttcttcaagaccgagatcaccctggccaacggcgagatccggaagcggcccctgatcgagaccaacggcgagaccggcgagatcgtgtgggacaagggccgggacttcgccaccgtgcggaaggtgctgtccatgccccaggtgaacatcgtgaagaagaccgaggtgcagaccggcggcttctccaaggagtccatcctgcccaagcggaactccgacaagctgatcgcccggaagaaggactgggaccccaagaagtacggcggcttcgactcccccaccgtggcctactccgtgctggtggtggccaaggtggagaagggcaagtccaagaagctgaagtccgtgaaggagctgctgggcatcaccatcatggagcggtcctccttcgagaagaaccccatcgacttcctggaggccaagggctacaaggaggtgaagaaggacctgatcatcaagctgcccaagtactccctgttcgagctggagaacggccggaagcggatgctggcctccgccggcgagctgcagaagggcaacgagctggccctgccctccaagtacgtgaacttcctgtacctggcctcccactacgagaagctgaagggctcccccgaggacaacgagcagaagcagctgttcgtggagcagcacaagcactacctggacgagatcatcgagcagatctccgagttctccaagcgggtgatcctggccgacgccaacctggacaaggtgctgtccgcctacaacaagcaccgggacaagcccatccgggagcaggccgagaacatcatccacctgttcaccctgaccaacctgggcgcccccgccgccttcaagtacttcgacaccaccatcgaccggaagcggtacacctccaccaaggaggtgctggacgccaccctgatccaccagtccatcaccggcctgtacgagacccggatcgacctgtcccagctgggcggcgactccggcggctcccggggcaagtgcctggacctgaagacccaggtgcagaccccccagggcatgaaggagatctccaacatccaggtgggcgacctggtgctgtccaacaccggctacaacgaggtgctgaacgtgttccccaagtccaagaagaagtcctacaagatcaccctggaggacggcaaggagatcatctgctccgaggagcacctgttccccacccagaccggcgagatgaacatctccggcggcctgaaggagggcatgtgcctgtacgtgaaggagtag

SEQ ID NO: 1420 - protein, 1480 aa, synthetic construct
  REGION 1..1480: note = Synthetic
MGKRPAATKKAGQAKKKKDKKYSIGLDIGTNSVGWAVITDEYKVPSKKFKVLGNTDRHSIKKNLIGALLFDSGETAEATRLKRTARRRYTRRKNRICYLQEIFSNEMAKVDDSFFHRLEESFLVEEDKKHERHPIFGNIVDEVAYHEKYPTIYHLRKKLVDSTDKADLRLIYLALAHMIKFRGHFLIEGDLNPDNSDVDKLFIQLVQTYNQLFEENPINASGVDAKAILSARLSKSRRLENLIAQLPGEKKNGLFGNLIALSLGLTPNFKSNFDLAEDAKLQLSKDTYDDDLDNLLAQIGDQYADLFLAAKNLSDAILLSDILRVNTEITKAPLSASMIKRYDEHHQDLTLLKALVRQQLPEKYKEIFFDQSKNGYAGYIDGGASQEEFYKFIKPILEKMDGTEELLVKLNREDLLRKQRTFDNGSIPHQIHLGELHAILRRQEDFYPFLKDNREKIEKILTFRIPYYVGPLARGNSRFAWMTRKSEETITPWNFEEVVDKGASAQSFIERMTNFDKNLPNEKVLPKHSLLYEYFTVYNELTKVKYVTEGMRKPAFLSGEQKKAIVDLLFKTNRKVTVKQLKEDYFKKIECFDSVEISGVEDRFNASLGTYHDLLKIIKDKDFLDNEENEDILEDIVLTLTLFEDREMIEERLKTYAHLFDDKVMKQLKRRRYTGWGRLSRKLINGIRDKQSGKTILDFLKSDGFANRNFMQLIHDDSLTFKEDIQKAQVSGQGDSLHEHIANLAGSPAIKKGILQTVKVVDELVKVMGRHKPENIVIEMARENQTTQKGQKNSRERMKRIEEGIKELGSQILKEHPVENTQLQNEKLYLYYLQNGRDMYVDQELDINRLSDYDVDAIVPQSFLKDDSIDNKVLTRSDKNRGKSDNVPSEEVVKKMKNYWRQLLNAKLITQRKFDNLTKAERGGLSELDKAGFIKRQLVETRQITKHVAQILDSRMNTKYDENDKLIREVKVITLKSKLVSDFRKDFQFYKVREINNYHHAHDAYLNAVVGTALIKKYPKLESEFVYGDYKVYDVRKMIAKSEQEIGKATAKYFFYSNIMNFFKTEITLANGEIRKRPLIETNGETGEIVWDKGRDFATVRKVLSMPQVNIVKKTEVQTGGFSKESILPKRNSDKLIARKKDWDPKKYGGFDSPTVAYSVLVVAKVEKGKSKKLKSVKELLGITIMERSSFEKNPIDFLEAKGYKEVKKDLIIKLPKYSLFELENGRKRMLASAGELQKGNELALPSKYVNFLYLASHYEKLKGSPEDNEQKQLFVEQHKHYLDEIIEQISEFSKRVILADANLDKVLSAYNKHRDKPIREQAENIIHLFTLTNLGAPAAFKYFDTTIDRKRYTSTKEVLDATLIHQSITGLYETRIDLSQLGGDSGGSRGKCLDLKTQVQTPQGMKEISNIQVGDLVLSNTGYNEVLNVFPKSKKKSYKITLEDGKEIICSEEHLFPTQTGEMNISGGLKEGMCLYVKE

SEQ ID NO: 1421 - DNA, 1887 bp, synthetic construct
  misc_feature 1..1887: note = Synthetic
  source 1..1887: mol_type = other DNA
atgggcctgaagaagatcctgaagatcgaggagctggacgagcgggagctgatcgacatcgaggtgtccggcaaccacctgttctacgccaacgacatcctgacccacaactgcttcaactccggcggctccaagcggaccgccgacggctccgagttcgagtcccccaagaagaagcggaaggtgtccggcggctcctccggcggctccatggactccaccaaggagaagtgcgactcctacaaggacgacctgctgctgcggatgggcctgaacgacaacaaggccggcatggagggcctggacaaggagaagatcaacaagatcatcatggaggccaccaagggctcccggttctacggcaacgagctgaagaaggagaagcaggtgaaccagcggatcgagaacatgatgcagcagaaggcccagatcacctcccagcagctgcggaaggcccagctgcaggtggaccggttcgccatggagctggagcagtcccggaacctgtccaacaccatcgtgcacatcgacatggacgccttctacgccgccgtggagatgcgggacaaccccgagctgaaggacaagcccatcgccgtgggctccatgtccatgctgtccacctccaactaccacgcccggcggttcggcgtgcgggccgccatgcccggcttcatcgccaagcggctgtgcccccagctgatcatcgtgccccccaacttcgacaagtaccgggccgtgtccaaggaggtgaaggagatcctggccgactacgaccccaacttcatggccatgtccctggacgaggcctacctgaacatcaccaagcacctggaggagcggcagaactggcccgaggacaagcggcggtacttcatcaagatgggctcctccgtggagaacgacaaccccggcaaggaggtgaacaagctgtccgagcacgagcggtccatctcccccctgctgttcgaggagtccccctccgacgtgcagccccccggcgaccccttccaggtgaacttcgaggagcagaacaacccccagatcctgcagaactccgtggtgttcggcacctccgcccaggaggtggtgaaggagatccggttccggatcgagcagaagaccaccctgaccgcctccgccggcatcgcccccaacaccatgctggccaaggtgtgctccgacaagaacaagcccaacggccagtaccagatcctgcccaaccggcaggccgtgatggacttcatcaaggacctgcccatccggaaggtgtccggcatcggcaaggtgaccgagaagatgctgaaggccctgggcatcatcacctgcaccgagctgtaccagcagcgggccctgctgtccctgctgttctccgagacctcctggcactacttcctgcacatctccctgggcctgggctccacccacctgacccgggaccgggtgcggaagtccatgtccgtggagcggaccttctccgagatcaacaaggccgaggagcagtactccctgtgccaggagctgtgctccgagctggcccaggacctgcagaaggagcggctgaagggccggaccgtgaccatcaagctgaagaacgtgaacttcgaggtgaagacccgggcctccaccgtgtcctccgtggtgtccaccgccgaggagatcttcgccatcgccaaggagctgctgaagaccgagatcgacgccgacttcccccaccccctgcggctgcggctgatgggcgtgcggatctcctccttccccaacgaggaggaccggaagcaccagcagggcggcggctccggcaagcggaccgccgacggctccggcggcggctcccccaagaagaagcggaaggtgcccgccgccaagcgcgtgaagctggactag

SEQ ID NO: 1422 - protein, 628 aa, synthetic construct
  REGION 1..628: note = Synthetic
MGLKKILKIEELDERELIDIEVSGNHLFYANDILTHNCFNSGGSKRTADGSEFESPKKKRKVSGGSSGGSMDSTKEKCDSYKDDLLLRMGLNDNKAGMEGLDKEKINKIIMEATKGSRFYGNELKKEKQVNQRIENMMQQKAQITSQQLRKAQLQVDRFAMELEQSRNLSNTIVHIDMDAFYAAVEMRDNPELKDKPIAVGSMSMLSTSNYHARRFGVRAAMPGFIAKRLCPQLIIVPPNFDKYRAVSKEVKEILADYDPNFMAMSLDEAYLNITKHLEERQNWPEDKRRYFIKMGSSVENDNPGKEVNKLSEHERSISPLLFEESPSDVQPPGDPFQVNFEEQNNPQILQNSVVFGTSAQEVVKEIRFRIEQKTTLTASAGIAPNTMLAKVCSDKNKPNGQYQILPNRQAVMDFIKDLPIRKVSGIGKVTEKMLKALGIITCTELYQQRALLSLLFSETSWHYFLHISLGLGSTHLTRDRVRKSMSVERTFSEINKAEEQYSLCQELCSELAQDLQKERLKGRTVTIKLKNVNFEVKTRASTVSSVVSTAEEIFAIAKELLKTEIDADFPHPLRLRLMGVRISSFPNEEDRKHQQGGGSGKRTADGSGGGSPKKKRKVPAAKRVKLD

SEQ ID NO: 1423 - DNA, 4446 bp, synthetic construct
  misc_feature 1..4446: note = Synthetic
  source 1..4446: mol_type = other DNA
atgggcaagcggcccgccgccaccaagaaggccggccaggccaagaagaagaaggacaagaagtactccatcggcctggacatcggcaccaactccgtgggctgggccgtgatcaccgacgagtacaaggtgccctccaagaagttcaaggtgctgggcaacaccgaccggcactccatcaagaagaacctgatcggcgccctgctgttcgactccggcgagaccgccgaggccacccggctgaagcggaccgcccggcggcggtacacccggcggaagaaccggatctgctacctgcaggagatcttctccaacgagatggccaaggtggacgactccttcttccaccggctggaggagtccttcctggtggaggaggacaagaagcacgagcggcaccccatcttcggcaacatcgtggacgaggtggcctaccacgagaagtaccccaccatctaccacctgcggaagaagctggtggactccaccgacaaggccgacctgcggctgatctacctggccctggcccacatgatcaagttccggggccacttcctgatcgagggcgacctgaaccccgacaactccgacgtggacaagctgttcatccagctggtgcagacctacaaccagctgttcgaggagaaccccatcaacgcctccggcgtggacgccaaggccatcctgtccgcccggctgtccaagtcccggcggctggagaacctgatcgcccagctgcccggcgagaagaagaacggcctgttcggcaacctgatcgccctgtccctgggcctgacccccaacttcaagtccaacttcgacctggccgaggacgccaagctgcagctgtccaaggacacctacgacgacgacctggacaacctgctggcccagatcggcgaccagtacgccgacctgttcctggccgccaagaacctgtccgacgccatcctgctgtccgacatcctgcgggtgaacaccgagatcaccaaggcccccctgtccgcctccatgatcaagcggtacgacgagcaccaccaggacctgaccctgctgaaggccctggtgcggcagcagctgcccgagaagtacaaggagatcttcttcgaccagtccaagaacggctacgccggctacatcgacggcggcgcctcccaggaggagttctacaagttcatcaagcccatcctggagaagatggacggcaccgaggagctgctggtgaagctgaaccgggaggacctgctgcggaagcagcggaccttcgacaacggctccatcccccaccagatccacctgggcgagctgcacgccatcctgcggcggcaggaggacttctaccccttcctgaaggacaaccgggagaagatcgagaagatcctgaccttccggatcccctactacgtgggccccctggcccggggcaactcccggttcgcctggatgacccggaagtccgaggagaccatcaccccctggaacttcgaggaggtggtggacaagggcgcctccgcccagtccttcatcgagcggatgaccaacttcgacaagaacctgcccaacgagaaggtgctgcccaagcactccctgctgtacgagtacttcaccgtgtacaacgagctgaccaaggtgaagtacgtgaccgagggcatgcggaagcccgccttcctgtccggcgagcagaagaaggccatcgtggacctgctgttcaagaccaaccggaaggtgaccgtgaagcagctgaaggaggactacttcaagaagatcgagtgcttcgactccgtggagatctccggcgtggaggaccggttcaacgcctccctgggcacctaccacgacctgctgaagatcatcaaggacaaggacttcctggacaacgaggagaacgaggacatcctggaggacatcgtgctgaccctgaccctgttcgaggaccgggagatgatcgaggagcggctgaagacctacgcccacctgttcgacgacaaggtgatgaagcagctgaagcggcggcggtacaccggctggggccggctgtcccggaagctgatcaacggcatccgggacaagcagtccggcaagaccatcctggacttcctgaagtccgacggcttcgccaaccggaacttcatgcagctgatccacgacgactccctgaccttcaaggaggacatccagaaggcccaggtgtccggccagggcgactccctgcacgagcacatcgccaacctggccggctcccccgccatcaagaagggcatcctgcagaccgtgaaggtggtggacgagctggtgaaggtgatgggccggcacaagcccgagaacatcgtgatcgagatggcccgggagaaccagaccacccagaagggccagaagaactcccgggagcggatgaagcggatcgaggagggcatcaaggagctgggctcccagatcctgaaggagcaccccgtggagaacacccagctgcagaacgagaagctgtacctgtactacctgcagaacggccgggacatgtacgtggaccaggagctggacatcaaccggctgtccgactacgacgtggacgccatcgtgccccagtccttcctgaaggacgactccatcgacaacaaggtgctgacccggtccgacaagaaccggggcaagtccgacaacgtgccctccgaggaggtggtgaagaagatgaagaactactggcggcagctgctgaacgccaagctgatcacccagcggaagttcgacaacctgaccaaggccgagcggggcggcctgtccgagctggacaaggccggcttcatcaagcggcagctggtggagacccggcagatcaccaagcacgtggcccagatcctggactcccggatgaacaccaagtacgacgagaacgacaagctgatccgggaggtgaaggtgatcaccctgaagtccaagctggtgtccgacttccggaaggacttccagttctacaaggtgcgggagatcaacaactaccaccacgcccacgacgcctacctgaacgccgtggtgggcaccgccctgatcaagaagtaccccaagctggagtccgagttcgtgtacggcgactacaaggtgtacgacgtgcggaagatgatcgccaagtccgagcaggagatcggcaaggccaccgccaagtacttcttctactccaacatcatgaacttcttcaagaccgagatcaccctggccaacggcgagatccggaagcggcccctgatcgagaccaacggcgagaccggcgagatcgtgtgggacaagggccgggacttcgccaccgtgcggaaggtgctgtccatgccccaggtgaacatcgtgaagaagaccgaggtgcagaccggcggcttctccaaggagtccatcctgcccaagcggaactccgacaagctgatcgcccggaagaaggactgggaccccaagaagtacggcggcttcgactcccccaccgtggcctactccgtgctggtggtggccaaggtggagaagggcaagtccaagaagctgaagtccgtgaaggagctgctgggcatcaccatcatggagcggtcctccttcgagaagaaccccatcgacttcctggaggccaagggctacaaggaggtgaagaaggacctgatcatcaagctgcccaagtactccctgttcgagctggagaacggccggaagcggatgctggcctccgccggcgagctgcagaagggcaacgagctggccctgccctccaagtacgtgaacttcctgtacctggcctcccactacgagaagctgaagggctcccccgaggacaacgagcagaagcagctgttcgtggagcagcacaagcactacctggacgagatcatcgagcagatctccgagttctccaagcgggtgatcctggccgacgccaacctggacaaggtgctgtccgcctacaacaagcaccgggacaagcccatccgggagcaggccgagaacatcatccacctgttcaccctgaccaacctgggcgcccccgccgccttcaagtacttcgacaccaccatcgaccggaagcggtacacctccaccaaggaggtgctggacgccaccctgatccaccagtccatcaccggcctgtacgagacccggatcgacctgtcccagctgggcggcgactccggcggctcccggggcaagtgcctgtccctggacaccatggtggtgaccaacggcaaggccatcgagatccgggacgtgaaggtgggcgactggctggagtccgagtgcggccccgtgcaggtgaccgaggtgctgcccatcatcaagcagcccgtgttcgagatcgtgctgaagtccggcaagaagatccgggtgtccgccaaccacaagttccccaccaaggacggcctgaagaccatcaactccggcctgaaggtgggcgacttcctgcggtcccgggccaagtag

SEQ ID NO: 1424 - protein, 1481 aa, synthetic construct
  REGION 1..1481: note = Synthetic
MGKRPAATKKAGQAKKKKDKKYSIGLDIGTNSVGWAVITDEYKVPSKKFKVLGNTDRHSIKKNLIGALLFDSGETAEATRLKRTARRRYTRRKNRICYLQEIFSNEMAKVDDSFFHRLEESFLVEEDKKHERHPIFGNIVDEVAYHEKYPTIYHLRKKLVDSTDKADLRLIYLALAHMIKFRGHFLIEGDLNPDNSDVDKLFIQLVQTYNQLFEENPINASGVDAKAILSARLSKSRRLENLIAQLPGEKKNGLFGNLIALSLGLTPNFKSNFDLAEDAKLQLSKDTYDDDLDNLLAQIGDQYADLFLAAKNLSDAILLSDILRVNTEITKAPLSASMIKRYDEHHQDLTLLKALVRQQLPEKYKEIFFDQSKNGYAGYIDGGASQEEFYKFIKPILEKMDGTEELLVKLNREDLLRKQRTFDNGSIPHQIHLGELHAILRRQEDFYPFLKDNREKIEKILTFRIPYYVGPLARGNSRFAWMTRKSEETITPWNFEEVVDKGASAQSFIERMTNFDKNLPNEKVLPKHSLLYEYFTVYNELTKVKYVTEGMRKPAFLSGEQKKAIVDLLFKTNRKVTVKQLKEDYFKKIECFDSVEISGVEDRFNASLGTYHDLLKIIKDKDFLDNEENEDILEDIVLTLTLFEDREMIEERLKTYAHLFDDKVMKQLKRRRYTGWGRLSRKLINGIRDKQSGKTILDFLKSDGFANRNFMQLIHDDSLTFKEDIQKAQVSGQGDSLHEHIANLAGSPAIKKGILQTVKVVDELVKVMGRHKPENIVIEMARENQTTQKGQKNSRERMKRIEEGIKELGSQILKEHPVENTQLQNEKLYLYYLQNGRDMYVDQELDINRLSDYDVDAIVPQSFLKDDSIDNKVLTRSDKNRGKSDNVPSEEVVKKMKNYWRQLLNAKLITQRKFDNLTKAERGGLSELDKAGFIKRQLVETRQITKHVAQILDSRMNTKYDENDKLIREVKVITLKSKLVSDFRKDFQFYKVREINNYHHAHDAYLNAVVGTALIKKYPKLESEFVYGDYKVYDVRKMIAKSEQEIGKATAKYFFYSNIMNFFKTEITLANGEIRKRPLIETNGETGEIVWDKGRDFATVRKVLSMPQVNIVKKTEVQTGGFSKESILPKRNSDKLIARKKDWDPKKYGGFDSPTVAYSVLVVAKVEKGKSKKLKSVKELLGITIMERSSFEKNPIDFLEAKGYKEVKKDLIIKLPKYSLFELENGRKRMLASAGELQKGNELALPSKYVNFLYLASHYEKLKGSPEDNEQKQLFVEQHKHYLDEIIEQISEFSKRVILADANLDKVLSAYNKHRDKPIREQAENIIHLFTLTNLGAPAAFKYFDTTIDRKRYTSTKEVLDATLIHQSITGLYETRIDLSQLGGDSGGSRGKCLSLDTMVVTNGKAIEIRDVKVGDWLESECGPVQVTEVLPIIKQPVFEIVLKSGKKIRVSANHKFPTKDGLKTINSGLKVGDFLRSRAK

SEQ ID NO: 1425 - DNA, 1917 bp, synthetic construct
  misc_feature 1..1917: note = Synthetic
  source 1..1917: mol_type = other DNA
atgggcatgtgcgagatcttcgagaacgagatcgactgggacgagatcgcctccatcgagtacgtgggcgtggaggagaccatcgacatcaacgtgaccaacgaccggctgttcttcgccaacggcatcctgacccacaactgcttcaactccggcggctccaagcggaccgccgacggctccgagttcgagtcccccaagaagaagcggaaggtgtccggcggctcctccggcggctccatggactccaccaaggagaagtgcgactcctacaaggacgacctgctgctgcggatgggcctgaacgacaacaaggccggcatggagggcctggacaaggagaagatcaacaagatcatcatggaggccaccaagggctcccggttctacggcaacgagctgaagaaggagaagcaggtgaaccagcggatcgagaacatgatgcagcagaaggcccagatcacctcccagcagctgcggaaggcccagctgcaggtggaccggttcgccatggagctggagcagtcccggaacctgtccaacaccatcgtgcacatcgacatggacgccttctacgccgccgtggagatgcgggacaaccccgagctgaaggacaagcccatcgccgtgggctccatgtccatgctgtccacctccaactaccacgcccggcggttcggcgtgcgggccgccatgcccggcttcatcgccaagcggctgtgcccccagctgatcatcgtgccccccaacttcgacaagtaccgggccgtgtccaaggaggtgaaggagatcctggccgactacgaccccaacttcatggccatgtccctggacgaggcctacctgaacatcaccaagcacctggaggagcggcagaactggcccgaggacaagcggcggtacttcatcaagatgggctcctccgtggagaacgacaaccccggcaaggaggtgaacaagctgtccgagcacgagcggtccatctcccccctgctgttcgaggagtccccctccgacgtgcagccccccggcgaccccttccaggtgaacttcgaggagcagaacaacccccagatcctgcagaactccgtggtgttcggcacctccgcccaggaggtggtgaaggagatccggttccggatcgagcagaagaccaccctgaccgcctccgccggcatcgcccccaacaccatgctggccaaggtgtgctccgacaagaacaagcccaacggccagtaccagatcctgcccaaccggcaggccgtgatggacttcatcaaggacctgcccatccggaaggtgtccggcatcggcaaggtgaccgagaagatgctgaaggccctgggcatcatcacctgcaccgagctgtaccagcagcgggccctgctgtccctgctgttctccgagacctcctggcactacttcctgcacatctccctgggcctgggctccacccacctgacccgggaccgggtgcggaagtccatgtccgtggagcggaccttctccgagatcaacaaggccgaggagcagtactccctgtgccaggagctgtgctccgagctggcccaggacctgcagaaggagcggctgaagggccggaccgtgaccatcaagctgaagaacgtgaacttcgaggtgaagacccgggcctccaccgtgtcctccgtggtgtccaccgccgaggagatcttcgccatcgccaaggagctgctgaagaccgagatcgacgccgacttcccccaccccctgcggctgcggctgatgggcgtgcggatctcctccttccccaacgaggaggaccggaagcaccagcagggcggcggctccggcaagcggaccgccgacggctccggcggcggctcccccaagaagaagcggaaggtgcccgccgccaagcgcgtgaagctggactag

SEQ ID NO: 1426 - protein, 638 aa, synthetic construct
  REGION 1..638: note = Synthetic
MGMCEIFENEIDWDEIASIEYVGVEETIDINVTNDRLFFANGILTHNCFNSGGSKRTADGSEFESPKKKRKVSGGSSGGSMDSTKEKCDSYKDDLLLRMGLNDNKAGMEGLDKEKINKIIMEATKGSRFYGNELKKEKQVNQRIENMMQQKAQITSQQLRKAQLQVDRFAMELEQSRNLSNTIVHIDMDAFYAAVEMRDNPELKDKPIAVGSMSMLSTSNYHARRFGVRAAMPGFIAKRLCPQLIIVPPNFDKYRAVSKEVKEILADYDPNFMAMSLDEAYLNITKHLEERQNWPEDKRRYFIKMGSSVENDNPGKEVNKLSEHERSISPLLFEESPSDVQPPGDPFQVNFEEQNNPQILQNSVVFGTSAQEVVKEIRFRIEQKTTLTASAGIAPNTMLAKVCSDKNKPNGQYQILPNRQAVMDFIKDLPIRKVSGIGKVTEKMLKALGIITCTELYQQRALLSLLFSETSWHYFLHISLGLGSTHLTRDRVRKSMSVERTFSEINKAEEQYSLCQELCSELAQDLQKERLKGRTVTIKLKNVNFEVKTRASTVSSVVSTAEEIFAIAKELLKTEIDADFPHPLRLRLMGVRISSFPNEEDRKHQQGGGSGKRTADGSGGGSPKKKRKVPAAKRVKLD

SEQ ID NO: 1427 - DNA, 4494 bp, synthetic construct
  misc_feature 1..4494: note = Synthetic
  source 1..4494: mol_type = other DNA
atgggcaagcggcccgccgccaccaagaaggccggccaggccaagaagaagaaggacaagaagtactccatcggcctggacatcggcaccaactccgtgggctgggccgtgatcaccgacgagtacaaggtgccctccaagaagttcaaggtgctgggcaacaccgaccggcactccatcaagaagaacctgatcggcgccctgctgttcgactccggcgagaccgccgaggccacccggctgaagcggaccgcccggcggcggtacacccggcggaagaaccggatctgctacctgcaggagatcttctccaacgagatggccaaggtggacgactccttcttccaccggctggaggagtccttcctggtggaggaggacaagaagcacgagcggcaccccatcttcggcaacatcgtggacgaggtggcctaccacgagaagtaccccaccatctaccacctgcggaagaagctggtggactccaccgacaaggccgacctgcggctgatctacctggccctggcccacatgatcaagttccggggccacttcctgatcgagggcgacctgaaccccgacaactccgacgtggacaagctgttcatccagctggtgcagacctacaaccagctgttcgaggagaaccccatcaacgcctccggcgtggacgccaaggccatcctgtccgcccggctgtccaagtcccggcggctggagaacctgatcgcccagctgcccggcgagaagaagaacggcctgttcggcaacctgatcgccctgtccctgggcctgacccccaacttcaagtccaacttcgacctggccgaggacgccaagctgcagctgtccaaggacacctacgacgacgacctggacaacctgctggcccagatcggcgaccagtacgccgacctgttcctggccgccaagaacctgtccgacgccatcctgctgtccgacatcctgcgggtgaacaccgagatcaccaaggcccccctgtccgcctccatgatcaagcggtacgacgagcaccaccaggacctgaccctgctgaaggccctggtgcggcagcagctgcccgagaagtacaaggagatcttcttcgaccagtccaagaacggctacgccggctacatcgacggcggcgcctcccaggaggagttctacaagttcatcaagcccatcctggagaagatggacggcaccgaggagctgctggtgaagctgaaccgggaggacctgctgcggaagcagcggaccttcgacaacggctccatcccccaccagatccacctgggcgagctgcacgccatcctgcggcggcaggaggacttctaccccttcctgaaggacaaccgggagaagatcgagaagatcctgaccttccggatcccctactacgtgggccccctggcccggggcaactcccggttcgcctggatgacccggaagtccgaggagaccatcaccccctggaacttcgaggaggtggtggacaagggcgcctccgcccagtccttcatcgagcggatgaccaacttcgacaagaacctgcccaacgagaaggtgctgcccaagcactccctgctgtacgagtacttcaccgtgtacaacgagctgaccaaggtgaagtacgtgaccgagggcatgcggaagcccgccttcctgtccggcgagcagaagaaggccatcgtggacctgctgttcaagaccaaccggaaggtgaccgtgaagcagctgaaggaggactacttcaagaagatcgagtgcttcgactccgtggagatctccggcgtggaggaccggttcaacgcctccctgggcacctaccacgacctgctgaagatcatcaaggacaaggacttcctggacaacgaggagaacgaggacatcctggaggacatcgtgctgaccctgaccctgttcgaggaccgggagatgatcgaggagcggctgaagacctacgcccacctgttcgacgacaaggtgatgaagcagctgaagcggcggcggtacaccggctggggccggctgtcccggaagctgatcaacggcatccgggacaagcagtccggcaagaccatcctggacttcctgaagtccgacggcttcgccaaccggaacttcatgcagctgatccacgacgactccctgaccttcaaggaggacatccagaaggcccaggtgtccggccagggcgactccctgcacgagcacatcgccaacctggccggctcccccgccatcaagaagggcatcctgcagaccgtgaaggtggtggacgagctggtgaaggtgatgggccggcacaagcccgagaacatcgtgatcgagatggcccgggagaaccagaccacccagaagggccagaagaactcccgggagcggatgaagcggatcgaggagggcatcaaggagctgggctcccagatcctgaaggagcaccccgtggagaacacccagctgcagaacgagaagctgtacctgtactacctgcagaacggccgggacatgtacgtggaccaggagctggacatcaaccggctgtccgactacgacgtggacgccatcgtgccccagtccttcctgaaggacgactccatcgacaacaaggtgctgacccggtccgacaagaaccggggcaagtccgacaacgtgccctccgaggaggtggtgaagaagatgaagaactactggcggcagctgctgaacgccaagctgatcacccagcggaagttcgacaacctgaccaaggccgagcggggcggcctgtccgagctggacaaggccggcttcatcaagcggcagctggtggagacccggcagatcaccaagcacgtggcccagatcctggactcccggatgaacaccaagtacgacgagaacgacaagctgatccgggaggtgaaggtgatcaccctgaagtccaagctggtgtccgacttccggaaggacttccagttctacaaggtgcgggagatcaacaactaccaccacgcccacgacgcctacctgaacgccgtggtgggcaccgccctgatcaagaagtaccccaagctggagtccgagttcgtgtacggcgactacaaggtgtacgacgtgcggaagatgatcgccaagtccgagcaggagatcggcaaggccaccgccaagtacttcttctactccaacatcatgaacttcttcaagaccgagatcaccctggccaacggcgagatccggaagcggcccctgatcgagaccaacggcgagaccggcgagatcgtgtgggacaagggccgggacttcgccaccgtgcggaaggtgctgtccatgccccaggtgaacatcgtgaagaagaccgaggtgcagaccggcggcttctccaaggagtccatcctgcccaagcggaactccgacaagctgatcgcccggaagaaggactgggaccccaagaagtacggcggcttcgactcccccaccgtggcctactccgtgctggtggtggccaaggtggagaagggcaagtccaagaagctgaagtccgtgaaggagctgctgggcatcaccatcatggagcggtcctccttcgagaagaaccccatcgacttcctggaggccaagggctacaaggaggtgaagaaggacctgatcatcaagctgcccaagtactccctgttcgagctggagaacggccggaagcggatgctggcctccgccggcgagctgcagaagggcaacgagctggccctgccctccaagtacgtgaacttcctgtacctggcctcccactacgagaagctgaagggctcccccgaggacaacgagcagaagcagctgttcgtggagcagcacaagcactacctggacgagatcatcgagcagatctccgagttctccaagcgggtgatcctggccgacgccaacctggacaaggtgctgtccgcctacaacaagcaccgggacaagcccatccgggagcaggccgagaacatcatccacctgttcaccctgaccaacctgggcgcccccgccgccttcaagtacttcgacaccaccatcgaccggaagcggtacacctccaccaaggaggtgctggacgccaccctgatccaccagtccatcaccggcctgtacgagacccggatcgacctgtcccagctgggcggcgactccggcggctcccggggcaagtgcctggtgggctcctccgagatcatcacccggaactacggcaagaccaccatcaaggaggtggtggagatcttcgacaacgacaagaacatccaggtgctggccttcaacacccacaccgacaacatcgagtgggcccccatcaaggccgcccagctgacccggcccaacgccgagctggtggagctggagatcgacaccctgcacggcgtgaagaccatccggtgcacccccgaccaccccgtgtacaccaagaaccggggctacgtgcgggccgacgagctgaccgacgacgacgagctggtggtggccatctag

SEQ ID NO: 1428 - protein, 1497 aa, synthetic construct
  REGION 1..1497: note = Synthetic
MGKRPAATKKAGQAKKKKDKKYSIGLDIGTNSVGWAVITDEYKVPSKKFKVLGNTDRHSIKKNLIGALLFDSGETAEATRLKRTARRRYTRRKNRICYLQEIFSNEMAKVDDSFFHRLEESFLVEEDKKHERHPIFGNIVDEVAYHEKYPTIYHLRKKLVDSTDKADLRLIYLALAHMIKFRGHFLIEGDLNPDNSDVDKLFIQLVQTYNQLFEENPINASGVDAKAILSARLSKSRRLENLIAQLPGEKKNGLFGNLIALSLGLTPNFKSNFDLAEDAKLQLSKDTYDDDLDNLLAQIGDQYADLFLAAKNLSDAILLSDILRVNTEITKAPLSASMIKRYDEHHQDLTLLKALVRQQLPEKYKEIFFDQSKNGYAGYIDGGASQEEFYKFIKPILEKMDGTEELLVKLNREDLLRKQRTFDNGSIPHQIHLGELHAILRRQEDFYPFLKDNREKIEKILTFRIPYYVGPLARGNSRFAWMTRKSEETITPWNFEEVVDKGASAQSFIERMTNFDKNLPNEKVLPKHSLLYEYFTVYNELTKVKYVTEGMRKPAFLSGEQKKAIVDLLFKTNRKVTVKQLKEDYFKKIECFDSVEISGVEDRFNASLGTYHDLLKIIKDKDFLDNEENEDILEDIVLTLTLFEDREMIEERLKTYAHLFDDKVMKQLKRRRYTGWGRLSRKLINGIRDKQSGKTILDFLKSDGFANRNFMQLIHDDSLTFKEDIQKAQVSGQGDSLHEHIANLAGSPAIKKGILQTVKVVDELVKVMGRHKPENIVIEMARENQTTQKGQKNSRERMKRIEEGIKELGSQILKEHPVENTQLQNEKLYLYYLQNGRDMYVDQELDINRLSDYDVDAIVPQSFLKDDSIDNKVLTRSDKNRGKSDNVPSEEVVKKMKNYWRQLLNAKLITQRKFDNLTKAERGGLSELDKAGFIKRQLVETRQITKHVAQILDSRMNTKYDENDKLIREVKVITLKSKLVSDFRKDFQFYKVREINNYHHAHDAYLNAVVGTALIKKYPKLESEFVYGDYKVYDVRKMIAKSEQEIGKATAKYFFYSNIMNFFKTEITLANGEIRKRPLIETNGETGEIVWDKGRDFATVRKVLSMPQVNIVKKTEVQTGGFSKESILPKRNSDKLIARKKDWDPKKYGGFDSPTVAYSVLVVAKVEKGKSKKLKSVKELLGITIMERSSFEKNPIDFLEAKGYKEVKKDLIIKLPKYSLFELENGRKRMLASAGELQKGNELALPSKYVNFLYLASHYEKLKGSPEDNEQKQLFVEQHKHYLDEIIEQISEFSKRVILADANLDKVLSAYNKHRDKPIREQAENIIHLFTLTNLGAPAAFKYFDTTIDRKRYTSTKEVLDATLIHQSITGLYETRIDLSQLGGDSGGSRGKCLVGSSEIITRNYGKTTIKEVVEIFDNDKNIQVLAFNTHTDNIEWAPIKAAQLTRPNAELVELEIDTLHGVKTIRCTPDHPVYTKNRGYVRADELTDDDELVVAI

SEQ ID NO: 1429 - DNA, 1902 bp, synthetic construct
  misc_feature 1..1902: note = Synthetic
  source 1..1902: mol_type = other DNA
atgggcatggaggccaagacctacatcggcaagctgaagtcccggaagatcgtgtccaacgaggacacctacgacatccagacctccacccacaacttcttcgccaacgacatcctggtgcacaactgcttcaactccggcggctccaagcggaccgccgacggctccgagttcgagtcccccaagaagaagcggaaggtgtccggcggctcctccggcggctccatggactccaccaaggagaagtgcgactcctacaaggacgacctgctgctgcggatgggcctgaacgacaacaaggccggcatggagggcctggacaaggagaagatcaacaagatcatcatggaggccaccaagggctcccggttctacggcaacgagctgaagaaggagaagcaggtgaaccagcggatcgagaacatgatgcagcagaaggcccagatcacctcccagcagctgcggaaggcccagctgcaggtggaccggttcgccatggagctggagcagtcccggaacctgtccaacaccatcgtgcacatcgacatggacgccttctacgccgccgtggagatgcgggacaaccccgagctgaaggacaagcccatcgccgtgggctccatgtccatgctgtccacctccaactaccacgcccggcggttcggcgtgcgggccgccatgcccggcttcatcgccaagcggctgtgcccccagctgatcatcgtgccccccaacttcgacaagtaccgggccgtgtccaaggaggtgaaggagatcctggccgactacgaccccaacttcatggccatgtccctggacgaggcctacctgaacatcaccaagcacctggaggagcggcagaactggcccgaggacaagcggcggtacttcatcaagatgggctcctccgtggagaacgacaaccccggcaaggaggtgaacaagctgtccgagcacgagcggtccatctcccccctgctgttcgaggagtccccctccgacgtgcagccccccggcgaccccttccaggtgaacttcgaggagcagaacaacccccagatcctgcagaactccgtggtgttcggcacctccgcccaggaggtggtgaaggagatccggttccggatcgagcagaagaccaccctgaccgcctccgccggcatcgcccccaacaccatgctggccaaggtgtgctccgacaagaacaagcccaacggccagtaccagatcctgcccaaccggcaggccgtgatggacttcatcaaggacctgcccatccggaaggtgtccggcatcggcaaggtgaccgagaagatgctgaaggccctgggcatcatcacctgcaccgagctgtaccagcagcgggccctgctgtccctgctgttctccgagacctcctggcactacttcctgcacatctccctgggcctgggctccacccacctgacccgggaccgggtgcggaagtccatgtccgtggagcggaccttctccgagatcaacaaggccgaggagcagtactccctgtgccaggagctgtgctccgagctggcccaggacctgcagaaggagcggctgaagggccggaccgtgaccatcaagctgaagaacgtgaacttcgaggtgaagacccgggcctccaccgtgtcctccgtggtgtccaccgccgaggagatcttcgccatcgccaaggagctgctgaagaccgagatcgacgccgacttcccccaccccctgcggctgcggctgatgggcgtgcggatctcctccttccccaacgaggaggaccggaagcaccagcagggcggcggctccggcaagcggaccgccgacggctccggcggcggctcccccaagaagaagcggaaggtgcccgccgccaagcgcgtgaagctggactag

SEQ ID NO: 1430 - protein, 633 aa, synthetic construct
  REGION 1..633: note = Synthetic
MGMEAKTYIGKLKSRKIVSNEDTYDIQTSTHNFFANDILVHNCFNSGGSKRTADGSEFESPKKKRKVSGGSSGGSMDSTKEKCDSYKDDLLLRMGLNDNKAGMEGLDKEKINKIIMEATKGSRFYGNELKKEKQVNQRIENMMQQKAQITSQQLRKAQLQVDRFAMELEQSRNLSNTIVHIDMDAFYAAVEMRDNPELKDKPIAVGSMSMLSTSNYHARRFGVRAAMPGFIAKRLCPQLIIVPPNFDKYRAVSKEVKEILADYDPNFMAMSLDEAYLNITKHLEERQNWPEDKRRYFIKMGSSVENDNPGKEVNKLSEHERSISPLLFEESPSDVQPPGDPFQVNFEEQNNPQILQNSVVFGTSAQEVVKEIRFRIEQKTTLTASAGIAPNTMLAKVCSDKNKPNGQYQILPNRQAVMDFIKDLPIRKVSGIGKVTEKMLKALGIITCTELYQQRALLSLLFSETSWHYFLHISLGLGSTHLTRDRVRKSMSVERTFSEINKAEEQYSLCQELCSELAQDLQKERLKGRTVTIKLKNVNFEVKTRASTVSSVVSTAEEIFAIAKELLKTEIDADFPHPLRLRLMGVRISSFPNEEDRKHQQGGGSGKRTADGSGGGSPKKKRKVPAAKRVKLD

SEQ ID NO: 1431 - DNA, 4482 bp, synthetic construct
  misc_feature 1..4482: note = Synthetic
  source 1..4482: mol_type = other DNA
atgggcaagcggcccgccgccaccaagaaggccggccaggccaagaagaagaaggacaagaagtactccatcggcctggacatcggcaccaactccgtgggctgggccgtgatcaccgacgagtacaaggtgccctccaagaagttcaaggtgctgggcaacaccgaccggcactccatcaagaagaacctgatcggcgccctgctgttcgactccggcgagaccgccgaggccacccggctgaagcggaccgcccggcggcggtacacccggcggaagaaccggatctgctacctgcaggagatcttctccaacgagatggccaaggtggacgactccttcttccaccggctggaggagtccttcctggtggaggaggacaagaagcacgagcggcaccccatcttcggcaacatcgtggacgaggtggcctaccacgagaagtaccccaccatctaccacctgcggaagaagctggtggactccaccgacaaggccgacctgcggctgatctacctggccctggcccacatgatcaagttccggggccacttcctgatcgagggcgacctgaaccccgacaactccgacgtggacaagctgttcatccagctggtgcagacctacaaccagctgttcgaggagaaccccatcaacgcctccggcgtggacgccaaggccatcctgtccgcccggctgtccaagtcccggcggctggagaacctgatcgcccagctgcccggcgagaagaagaacggcctgttcggcaacctgatcgccctgtccctgggcctgacccccaacttcaagtccaacttcgacctggccgaggacgccaagctgcagctgtccaaggacacctacgacgacgacctggacaacctgctggcccagatcggcgaccagtacgccgacctgttcctggccgccaagaacctgtccgacgccatcctgctgtccgacatcctgcgggtgaacaccgagatcaccaaggcccccctgtccgcctccatgatcaagcggtacgacgagcaccaccaggacctgaccctgctgaaggccctggtgcggcagcagctgcccgagaagtacaaggagatcttcttcgaccagtccaagaacggctacgccggctacatcgacggcggcgcctcccaggaggagttctacaagttcatcaagcccatcctggagaagatggacggcaccgaggagctgctggtgaagctgaaccgggaggacctgctgcggaagcagcggaccttcgacaacggctccatcccccaccagatccacctgggcgagctgcacgccatcctgcggcggcaggaggacttctaccccttcctgaaggacaaccgggagaagatcgagaagatcctgaccttccggatcccctactacgtgggccccctggcccggggcaactcccggttcgcctggatgacccggaagtccgaggagaccatcaccccctggaacttcgaggaggtggtggacaagggcgcctccgcccagtccttcatcgagcggatgaccaacttcgacaagaacctgcccaacgagaaggtgctgcccaagcactccctgctgtacgagtacttcaccgtgtacaacgagctgaccaaggtgaagtacgtgaccgagggcatgcggaagcccgccttcctgtccggcgagcagaagaaggccatcgtggacctgctgttcaagaccaaccggaaggtgaccgtgaagcagctgaaggaggactacttcaagaagatcgagtgcttcgactccgtggagatctccggcgtggaggaccggttcaacgcctccctgggcacctaccacgacctgctgaagatcatcaaggacaaggacttcctggacaacgaggagaacgaggacatcctggaggacatcgtgctgaccctgaccctgttcgaggaccgggagatgatcgaggagcggctgaagacctacgcccacctgttcgacgacaaggtgatgaagcagctgaagcggcggcggtacaccggctggggccggctgtcccggaagctgatcaacggcatccgggacaagcagtccggcaagaccatcctggacttcctgaagtccgacggcttcgccaaccggaacttcatgcagctgatccacgacgactccctgaccttcaaggaggacatccagaaggcccaggtgtccggccagggcgactccctgcacgagcacatcgccaacctggccggctcccccgccatcaagaagggcatcctgcagaccgtgaaggtggtggacgagctggtgaaggtgatgggccggcacaagcccgagaacatcgtgatcgagatggcccgggagaaccagaccacccagaagggccagaagaactcccgggagcggatgaagcggatcgaggagggcatcaaggagctgggctcccagatcctgaaggagcaccccgtggagaacacccagctgcagaacgagaagctgtacctgtactacctgcagaacggccgggacatgtacgtggaccaggagctggacatcaaccggctgtccgactacgacgtggacgccatcgtgccccagtccttcctgaaggacgactccatcgacaacaaggtgctgacccggtccgacaagaaccggggcaagtccgacaacgtgccctccgaggaggtggtgaagaagatgaagaactactggcggcagctgctgaacgccaagctgatcacccagcggaagttcgacaacctgaccaaggccgagcggggcggcctgtccgagctggacaaggccggcttcatcaagcggcagctggtggagacccggcagatcaccaagcacgtggcccagatcctggactcccggatgaacaccaagtacgacgagaacgacaagctgatccgggaggtgaaggtgatcaccctgaagtccaagctggtgtccgacttccggaaggacttccagttctacaaggtgcgggagatcaacaactaccaccacgcccacgacgcctacctgaacgccgtggtgggcaccgccctgatcaagaagtaccccaagctggagtccgagttcgtgtacggcgactacaaggtgtacgacgtgcggaagatgatcgccaagtccgagcaggagatcggcaaggccaccgccaagtacttcttctactccaacatcatgaacttcttcaagaccgagatcaccctggccaacggcgagatccggaagcggcccctgatcgagaccaacggcgagaccggcgagatcgtgtgggacaagggccgggacttcgccaccgtgcggaaggtgctgtccatgccccaggtgaacatcgtgaagaagaccgaggtgcagaccggcggcttctccaaggagtccatcctgcccaagcggaactccgacaagctgatcgcccggaagaaggactgggaccccaagaagtacggcggcttcgactcccccaccgtggcctactccgtgctggtggtggccaaggtggagaagggcaagtccaagaagctgaagtccgtgaaggagctgctgggcatcaccatcatggagcggtcctccttcgagaagaaccccatcgacttcctggaggccaagggctacaaggaggtgaagaaggacctgatcatcaagctgcccaagtactccctgttcgagctggagaacggccggaagcggatgctggcctccgccggcgagctgcagaagggcaacgagctggccctgccctccaagtacgtgaacttcctgtacctggcctcccactacgagaagctgaagggctcccccgaggacaacgagcagaagcagctgttcgtggagcagcacaagcactacctggacgagatcatcgagcagatctccgagttctccaagcgggtgatcctggccgacgccaacctggacaaggtgctgtccgcctacaacaagcaccgggacaagcccatccgggagcaggccgagaacatcatccacctgttcaccctgaccaacctgggcgcccccgccgccttcaagtacttcgacaccaccatcgaccggaagcggtacacctccaccaaggaggtgctggacgccaccctgatccaccagtccatcaccggcctgtacgagacccggatcgacctgtcccagctgggcggcgactccggcggctcccggggcaagtgcttcgtgcccggcaccctggtgaacaccgagaacggcctgaagaagatcgaggagatcaaggtgggcgacaaggtgttctcccacaccggcaagctgcaggaggtggtggacaccctgatcttcgaccgggacgaggagatcatctccatcaacggcatcgactgcaccaagaaccacgagttctacgtgatcgacaaggagaacgccaaccgggtgaacgaggacaacatccacctgttcgcccggtgggtgcacgccgaggagctggacatgaagaagcacctgctgatcgagctggagtag

SEQ ID NO: 1432 - protein, 1493 aa, synthetic construct
  REGION 1..1493: note = Synthetic
MGKRPAATKKAGQAKKKKDKKYSIGLDIGTNSVGWAVITDEYKVPSKKFKVLGNTDRHSIKKNLIGALLFDSGETAEATRLKRTARRRYTRRKNRICYLQEIFSNEMAKVDDSFFHRLEESFLVEEDKKHERHPIFGNIVDEVAYHEKYPTIYHLRKKLVDSTDKADLRLIYLALAHMIKFRGHFLIEGDLNPDNSDVDKLFIQLVQTYNQLFEENPINASGVDAKAILSARLSKSRRLENLIAQLPGEKKNGLFGNLIALSLGLTPNFKSNFDLAEDAKLQLSKDTYDDDLDNLLAQIGDQYADLFLAAKNLSDAILLSDILRVNTEITKAPLSASMIKRYDEHHQDLTLLKALVRQQLPEKYKEIFFDQSKNGYAGYIDGGASQEEFYKFIKPILEKMDGTEELLVKLNREDLLRKQRTFDNGSIPHQIHLGELHAILRRQEDFYPFLKDNREKIEKILTFRIPYYVGPLARGNSRFAWMTRKSEETITPWNFEEVVDKGASAQSFIERMTNFDKNLPNEKVLPKHSLLYEYFTVYNELTKVKYVTEGMRKPAFLSGEQKKAIVDLLFKTNRKVTVKQLKEDYFKKIECFDSVEISGVEDRFNASLGTYHDLLKIIKDKDFLDNEENEDILEDIVLTLTLFEDREMIEERLKTYAHLFDDKVMKQLKRRRYTGWGRLSRKLINGIRDKQSGKTILDFLKSDGFANRNFMQLIHDDSLTFKEDIQKAQVSGQGDSLHEHIANLAGSPAIKKGILQTVKVVDELVKVMGRHKPENIVIEMARENQTTQKGQKNSRERMKRIEEGIKELGSQILKEHPVENTQLQNEKLYLYYLQNGRDMYVDQELDINRLSDYDVDAIVPQSFLKDDSIDNKVLTRSDKNRGKSDNVPSEEVVKKMKNYWRQLLNAKLITQRKFDNLTKAERGGLSELDKAGFIKRQLVETRQITKHVAQILDSRMNTKYDENDKLIREVKVITLKSKLVSDFRKDFQFYKVREINNYHHAHDAYLNAVVGTALIKKYPKLESEFVYGDYKVYDVRKMIAKSEQEIGKATAKYFFYSNIMNFFKTEITLANGEIRKRPLIETNGETGEIVWDKGRDFATVRKVLSMPQVNIVKKTEVQTGGFSKESILPKRNSDKLIARKKDWDPKKYGGFDSPTVAYSVLVVAKVEKGKSKKLKSVKELLGITIMERSSFEKNPIDFLEAKGYKEVKKDLIIKLPKYSLFELENGRKRMLASAGELQKGNELALPSKYVNFLYLASHYEKLKGSPEDNEQKQLFVEQHKHYLDEIIEQISEFSKRVILADANLDKVLSAYNKHRDKPIREQAENIIHLFTLTNLGAPAAFKYFDTTIDRKRYTSTKEVLDATLIHQSITGLYETRIDLSQLGGDSGGSRGKCFVPGTLVNTENGLKKIEEIKVGDKVFSHTGKLQEVVDTLIFDRDEEIISINGIDCTKNHEFYVIDKENANRVNEDNIHLFARWVHAEELDMKKHLLIELE

SEQ ID NO: 1433 - DNA, 1902 bp, synthetic construct
  misc_feature 1..1902: note = Synthetic
  source 1..1902: mol_type = other DNA
atgggcatgaagttcaagctgaaggagatcacctccatcgagaccaagcactacaagggcaaggtgcacgacctgaccgtgaaccaggaccactcctacaacgtgcggggcaccgtggtgcacaactgcttcaactccggcggctccaagcggaccgccgacggctccgagttcgagtcccccaagaagaagcggaaggtgtccggcggctcctccggcggctccatggactccaccaaggagaagtgcgactcctacaaggacgacctgctgctgcggatgggcctgaacgacaacaaggccggcatggagggcctggacaaggagaagatcaacaagatcatcatggaggccaccaagggctcccggttctacggcaacgagctgaagaaggagaagcaggtgaaccagcggatcgagaacatgatgcagcagaaggcccagatcacctcccagcagctgcggaaggcccagctgcaggtggaccggttcgccatggagctggagcagtcccggaacctgtccaacaccatcgtgcacatcgacatggacgccttctacgccgccgtggagatgcgggacaaccccgagctgaaggacaagcccatcgccgtgggctccatgtccatgctgtccacctccaactaccacgcccggcggttcggcgtgcgggccgccatgcccggcttcatcgccaagcggctgtgcccccagctgatcatcgtgccccccaacttcgacaagtaccgggccgtgtccaaggaggtgaaggagatcctggccgactacgaccccaacttcatggccatgtccctggacgaggcctacctgaacatcaccaagcacctggaggagcggcagaactggcccgaggacaagcggcggtacttcatcaagatgggctcctccgtggagaacgacaaccccggcaaggaggtgaacaagctgtccgagcacgagcggtccatctcccccctgctgttcgaggagtccccctccgacgtgcagccccccggcgaccccttccaggtgaacttcgaggagcagaacaacccccagatcctgcagaactccgtggtgttcggcacctccgcccaggaggtggtgaaggagatccggttccggatcgagcagaagaccaccctgaccgcctccgccggcatcgcccccaacaccatgctggccaaggtgtgctccgacaagaacaagcccaacggccagtaccagatcctgcccaaccggcaggccgtgatggacttcatcaaggacctgcccatccggaaggtgtccggcatcggcaaggtgaccgagaagatgctgaaggccctgggcatcatcacctgcaccgagctgtaccagcagcgggccctgctgtccctgctgttctccgagacctcctggcactacttcctgcacatctccctgggcctgggctccacccacctgacccgggaccgggtgcggaagtccatgtccgtggagcggaccttctccgagatcaacaaggccgaggagcagtactccctgtgccaggagctgtgctccgagctggcccaggacctgcagaaggagcggctgaagggccggaccgtgaccatcaagctgaagaacgtgaacttcgaggtgaagacccgggcctccaccgtgtcctccgtggtgtccaccgccgaggagatcttcgccatcgccaaggagctgctgaagaccgagatcgacgccgacttcccccaccccctgcggctgcggctgatgggcgtgcggatctcctccttccccaacgaggaggaccggaagcaccagcagggcggcggctccggcaagcggaccgccgacggctccggcggcggctcccccaagaagaagcggaaggtgcccgccgccaagcgcgtgaagctggactag

SEQ ID NO: 1434 - protein, 633 aa, synthetic construct
  REGION 1..633: note = Synthetic
MGMKFKLKEITSIETKHYKGKVHDLTVNQDHSYNVRGTVVHNCFNSGGSKRTADGSEFESPKKKRKVSGGSSGGSMDSTKEKCDSYKDDLLLRMGLNDNKAGMEGLDKEKINKIIMEATKGSRFYGNELKKEKQVNQRIENMMQQKAQITSQQLRKAQLQVDRFAMELEQSRNLSNTIVHIDMDAFYAAVEMRDNPELKDKPIAVGSMSMLSTSNYHARRFGVRAAMPGFIAKRLCPQLIIVPPNFDKYRAVSKEVKEILADYDPNFMAMSLDEAYLNITKHLEERQNWPEDKRRYFIKMGSSVENDNPGKEVNKLSEHERSISPLLFEESPSDVQPPGDPFQVNFEEQNNPQILQNSVVFGTSAQEVVKEIRFRIEQKTTLTASAGIAPNTMLAKVCSDKNKPNGQYQILPNRQAVMDFIKDLPIRKVSGIGKVTEKMLKALGIITCTELYQQRALLSLLFSETSWHYFLHISLGLGSTHLTRDRVRKSMSVERTFSEINKAEEQYSLCQELCSELAQDLQKERLKGRTVTIKLKNVNFEVKTRASTVSSVVSTAEEIFAIAKELLKTEIDADFPHPLRLRLMGVRISSFPNEEDRKHQQGGGSGKRTADGSGGGSPKKKRKVPAAKRVKLD

SEQ ID NO: 1435 - DNA, 4458 bp, synthetic construct
  misc_feature 1..4458: note = Synthetic
  source 1..4458: mol_type = other DNA
atgggcaagcggcccgccgccaccaagaaggccggccaggccaagaagaagaaggacaagaagtactccatcggcctggacatcggcaccaactccgtgggctgggccgtgatcaccgacgagtacaaggtgccctccaagaagttcaaggtgctgggcaacaccgaccggcactccatcaagaagaacctgatcggcgccctgctgttcgactccggcgagaccgccgaggccacccggctgaagcggaccgcccggcggcggtacacccggcggaagaaccggatctgctacctgcaggagatcttctccaacgagatggccaaggtggacgactccttcttccaccggctggaggagtccttcctggtggaggaggacaagaagcacgagcggcaccccatcttcggcaacatcgtggacgaggtggcctaccacgagaagtaccccaccatctaccacctgcggaagaagctggtggactccaccgacaaggccgacctgcggctgatctacctggccctggcccacatgatcaagttccggggccacttcctgatcgagggcgacctgaaccccgacaactccgacgtggacaagctgttcatccagctggtgcagacctacaaccagctgttcgaggagaaccccatcaacgcctccggcgtggacgccaaggccatcctgtccgcccggctgtccaagtcccggcggctggagaacctgatcgcccagctgcccggcgagaagaagaacggcctgttcggcaacctgatcgccctgtccctgggcctgacccccaacttcaagtccaacttcgacctggccgaggacgccaagctgcagctgtccaaggacacctacgacgacgacctggacaacctgctggcccagatcggcgaccagtacgccgacctgttcctggccgccaagaacctgtccgacgccatcctgctgtccgacatcctgcgggtgaacaccgagatcaccaaggcccccctgtccgcctccatgatcaagcggtacgacgagcaccaccaggacctgaccctgctgaaggccctggtgcggcagcagctgcccgagaagtacaaggagatcttcttcgaccagtccaagaacggctacgccggctacatcgacggcggcgcctcccaggaggagttctacaagttcatcaagcccatcctggagaagatggacggcaccgaggagctgctggtgaagctgaaccgggaggacctgctgcggaagcagcggaccttcgacaacggctccatcccccaccagatccacctgggcgagctgcacgccatcctgcggcggcaggaggacttctaccccttcctgaaggacaaccgggagaagatcgagaagatcctgaccttccggatcccctactacgtgggccccctggcccggggcaactcccggttcgcctggatgacccggaagtccgaggagaccatcaccccctggaacttcgaggaggtggtggacaagggcgcctccgcccagtccttcatcgagcggatgaccaacttcgacaagaacctgcccaacgagaaggtgctgcccaagcactccctgctgtacgagtacttcaccgtgtacaacgagctgaccaaggtgaagtacgtgaccgagggcatgcggaagcccgccttcctgtccggcgagcagaagaaggccatcgtggacctgctgttcaagaccaaccggaaggtgaccgtgaagcagctgaaggaggactacttcaagaagatcgagtgcttcgactccgtggagatctccggcgtggaggaccggttcaacgcctccctgggcacctaccacgacctgctgaagatcatcaaggacaaggacttcctggacaacgaggagaacgaggacatcctggaggacatcgtgctgaccctgaccctgttcgaggaccgggagatgatcgaggagcggctgaagacctacgcccacctgttcgacgacaaggtgatgaagcagctgaagcggcggcggtacaccggctggggccggctgtcccggaagctgatcaacggcatccgggacaagcagtccggcaagaccatcctggacttcctgaagtccgacggcttcgccaaccggaacttcatgcagctgatccacgacgactccctgaccttcaaggaggacatccagaaggcccaggtgtccggccagggcgactccctgcacgagcacatcgccaacctggccggctcccccgccatcaagaagggcatcctgcagaccgtgaaggtggtggacgagctggtgaaggtgatgggccggcacaagcccgagaacatcgtgatcgagatggcccgggagaaccagaccacccagaagggccagaagaactcccgggagcggatgaagcggatcgaggagggcatcaaggagctgggctcccagatcctgaaggagcaccccgtggagaacacccagctgcagaacgagaagctgtacctgtactacctgcagaacggccgggacatgtacgtggaccaggagctggacatcaaccggctgtccgactacgacgtggacgccatcgtgccccagtccttcctgaaggacgactccatcgacaacaaggtgctgacccggtccgacaagaaccggggcaagtccgacaacgtgccctccgaggaggtggtgaagaagatgaagaactactggcggcagctgctgaacgccaagctgatcacccagcggaagttcgacaacctgaccaaggccgagcggggcggcctgtccgagctggacaaggccggcttcatcaagcggcagctggtggagacccggcagatcaccaagcacgtggcccagatcctggactcccggatgaacaccaagtacgacgagaacgacaagctgatccgggaggtgaaggtgatcaccctgaagtccaagctggtgtccgacttccggaaggacttccagttctacaaggtgcgggagatcaacaactaccaccacgcccacgacgcctacctgaacgccgtggtgggcaccgccctgatcaagaagtaccccaagctggagtccgagttcgtgtacggcgactacaaggtgtacgacgtgcggaagatgatcgccaagtccgagcaggagatcggcaaggccaccgccaagtacttcttctactccaacatcatgaacttcttcaagaccgagatcaccctggccaacggcgagatccggaagcggcccctgatcgagaccaacggcgagaccggcgagatcgtgtgggacaagggccgggacttcgccaccgtgcggaaggtgctgtccatgccccaggtgaacatcgtgaagaagaccgaggtgcagaccggcggcttctccaaggagtccatcctgcccaagcggaactccgacaagctgatcgcccggaagaaggactgggaccccaagaagtacggcggcttcgactcccccaccgtggcctactccgtgctggtggtggccaaggtggagaagggcaagtccaagaagctgaagtccgtgaaggagctgctgggcatcaccatcatggagcggtcctccttcgagaagaaccccatcgacttcctggaggccaagggctacaaggaggtgaagaaggacctgatcatcaagctgcccaagtactccctgttcgagctggagaacggccggaagcggatgctggcctccgccggcgagctgcagaagggcaacgagctggccctgccctccaagtacgtgaacttcctgtacctggcctcccactacgagaagctgaagggctcccccgaggacaacgagcagaagcagctgttcgtggagcagcacaagcactacctggacgagatcatcgagcagatctccgagttctccaagcgggtgatcctggccgacgccaacctggacaaggtgctgtccgcctacaacaagcaccgggacaagcccatccgggagcaggccgagaacatcatccacctgttcaccctgaccaacctgggcgcccccgccgccttcaagtacttcgacaccaccatcgaccggaagcggtacacctccaccaaggaggtgctggacgccaccctgatccaccagtccatcaccggcctgtacgagacccggatcgacctgtcccagctgggcggcgactccggcggctcccggggcaagtgcctgaccggcgactcccaggtgctgacccggaacggcctgatgtccatcgacaacccccagatcaagggccgggaggtgctgtcctacaacgagaccctgcagcagtgggagtacaagaaggtgctgcggtggctggaccggggcgagaagcagaccctgtccatcaagaccaagaactccaccgtgcggtgcaccgccaaccacctgatccggaccgagcagggctggacccgggccgagaacatcacccccggcatgaagatcctgtcccccgcctag

SEQ ID NO: 1436 - protein, 1485 aa, synthetic construct
  REGION 1..1485: note = Synthetic
MGKRPAATKKAGQAKKKKDKKYSIGLDIGTNSVGWAVITDEYKVPSKKFKVLGNTDRHSIKKNLIGALLFDSGETAEATRLKRTARRRYTRRKNRICYLQEIFSNEMAKVDDSFFHRLEESFLVEEDKKHERHPIFGNIVDEVAYHEKYPTIYHLRKKLVDSTDKADLRLIYLALAHMIKFRGHFLIEGDLNPDNSDVDKLFIQLVQTYNQLFEENPINASGVDAKAILSARLSKSRRLENLIAQLPGEKKNGLFGNLIALSLGLTPNFKSNFDLAEDAKLQLSKDTYDDDLDNLLAQIGDQYADLFLAAKNLSDAILLSDILRVNTEITKAPLSASMIKRYDEHHQDLTLLKALVRQQLPEKYKEIFFDQSKNGYAGYIDGGASQEEFYKFIKPILEKMDGTEELLVKLNREDLLRKQRTFDNGSIPHQIHLGELHAILRRQEDFYPFLKDNREKIEKILTFRIPYYVGPLARGNSRFAWMTRKSEETITPWNFEEVVDKGASAQSFIERMTNFDKNLPNEKVLPKHSLLYEYFTVYNELTKVKYVTEGMRKPAFLSGEQKKAIVDLLFKTNRKVTVKQLKEDYFKKIECFDSVEISGVEDRFNASLGTYHDLLKIIKDKDFLDNEENEDILEDIVLTLTLFEDREMIEERLKTYAHLFDDKVMKQLKRRRYTGWGRLSRKLINGIRDKQSGKTILDFLKSDGFANRNFMQLIHDDSLTFKEDIQKAQVSGQGDSLHEHIANLAGSPAIKKGILQTVKVVDELVKVMGRHKPENIVIEMARENQTTQKGQKNSRERMKRIEEGIKELGSQILKEHPVENTQLQNEKLYLYYLQNGRDMYVDQELDINRLSDYDVDAIVPQSFLKDDSIDNKVLTRSDKNRGKSDNVPSEEVVKKMKNYWRQLLNAKLITQRKFDNLTKAERGGLSELDKAGFIKRQLVETRQITKHVAQILDSRMNTKYDENDKLIREVKVITLKSKLVSDFRKDFQFYKVREINNYHHAHDAYLNAVVGTALIKKYPKLESEFVYGDYKVYDVRKMIAKSEQEIGKATAKYFFYSNIMNFFKTEITLANGEIRKRPLIETNGETGEIVWDKGRDFATVRKVLSMPQVNIVKKTEVQTGGFSKESILPKRNSDKLIARKKDWDPKKYGGFDSPTVAYSVLVVAKVEKGKSKKLKSVKELLGITIMERSSFEKNPIDFLEAKGYKEVKKDLIIKLPKYSLFELENGRKRMLASAGELQKGNELALPSKYVNFLYLASHYEKLKGSPEDNEQKQLFVEQHKHYLDEIIEQISEFSKRVILADANLDKVLSAYNKHRDKPIREQAENIIHLFTLTNLGAPAAFKYFDTTIDRKRYTSTKEVLDATLIHQSITGLYETRIDLSQLGGDSGGSRGKCLTGDSQVLTRNGLMSIDNPQIKGREVLSYNETLQQWEYKKVLRWLDRGEKQTLSIKTKNSTVRCTANHLIRTEQGWTRAENITPGMKILSPA

SEQ ID NO: 1437 - DNA, 1905 bp, synthetic construct
  misc_feature 1..1905: note = Synthetic
  source 1..1905: mol_type = other DNA
atgggcccccagtggcacaccaacttcgaggaggtggagtccgtgaccaagggccaggtggagaaggtgtacgacctggaggtggaggacaaccacaacttcgtggccaacggcctgctggtgcacaactgcttcaactccggcggctccaagcggaccgccgacggctccgagttcgagtcccccaagaagaagcggaaggtgtccggcggctcctccggcggctccatggactccaccaaggagaagtgcgactcctacaaggacgacctgctgctgcggatgggcctgaacgacaacaaggccggcatggagggcctggacaaggagaagatcaacaagatcatcatggaggccaccaagggctcccggttctacggcaacgagctgaagaaggagaagcaggtgaaccagcggatcgagaacatgatgcagcagaaggcccagatcacctcccagcagctgcggaaggcccagctgcaggtggaccggttcgccatggagctggagcagtcccggaacctgtccaacaccatcgtgcacatcgacatggacgccttctacgccgccgtggagatgcgggacaaccccgagctgaaggacaagcccatcgccgtgggctccatgtccatgctgtccacctccaactaccacgcccggcggttcggcgtgcgggccgccatgcccggcttcatcgccaagcggctgtgcccccagctgatcatcgtgccccccaacttcgacaagtaccgggccgtgtccaaggaggtgaaggagatcctggccgactacgaccccaacttcatggccatgtccctggacgaggcctacctgaacatcaccaagcacctggaggagcggcagaactggcccgaggacaagcggcggtacttcatcaagatgggctcctccgtggagaacgacaaccccggcaaggaggtgaacaagctgtccgagcacgagcggtccatctcccccctgctgttcgaggagtccccctccgacgtgcagccccccggcgaccccttccaggtgaacttcgaggagcagaacaacccccagatcctgcagaactccgtggtgttcggcacctccgcccaggaggtggtgaaggagatccggttccggatcgagcagaagaccaccctgaccgcctccgccggcatcgcccccaacaccatgctggccaaggtgtgctccgacaagaacaagcccaacggccagtaccagatcctgcccaaccggcaggccgtgatggacttcatcaaggacctgcccatccggaaggtgtccggcatcggcaaggtgaccgagaagatgctgaaggccctgggcatcatcacctgcaccgagctgtaccagcagcgggccctgctgtccctgctgttctccgagacctcctggcactacttcctgcacatctccctgggcctgggctccacccacctgacccgggaccgggtgcggaagtccatgtccgtggagcggaccttctccgagatcaacaaggccgaggagcagtactccctgtgccaggagctgtgctccgagctggcccaggacctgcagaaggagcggctgaagggccggaccgtgaccatcaagctgaagaacgtgaacttcgaggtgaagacccgggcctccaccgtgtcctccgtggtgtccaccgccgaggagatcttcgccatcgccaaggagctgctgaagaccgagatcgacgccgacttcccccaccccctgcggctgcggctgatgggcgtgcggatctcctccttccccaacgaggaggaccggaagcaccagcagggcggcggctccggcaagcggaccgccgacggctccggcggcggctcccccaagaagaagcggaaggtgcccgccgccaagcgcgtgaagctggactag

SEQ ID NO: 1438 - protein, 634 aa, synthetic construct
  REGION 1..634: note = Synthetic
MGPQWHTNFEEVESVTKGQVEKVYDLEVEDNHNFVANGLLVHNCFNSGGSKRTADGSEFESPKKKRKVSGGSSGGSMDSTKEKCDSYKDDLLLRMGLNDNKAGMEGLDKEKINKIIMEATKGSRFYGNELKKEKQVNQRIENMMQQKAQITSQQLRKAQLQVDRFAMELEQSRNLSNTIVHIDMDAFYAAVEMRDNPELKDKPIAVGSMSMLSTSNYHARRFGVRAAMPGFIAKRLCPQLIIVPPNFDKYRAVSKEVKEILADYDPNFMAMSLDEAYLNITKHLEERQNWPEDKRRYFIKMGSSVENDNPGKEVNKLSEHERSISPLLFEESPSDVQPPGDPFQVNFEEQNNPQILQNSVVFGTSAQEVVKEIRFRIEQKTTLTASAGIAPNTMLAKVCSDKNKPNGQYQILPNRQAVMDFIKDLPIRKVSGIGKVTEKMLKALGIITCTELYQQRALLSLLFSETSWHYFLHISLGLGSTHLTRDRVRKSMSVERTFSEINKAEEQYSLCQELCSELAQDLQKERLKGRTVTIKLKNVNFEVKTRASTVSSVVSTAEEIFAIAKELLKTEIDADFPHPLRLRLMGVRISSFPNEEDRKHQQGGGSGKRTADGSGGGSPKKKRKVPAAKRVKLD

SEQ ID NO: 1439 - DNA, 4518 bp, synthetic construct
  misc_feature 1..4518: note = Synthetic
  source 1..4518: mol_type = other DNA
atgggcaagcggcccgccgccaccaagaaggccggccaggccaagaagaagaaggacaagaagtactccatcggcctggacatcggcaccaactccgtgggctgggccgtgatcaccgacgagtacaaggtgccctccaagaagttcaaggtgctgggcaacaccgaccggcactccatcaagaagaacctgatcggcgccctgctgttcgactccggcgagaccgccgaggccacccggctgaagcggaccgcccggcggcggtacacccggcggaagaaccggatctgctacctgcaggagatcttctccaacgagatggccaaggtggacgactccttcttccaccggctggaggagtccttcctggtggaggaggacaagaagcacgagcggcaccccatcttcggcaacatcgtggacgaggtggcctaccacgagaagtaccccaccatctaccacctgcggaagaagctggtggactccaccgacaaggccgacctgcggctgatctacctggccctggcccacatgatcaagttccggggccacttcctgatcgagggcgacctgaaccccgacaactccgacgtggacaagctgttcatccagctggtgcagacctacaaccagctgttcgaggagaaccccatcaacgcctccggcgtggacgccaaggccatcctgtccgcccggctgtccaagtcccggcggctggagaacctgatcgcccagctgcccggcgagaagaagaacggcctgttcggcaacctgatcgccctgtccctgggcctgacccccaacttcaagtccaacttcgacctggccgaggacgccaagctgcagctgtccaaggacacctacgacgacgacctggacaacctgctggcccagatcggcgaccagtacgccgacctgttcctggccgccaagaacctgtccgacgccatcctgctgtccgacatcctgcgggtgaacaccgagatcaccaaggcccccctgtccgcctccatgatcaagcggtacgacgagcaccaccaggacctgaccctgctgaaggccctggtgcggcagcagctgcccgagaagtacaaggagatcttcttcgaccagtccaagaacggctacgccggctacatcgacggcggcgcctcccaggaggagttctacaagttcatcaagcccatcctggagaagatggacggcaccgaggagctgctggtgaagctgaaccgggaggacctgctgcggaagcagcggaccttcgacaacggctccatcccccaccagatccacctgggcgagctgcacgccatcctgcggcggcaggaggacttctaccccttcctgaaggacaaccgggagaagatcgagaagatcctgaccttccggatcccctactacgtgggccccctggcccggggcaactcccggttcgcctggatgacccggaagtccgaggagaccatcaccccctggaacttcgaggaggtggtggacaagggcgcctccgcccagtccttcatcgagcggatgaccaacttcgacaagaacctgcccaacgagaaggtgctgcccaagcactccctgctgtacgagtacttcaccgtgtacaacgagctgaccaaggtgaagtacgtgaccgagggcatgcggaagcccgccttcctgtccggcgagcagaagaaggccatcgtggacctgctgttcaagaccaaccggaaggtgaccgtgaagcagctgaaggaggactacttcaagaagatcgagtgcttcgactccgtggagatctccggcgtggaggaccggttcaacgcctccctgggcacctaccacgacctgctgaagatcatcaaggacaaggacttcctggacaacgaggagaacgaggacatcctggaggacatcgtgctgaccctgaccctgttcgaggaccgggagatgatcgaggagcggctgaagacctacgcccacctgttcgacgacaaggtgatgaagcagctgaagcggcggcggtacaccggctggggccggctgtcccggaagctgatcaacggcatccgggacaagcagtccggcaagaccatcctggacttcctgaagtccgacggcttcgccaaccggaacttcatgcagctgatccacgacgactccctgaccttcaaggaggacatccagaaggcccaggtgtccggccagggcgactccctgcacgagcacatcgccaacctggccggctcccccgccatcaagaagggcatcctgcagaccgtgaaggtggtggacgagctggtgaaggtgatgggccggcacaagcccgagaacatcgtgatcgagatggcccgggagaaccagaccacccagaagggccagaagaactcccgggagcggatgaagcggatcgaggagggcatcaaggagctgggctcccagatcctgaaggagcaccccgtggagaacacccagctgcagaacgagaagctgtacctgtactacctgcagaacggccgggacatgtacgtggaccaggagctggacatcaaccggctgtccgactacgacgtggacgccatcgtgccccagtccttcctgaaggacgactccatcgacaacaaggtgctgacccggtccgacaagaaccggggcaagtccgacaacgtgccctccgaggaggtggtgaagaagatgaagaactactggcggcagctgctgaacgccaagctgatcacccagcggaagttcgacaacctgaccaaggccgagcggggcggcctgtccgagctggacaaggccggcttcatcaagcggcagctggtggagacccggcagatcaccaagcacgtggcccagatcctggactcccggatgaacaccaagtacgacgagaacgacaagctgatccgggaggtgaaggtgatcaccctgaagtccaagctggtgtccgacttccggaaggacttccagttctacaaggtgcgggagatcaacaactaccaccacgcccacgacgcctacctgaacgccgtggtgggcaccgccctgatcaagaagtaccccaagctggagtccgagttcgtgtacggcgactacaaggtgtacgacgtgcggaagatgatcgccaagtccgagcaggagatcggcaaggccaccgccaagtacttcttctactccaacatcatgaacttcttcaagaccgagatcaccctggccaacggcgagatccggaagcggcccctgatcgagaccaacggcgagaccggcgagatcgtgtgggacaagggccgggacttcgccaccgtgcggaaggtgctgtccatgccccaggtgaacatcgtgaagaagaccgaggtgcagaccggcggcttctccaaggagtccatcctgcccaagcggaactccgacaagctgatcgcccggaagaaggactgggaccccaagaagtacggcggcttcgactcccccaccgtggcctactccgtgctggtggtggccaaggtggagaagggcaagtccaagaagctgaagtccgtgaaggagctgctgggcatcaccatcatggagcggtcctccttcgagaagaaccccatcgacttcctggaggccaagggctacaaggaggtgaagaaggacctgatcatcaagctgcccaagtactccctgttcgagctggagaacggccggaagcggatgctggcctccgccggcgagctgcagaagggcaacgagctggccctgccctccaagtacgtgaacttcctgtacctggcctcccactacgagaagctgaagggctcccccgaggacaacgagcagaagcagctgttcgtggagcagcacaagcactacctggacgagatcatcgagcagatctccgagttctccaagcgggtgatcctggccgacgccaacctggacaaggtgctgtccgcctacaacaagcaccgggacaagcccatccgggagcaggccgagaacatcatccacctgttcaccctgaccaacctgggcgcccccgccgccttcaagtacttcgacaccaccatcgaccggaagcggtacacctccaccaaggaggtgctggacgccaccctgatccaccagtccatcaccggcctgtacgagacccggatcgacctgtcccagctgggcggcgactccggcggctcccggggcaagtgcttctccggcgacaccctggtggccctgaccgacggccggtccgtgtccttcgagcagctggtggaggaggagaagcagggcaagcagaacttctgctacaccatccggcacgacggctccatcggcgtggagaagatcatcaacgcccggaagaccaagaccaacgccaaggtgatcaaggtgaccctggacaacggcgagtccatcatctgcacccccgaccacaagttcatgctgcgggacggctcctacaagtgcgccatggacctgaccctggacgactccctgatgcccctgcaccggaagatctccaccaccgaggactccggccacgcctag

SEQ ID NO: 1440 - protein, 1505 aa, synthetic construct
  REGION 1..1505: note = Synthetic
MGKRPAATKKAGQAKKKKDKKYSIGLDIGTNSVGWAVITDEYKVPSKKFKVLGNTDRHSIKKNLIGALLFDSGETAEATRLKRTARRRYTRRKNRICYLQEIFSNEMAKVDDSFFHRLEESFLVEEDKKHERHPIFGNIVDEVAYHEKYPTIYHLRKKLVDSTDKADLRLIYLALAHMIKFRGHFLIEGDLNPDNSDVDKLFIQLVQTYNQLFEENPINASGVDAKAILSARLSKSRRLENLIAQLPGEKKNGLFGNLIALSLGLTPNFKSNFDLAEDAKLQLSKDTYDDDLDNLLAQIGDQYADLFLAAKNLSDAILLSDILRVNTEITKAPLSASMIKRYDEHHQDLTLLKALVRQQLPEKYKEIFFDQSKNGYAGYIDGGASQEEFYKFIKPILEKMDGTEELLVKLNREDLLRKQRTFDNGSIPHQIHLGELHAILRRQEDFYPFLKDNREKIEKILTFRIPYYVGPLARGNSRFAWMTRKSEETITPWNFEEVVDKGASAQSFIERMTNFDKNLPNEKVLPKHSLLYEYFTVYNELTKVKYVTEGMRKPAFLSGEQKKAIVDLLFKTNRKVTVKQLKEDYFKKIECFDSVEISGVEDRFNASLGTYHDLLKIIKDKDFLDNEENEDILEDIVLTLTLFEDREMIEERLKTYAHLFDDKVMKQLKRRRYTGWGRLSRKLINGIRDKQSGKTILDFLKSDGFANRNFMQLIHDDSLTFKEDIQKAQVSGQGDSLHEHIANLAGSPAIKKGILQTVKVVDELVKVMGRHKPENIVIEMARENQTTQKGQKNSRERMKRIEEGIKELGSQILKEHPVENTQLQNEKLYLYYLQNGRDMYVDQELDINRLSDYDVDAIVPQSFLKDDSIDNKVLTRSDKNRGKSDNVPSEEVVKKMKNYWRQLLNAKLITQRKFDNLTKAERGGLSELDKAGFIKRQLVETRQITKHVAQILDSRMNTKYDENDKLIREVKVITLKSKLVSDFRKDFQFYKVREINNYHHAHDAYLNAVVGTALIKKYPKLESEFVYGDYKVYDVRKMIAKSEQEIGKATAKYFFYSNIMNFFKTEITLANGEIRKRPLIETNGETGEIVWDKGRDFATVRKVLSMPQVNIVKKTEVQTGGFSKESILPKRNSDKLIARKKDWDPKKYGGFDSPTVAYSVLVVAKVEKGKSKKLKSVKELLGITIMERSSFEKNPIDFLEAKGYKEVKKDLIIKLPKYSLFELENGRKRMLASAGELQKGNELALPSKYVNFLYLASHYEKLKGSPEDNEQKQLFVEQHKHYLDEIIEQISEFSKRVILADANLDKVLSAYNKHRDKPIREQAENIIHLFTLTNLGAPAAFKYFDTTIDRKRYTSTKEVLDATLIHQSITGLYETRIDLSQLGGDSGGSRGKCFSGDTLVALTDGRSVSFEQLVEEEKQGKQNFCYTIRHDGSIGVEKIINARKTKTNAKVIKVTLDNGESIICTPDHKFMLRDGSYKCAMDLTLDDSLMPLHRKISTTEDSGHA

SEQ ID NO: 1441 - DNA, 1914 bp, synthetic construct
  misc_feature 1..1914: note = Synthetic
  source 1..1914: mol_type = other DNA
atgggcatggaggccgtgctgaactacaaccaccggatcgtgaacatcgaggccgtgtccgagaccatcgacgtgtacgacatcgaggtgccccacacccacaacttcgccctggcctccggcgtgttcgtgcacaactgcttcaactccggcggctccaagcggaccgccgacggctccgagttcgagtcccccaagaagaagcggaaggtgtccggcggctcctccggcggctccatggactccaccaaggagaagtgcgactcctacaaggacgacctgctgctgcggatgggcctgaacgacaacaaggccggcatggagggcctggacaaggagaagatcaacaagatcatcatggaggccaccaagggctcccggttctacggcaacgagctgaagaaggagaagcaggtgaaccagcggatcgagaacatgatgcagcagaaggcccagatcacctcccagcagctgcggaaggcccagctgcaggtggaccggttcgccatggagctggagcagtcccggaacctgtccaacaccatcgtgcacatcgacatggacgccttctacgccgccgtggagatgcgggacaaccccgagctgaaggacaagcccatcgccgtgggctccatgtccatgctgtccacctccaactaccacgcccggcggttcggcgtgcgggccgccatgcccggcttcatcgccaagcggctgtgcccccagctgatcatcgtgccccccaacttcgacaagtaccgggccgtgtccaaggaggtgaaggagatcctggccgactacgaccccaacttcatggccatgtccctggacgaggcctacctgaacatcaccaagcacctggaggagcggcagaactggcccgaggacaagcggcggtacttcatcaagatgggctcctccgtggagaacgacaaccccggcaaggaggtgaacaagctgtccgagcacgagcggtccatctcccccctgctgttcgaggagtccccctccgacgtgcagccccccggcgaccccttccaggtgaacttcgaggagcagaacaacccccagatcctgcagaactccgtggtgttcggcacctccgcccaggaggtggtgaaggagatccggttccggatcgagcagaagaccaccctgaccgcctccgccggcatcgcccccaacaccatgctggccaaggtgtgctccgacaagaacaagcccaacggccagtaccagatcctgcccaaccggcaggccgtgatggacttcatcaaggacctgcccatccggaaggtgtccggcatcggcaaggtgaccgagaagatgctgaaggccctgggcatcatcacctgcaccgagctgtaccagcagcgggccctgctgtccctgctgttctccgagacctcctggcactacttcctgcacatctccctgggcctgggctccacccacctgacccgggaccgggtgcggaagtccatgtccgtggagcggaccttctccgagatcaacaaggccgaggagcagtactccctgtgccaggagctgtgctccgagctggcccaggacctgcagaaggagcggctgaagggccggaccgtgaccatcaagctgaagaacgtgaacttcgaggtgaagacccgggcctccaccgtgtcctccgtggtgtccaccgccgaggagatcttcgccatcgccaaggagctgctgaagaccgagatcgacgccgacttcccccaccccctgcggctgcggctgatgggcgtgcggatctcctccttccccaacgaggaggaccggaagcaccagcagggcggcggctccggcaagcggaccgccgacggctccggcggcggctcccccaagaagaagcggaaggtgcccgccgccaagcgcgtgaagctggactag

SEQ ID NO: 1442 - protein, 637 aa, synthetic construct
  REGION 1..637: note = Synthetic
MGMEAVLNYNHRIVNIEAVSETIDVYDIEVPHTHNFALASGVFVHNCFNSGGSKRTADGSEFESPKKKRKVSGGSSGGSMDSTKEKCDSYKDDLLLRMGLNDNKAGMEGLDKEKINKIIMEATKGSRFYGNELKKEKQVNQRIENMMQQKAQITSQQLRKAQLQVDRFAMELEQSRNLSNTIVHIDMDAFYAAVEMRDNPELKDKPIAVGSMSMLSTSNYHARRFGVRAAMPGFIAKRLCPQLIIVPPNFDKYRAVSKEVKEILADYDPNFMAMSLDEAYLNITKHLEERQNWPEDKRRYFIKMGSSVENDNPGKEVNKLSEHERSISPLLFEESPSDVQPPGDPFQVNFEEQNNPQILQNSVVFGTSAQEVVKEIRFRIEQKTTLTASAGIAPNTMLAKVCSDKNKPNGQYQILPNRQAVMDFIKDLPIRKVSGIGKVTEKMLKALGIITCTELYQQRALLSLLFSETSWHYFLHISLGLGSTHLTRDRVRKSMSVERTFSEINKAEEQYSLCQELCSELAQDLQKERLKGRTVTIKLKNVNFEVKTRASTVSSVVSTAEEIFAIAKELLKTEIDADFPHPLRLRLMGVRISSFPNEEDRKHQQGGGSGKRTADGSGGGSPKKKRKVPAAKRVKLD

SEQ ID NO: 1443 - DNA, 4512 bp, synthetic construct
  misc_feature 1..4512: note = Synthetic
  source 1..4512: mol_type = other DNA
atgggcaagcggcccgccgccaccaagaaggccggccaggccaagaagaagaaggacaagaagtactccatcggcctggacatcggcaccaactccgtgggctgggccgtgatcaccgacgagtacaaggtgccctccaagaagttcaaggtgctgggcaacaccgaccggcactccatcaagaagaacctgatcggcgccctgctgttcgactccggcgagaccgccgaggccacccggctgaagcggaccgcccggcggcggtacacccggcggaagaaccggatctgctacctgcaggagatcttctccaacgagatggccaaggtggacgactccttcttccaccggctggaggagtccttcctggtggaggaggacaagaagcacgagcggcaccccatcttcggcaacatcgtggacgaggtggcctaccacgagaagtaccccaccatctaccacctgcggaagaagctggtggactccaccgacaaggccgacctgcggctgatctacctggccctggcccacatgatcaagttccggggccacttcctgatcgagggcgacctgaaccccgacaactccgacgtggacaagctgttcatccagctggtgcagacctacaaccagctgttcgaggagaaccccatcaacgcctccggcgtggacgccaaggccatcctgtccgcccggctgtccaagtcccggcggctggagaacctgatcgcccagctgcccggcgagaagaagaacggcctgttcggcaacctgatcgccctgtccctgggcctgacccccaacttcaagtccaacttcgacctggccgaggacgccaagctgcagctgtccaaggacacctacgacgacgacctggacaacctgctggcccagatcggcgaccagtacgccgacctgttcctggccgccaagaacctgtccgacgccatcctgctgtccgacatcctgcgggtgaacaccgagatcaccaaggcccccctgtccgcctccatgatcaagcggtacgacgagcaccaccaggacctgaccctgctgaaggccctggtgcggcagcagctgcccgagaagtacaaggagatcttcttcgaccagtccaagaacggctacgccggctacatcgacggcggcgcctcccaggaggagttctacaagttcatcaagcccatcctggagaagatggacggcaccgaggagctgctggtgaagctgaaccgggaggacctgctgcggaagcagcggaccttcgacaacggctccatcccccaccagatccacctgggcgagctgcacgccatcctgcggcggcaggaggacttctaccccttcctgaaggacaaccgggagaagatcgagaagatcctgaccttccggatcccctactacgtgggccccctggcccggggcaactcccggttcgcctggatgacccggaagtccgaggagaccatcaccccctggaacttcgaggaggtggtggacaagggcgcctccgcccagtccttcatcgagcggatgaccaacttcgacaagaacctgcccaacgagaaggtgctgcccaagcactccctgctgtacgagtacttcaccgtgtacaacgagctgaccaaggtgaagtacgtgaccgagggcatgcggaagcccgccttcctgtccggcgagcagaagaaggccatcgtggacctgctgttcaagaccaaccggaaggtgaccgtgaagcagctgaaggaggactacttcaagaagatcgagtgcttcgactccgtggagatctccggcgtggaggaccggttcaacgcctccctgggcacctaccacgacctgctgaagatcatcaaggacaaggacttcctggacaacgaggagaacgaggacatcctggaggacatcgtgctgaccctgaccctgttcgaggaccgggagatgatcgaggagcggctgaagacctacgcccacctgttcgacgacaaggtgatgaagcagctgaagcggcggcggtacaccggctggggccggctgtcccggaagctgatcaacggcatccgggacaagcagtccggcaagaccatcctggacttcctgaagtccgacggcttcgccaaccggaacttcatgcagctgatccacgacgactccctgaccttcaaggaggacatccagaaggcccaggtgtccggccagggcgactccctgcacgagcacatcgccaacctggccggctcccccgccatcaagaagggcatcctgcagaccgtgaaggtggtggacgagctggtgaaggtgatgggccggcacaagcccgagaacatcgtgatcgagatggcccgggagaaccagaccacccagaagggccagaagaactcccgggagcggatgaagcggatcgaggagggcatcaaggagctgggctcccagatcctgaaggagcaccccgtggagaacacccagctgcagaacgagaagctgtacctgtactacctgcagaacggccgggacatgtacgtggaccaggagctggacatcaaccggctgtccgactacgacgtggacgccatcgtgccccagtccttcctgaaggacgactccatcgacaacaaggtgctgacccggtccgacaagaaccggggcaagtccgacaacgtgccctccgaggaggtggtgaagaagatgaagaactactggcggcagctgctgaacgccaagctgatcacccagcggaagttcgacaacctgaccaaggccgagcggggcggcctgtccgagctggacaaggccggcttcatcaagcggcagctggtggagacccggcagatcaccaagcacgtggcccagatcctggactcccggatgaacaccaagtacgacgagaacgacaagctgatccgggaggtgaaggtgatcaccctgaagtccaagctggtgtccgacttccggaaggacttccagttctacaaggtgcgggagatcaacaactaccaccacgcccacgacgcctacctgaacgccgtggtgggcaccgccctgatcaagaagtaccccaagctggagtccgagttcgtgtacggcgactacaaggtgtacgacgtgcggaagatgatcgccaagtccgagcaggagatcggcaaggccaccgccaagtacttcttctactccaacatcatgaacttcttcaagaccgagatcaccctggccaacggcgagatccggaagcggcccctgatcgagaccaacggcgagaccggcgagatcgtgtgggacaagggccgggacttcgccaccgtgcggaaggtgctgtccatgccccaggtgaacatcgtgaagaagaccgaggtgcagaccggcggcttctccaaggagtccatcctgcccaagcggaactccgacaagctgatcgcccggaagaaggactgggaccccaagaagtacggcggcttcgactcccccaccgtggcctactccgtgctggtggtggccaaggtggagaagggcaagtccaagaagctgaagtccgtgaaggagctgctgggcatcaccatcatggagcggtcctccttcgagaagaaccccatcgacttcctggaggccaagggctacaaggaggtgaagaaggacctgatcatcaagctgcccaagtactccctgttcgagctggagaacggccggaagcggatgctggcctccgccggcgagctgcagaagggcaacgagctggccctgccctccaagtacgtgaacttcctgtacctggcctcccactacgagaagctgaagggctcccccgaggacaacgagcagaagcagctgttcgtggagcagcacaagcactacctggacgagatcatcgagcagatctccgagttctccaagcgggtgatcctggccgacgccaacctggacaaggtgctgtccgcctacaacaagcaccgggacaagcccatccgggagcaggccgagaacatcatccacctgttcaccctgaccaacctgggcgcccccgccgccttcaagtacttcgacaccaccatcgaccggaagcggtacacctccaccaaggaggtgctggacgccaccctgatccaccagtccatcaccggcctgtacgagacccggatcgacctgtcccagctgggcggcgactccggcggctcccggggcaagcagctggccctggacacccccatccccacccccgacggctggaccaccatgggcgagatcaaggccggcgacaaggtgatcgacgagaagggccggccctgcaacgtggtggccatctccgagatcgacgacaccgagcaggcctacaagatcaacttccgggacggcacctccatcgtggccggcgagcggcacctgtggaaggtgcaggtgaccaacaacggccggcgggagaagctgctgaccaccggcgagatgtaccagaagcagttcaagaccaagtccaaggagaaccgggccctgttccggatccccatcgccgacgccttcatctag

SEQ ID NO: 1444 - protein, 1503 aa, synthetic construct
  REGION 1..1503: note = Synthetic
MGKRPAATKKAGQAKKKKDKKYSIGLDIGTNSVGWAVITDEYKVPSKKFKVLGNTDRHSIKKNLIGALLFDSGETAEATRLKRTARRRYTRRKNRICYLQEIFSNEMAKVDDSFFHRLEESFLVEEDKKHERHPIFGNIVDEVAYHEKYPTIYHLRKKLVDSTDKADLRLIYLALAHMIKFRGHFLIEGDLNPDNSDVDKLFIQLVQTYNQLFEENPINASGVDAKAILSARLSKSRRLENLIAQLPGEKKNGLFGNLIALSLGLTPNFKSNFDLAEDAKLQLSKDTYDDDLDNLLAQIGDQYADLFLAAKNLSDAILLSDILRVNTEITKAPLSASMIKRYDEHHQDLTLLKALVRQQLPEKYKEIFFDQSKNGYAGYIDGGASQEEFYKFIKPILEKMDGTEELLVKLNREDLLRKQRTFDNGSIPHQIHLGELHAILRRQEDFYPFLKDNREKIEKILTFRIPYYVGPLARGNSRFAWMTRKSEETITPWNFEEVVDKGASAQSFIERMTNFDKNLPNEKVLPKHSLLYEYFTVYNELTKVKYVTEGMRKPAFLSGEQKKAIVDLLFKTNRKVTVKQLKEDYFKKIECFDSVEISGVEDRFNASLGTYHDLLKIIKDKDFLDNEENEDILEDIVLTLTLFEDREMIEERLKTYAHLFDDKVMKQLKRRRYTGWGRLSRKLINGIRDKQSGKTILDFLKSDGFANRNFMQLIHDDSLTFKEDIQKAQVSGQGDSLHEHIANLAGSPAIKKGILQTVKVVDELVKVMGRHKPENIVIEMARENQTTQKGQKNSRERMKRIEEGIKELGSQILKEHPVENTQLQNEKLYLYYLQNGRDMYVDQELDINRLSDYDVDAIVPQSFLKDDSIDNKVLTRSDKNRGKSDNVPSEEVVKKMKNYWRQLLNAKLITQRKFDNLTKAERGGLSELDKAGFIKRQLVETRQITKHVAQILDSRMNTKYDENDKLIREVKVITLKSKLVSDFRKDFQFYKVREINNYHHAHDAYLNAVVGTALIKKYPKLESEFVYGDYKVYDVRKMIAKSEQEIGKATAKYFFYSNIMNFFKTEITLANGEIRKRPLIETNGETGEIVWDKGRDFATVRKVLSMPQVNIVKKTEVQTGGFSKESILPKRNSDKLIARKKDWDPKKYGGFDSPTVAYSVLVVAKVEKGKSKKLKSVKELLGITIMERSSFEKNPIDFLEAKGYKEVKKDLIIKLPKYSLFELENGRKRMLASAGELQKGNELALPSKYVNFLYLASHYEKLKGSPEDNEQKQLFVEQHKHYLDEIIEQISEFSKRVILADANLDKVLSAYNKHRDKPIREQAENIIHLFTLTNLGAPAAFKYFDTTIDRKRYTSTKEVLDATLIHQSITGLYETRIDLSQLGGDSGGSRGKQLALDTPIPTPDGWTTMGEIKAGDKVIDEKGRPCNVVAISEIDDTEQAYKINFRDGTSIVAGERHLWKVQVTNNGRREKLLTTGEMYQKQFKTKSKENRALFRIPIADAFI

SEQ ID NO: 1445 - RNA, 7222 nt, synthetic construct
  misc_feature 1..7222: note = Synthetic
  source 1..7222: mol_type = other RNA
gggaagctcagaataaacgctcaactttggccggatctgccaccatgaagcggaccgccgacggctccgagttcgagtcccccaagaagaagcggaaggtgtccggctccgagacccccggcacctccgagtccgccacccccgagtccggcaagggcgaccccaagaagccccggggcaagatgtcctcctacgccttcttcgtgcagacctgccgggaggagcacaagaagaagcaccccgacgcctccgtgaacttctccgagttctccaagaagtgctccgagcggtggaagaccatgtccgccaaggagaagggcaagttcgaggacatggccaaggccgacaaggcccggtacgagcgggagatgaagacctacatcccccccaagggcgagaccaagaagaagttcaaggaccccaacgcccccaagcggcccccctccgccttcttcctgttctgctccgagtaccggcccaagatcaagggcgagcaccccggcctgtccatcggcgacgtggccaagaagctgggcgagatgtggaacaacaccgccgccgacgacaagcagccctacgagaagaaggccgccaagctgaaggagaagtacgagaaggacatcgccgcctaccgggccaagggcaagcccgacgccgccaagaagggcgtggtgaaggccgagaagtccaagaagaagaagggcaccaaggactccaccaaggacatccccgagaccccctccaaggacggcaccaaggactccaccaaggacatccccgagaccccctccaaggacgacaagaagtactccatcggcctggacatcggcaccaactccgtgggctgggccgtgatcaccgacgagtacaaggtgccctccaagaagttcaaggtgctgggcaacaccgaccggcactccatcaagaagaacctgatcggcgccctgctgttcgactccggcgagaccgccgaggccacccggctgaagcggaccgcccggcggcggtacacccggcggaagaaccggatctgctacctgcaggagatcttctccaacgagatggccaaggtggacgactccttcttccaccggctggaggagtccttcctggtggaggaggacaagaagcacgagcggcaccccatcttcggcaacatcgtggacgaggtggcctaccacgagaagtaccccaccatctaccacctgcggaagaagctggtggactccaccgacaaggccgacctgcggctgatctacctggccctggcccacatgatcaagttccggggccacttcctgatcgagggcgacctgaaccccgacaactccgacgtggacaagctgttcatccagctggtgcagacctacaaccagctgttcgaggagaaccccatcaacgcctccggcgtggacgccaaggccatcctgtccgcccggctgtccaagtcccggcggctggagaacctgatcgcccagctgcccggcgagaagaagaacggcctgttcggcaacctgatcgccctgtccctgggcctgacccccaacttcaagtccaacttcgacctggccgaggacgccaagctgcagctgtccaaggacacctacgacgacgacctggacaacctgctggcccagatcggcgaccagtacgccgacctgttcctggccgccaagaacctgtccgacgccatcctgctgtccgacatcctgcgggtgaacaccgagatcaccaaggcccccctgtccgcctccatgatcaagcggtacgacgagcaccaccaggacctgaccctgctgaaggccctggtgcggcagcagctgcccgagaagtacaaggagatcttcttcgaccagtccaagaacggctacgccggctacatcgacggcggcgcctcccaggaggagttctacaagttcatcaagcccatcctggagaagatggacggcaccgaggagctgctggtgaagctgaaccgggaggacctgctgcggaagcagcggaccttcgacaacggctccatcccccaccagatccacctgggcgagctgcacgccatcctgcggcggcaggaggacttctaccccttcctgaaggacaaccgggagaagatcgagaagatcctgaccttccggatcccctactacgtgggccccctggcccggggcaactcccggttcgcctggatgacccggaagtccgaggagaccatcaccccctggaacttcgaggaggtggtggacaagggcgcctccgcccagtccttcatcgagcggatgaccaacttcgacaagaacctgcccaacgagaaggtgctgcccaagcactccctgctgtacgagtacttcaccgtgtacaacgagctgaccaaggtgaagtacgtgaccgagggcatgcggaagcccgccttcctgtccggcgagcagaagaaggccatcgtggacctgctgttcaagaccaaccggaaggtgaccgtgaagcagctgaaggaggactacttcaagaagatcgagtgcttcgactccgtggagatctccggcgtggaggaccggttcaacgcctccctgggcacctaccacgacctgctgaagatcatcaaggacaaggacttcctggacaacgaggagaacgaggacatcctggaggacatcgtgctgaccctgaccctgttcgaggaccgggagatgatcgaggagcggctgaagacctacgcccacctgttcgacgacaaggtgatgaagcagctgaagcggcggcggtacaccggctggggccggctgtcccggaagctgatcaacggcatccgggacaagcagtccggcaagaccatcctggacttcctgaagtccgacggcttcgccaaccggaacttcatgcagctgatccacgacgactccctgaccttcaaggaggacatccagaaggcccaggtgtccggccagggcgactccctgcacgagcacatcgccaacctggccggctcccccgccatcaagaagggcatcctgcagaccgtgaaggtggtggacgagctggtgaaggtgatgggccggcacaagcccgagaacatcgtgatcgagatggcccgggagaaccagaccacccagaagggccagaagaactcccgggagcggatgaagcggatcgaggagggcatcaaggagctgggctcccagatcctgaaggagcaccccgtggagaacacccagctgcagaacgagaagctgtacctgtactacctgcagaacggccgggacatgtacgtggaccaggagctggacatcaaccggctgtccgactacgacgtggacgccatcgtgccccagtccttcctgaaggacgactccatcgacaacaaggtgctgacccggtccgacaagaaccggggcaagtccgacaacgtgccctccgaggaggtggtgaagaagatgaagaactactggcggcagctgctgaacgccaagctgatcacccagcggaagttcgacaacctgaccaaggccgagcggggcggcctgtccgagctggacaaggccggcttcatcaagcggcagctggtggagacccggcagatcaccaagcacgtggcccagatcctggactcccggatgaacaccaagtacgacgagaacgacaagctgatccgggaggtgaaggtgatcaccctgaagtccaagctggtgtccgacttccggaaggacttccagttctacaaggtgcgggagatcaacaactaccaccacgcccacgacgcctacctgaacgccgtggtgggcaccgccctgatcaagaagtaccccaagctggagtccgagttcgtgtacggcgactacaaggtgtacgacgtgcggaagatgatcgccaagtccgagcaggagatcggcaaggccaccgccaagtacttcttctactccaacatcatgaacttcttcaagaccgagatcaccctggccaacggcgagatccggaagcggcccctgatcgagaccaacggcgagaccggcgagatcgtgtgggacaagggccgggacttcgccaccgtgcggaaggtgctgtccatgccccaggtgaacatcgtgaagaagaccgaggtgcagaccggcggcttctccaaggagtccatcctgcccaagcggaactccgacaagctgatcgcccggaagaaggactgggaccccaagaagtacggcggcttcgactcccccaccgtggcctactccgtgctggtggtggccaaggtggagaagggcaagtccaagaagctgaagtccgtgaaggagctgctgggcatcaccatcatggagcggtcctccttcgagaagaaccccatcgacttcctggaggccaagggctacaaggaggtgaagaaggacctgatcatcaagctgcccaagtactccctgttcgagctggagaacggccggaagcggatgctggcctccgccggcgagctgcagaagggcaacgagctggccctgccctccaagtacgtgaacttcctgtacctggcctcccactacgagaagctgaagggctcccccgaggacaacgagcagaagcagctgttcgtggagcagcacaagcactacctggacgagatcatcgagcagatctccgagttctccaagcgggtgatcctggccgacgccaacctggacaaggtgctgtccgcctacaacaagcaccgggacaagcccatccgggagcaggccgagaacatcatccacctgttcaccctgaccaacctgggcgcccccgccgccttcaagtacttcgacaccaccatcgaccggaagcggtacacctccaccaaggaggtgctggacgccaccctgatccaccagtccatcaccggcctgtacgagacccggatcgacctgtcccagctgggcggcgactccggcggctcctccggcggctccaagcggaccgccgacggctccgagttcgagtcccccaagaagaagcggaaggtgtccggcggctcctccggcggctccatggactccaccaaggagaagtgcgactcctacaaggacgacctgctgctgcggatgggcctgaacgacaacaaggccggcatggagggcctggacaaggagaagatcaacaagatcatcatggaggccaccaagggctcccggttctacggcaacgagctgaagaaggagaagcaggtgaaccagcggatcgagaacatgatgcagcagaaggcccagatcacctcccagcagctgcggaaggcccagctgcaggtggaccggttcgccatggagctggagcagtcccggaacctgtccaacaccatcgtgcacatcgacatggacgccttctacgccgccgtggagatgcgggacaaccccgagctgaaggacaagcccatcgccgtgggctccatgtccatgctgtccacctccaactaccacgcccggcggttcggcgtgcgggccgccatgcccggcttcatcgccaagcggctgtgcccccagctgatcatcgtgccccccaacttcgacaagtaccgggccgtgtccaaggaggtgaaggagatcctggccgactacgaccccaacttcatggccatgtccctggacgaggcctacctgaacatcaccaagcacctggaggagcggcagaactggcccgaggacaagcggcggtacttcatcaagatgggctcctccgtggagaacgacaaccccggcaaggaggtgaacaagctgtccgagcacgagcggtccatctcccccctgctgttcgaggagtccccctccgacgtgcagccccccggcgaccccttccaggtgaacttcgaggagcagaacaacccccagatcctgcagaactccgtggtgttcggcacctccgcccaggaggtggtgaaggagatccggttccggatcgagcagaagaccaccctgaccgcctccgccggcatcgcccccaacaccatgctggccaaggtgtgctccgacaagaacaagcccaacggccagtaccagatcctgcccaaccggcaggccgtgatggacttcatcaaggacctgcccatccggaaggtgtccggcatcggcaaggtgaccgagaagatgctgaaggccctgggcatcatcacctgcaccgagctgtaccagcagcgggccctgctgtccctgctgttctccgagacctcctggcactacttcctgcacatctccctgggcctgggctccacccacctgacccgggaccgggtgcggaagtccatgtccgtggagcggaccttctccgagatcaacaaggccgaggagcagtactccctgtgccaggagctgtgctccgagctggcccaggacctgcagaaggagcggctgaagggccggaccgtgaccatcaagctgaagaacgtgaacttcgaggtgaagacccgggcctccaccgtgtcctccgtggtgtccaccgccgaggagatcttcgccatcgccaaggagctgctgaagaccgagatcgacgccgacttcccccaccccctgcggctgcggctgatgggcgtgcggatctcctccttccccaacgaggaggaccggaagcaccagcagggcggcggctccggcaagcggaccgccgacggctccggcggcggctcccccaagaagaagcggaaggtgtccgagtccgccacccccgagtccgtgtccggctggcggctgttcaagaagatctcctagctagcaccagcctcaagaacacccgaatggagtctctaagctacataataccaacttacactttacaaaatgttgtcccccaaaatgtagccattcgtatctgctcctaataaaaagaaagtttcttcacattctctcgagaaaaaaaaaaaatggaaaaaaaaaaaacggaaaaaaaaaaaaggtaaaaaaaaaaaatataaaaaaaaaaaacataaaaaaaaaaaacgaaaaaaaaaaaacgtaaaaaaaaaaaactcaaaaaaaaaaaagataaaaaaaaaaaacctaaaaaaaaaaaatgtaaaaaaaaaaaagggaaaaaaaaaaaacgcaaaaaaaaaaaacacaaaaaaaaaaaatgcaaaaaaaaaaaatcgaaaaaaaaaaaatctaaaaaaaaaaaacgaaaaaaaaaaaacccaaaaaaaaaaaagacaaaaaaaaaaaatagaaaaaaaaaaagttaaaaaaaaaaaactgaaaaaaaaaaaatttaaaaaaaaaaaatctag

SEQ ID NO: 1446 - DNA, 6663 bp, synthetic construct
  misc_feature 1..6663: note = Synthetic
  source 1..6663: mol_type = other DNA
atgaagcggaccgccgacggctccgagttcgagtcccccaagaagaagcggaaggtgtccggctccgagacccccggcacctccgagtccgccacccccgagtccggcaagggcgaccccaagaagccccggggcaagatgtcctcctacgccttcttcgtgcagacctgccgggaggagcacaagaagaagcaccccgacgcctccgtgaacttctccgagttctccaagaagtgctccgagcggtggaagaccatgtccgccaaggagaagggcaagttcgaggacatggccaaggccgacaaggcccggtacgagcgggagatgaagacctacatcccccccaagggcgagaccaagaagaagttcaaggaccccaacgcccccaagcggcccccctccgccttcttcctgttctgctccgagtaccggcccaagatcaagggcgagcaccccggcctgtccatcggcgacgtggccaagaagctgggcgagatgtggaacaacaccgccgccgacgacaagcagccctacgagaagaaggccgccaagctgaaggagaagtacgagaaggacatcgccgcctaccgggccaagggcaagcccgacgccgccaagaagggcgtggtgaaggccgagaagtccaagaagaagaagggcaccaaggactccaccaaggacatccccgagaccccctccaaggacggcaccaaggactccaccaaggacatccccgagaccccctccaaggacgacaagaagtactccatcggcctggacatcggcaccaactccgtgggctgggccgtgatcaccgacgagtacaaggtgccctccaagaagttcaaggtgctgggcaacaccgaccggcactccatcaagaagaacctgatcggcgccctgctgttcgactccggcgagaccgccgaggccacccggctgaagcggaccgcccggcggcggtacacccggcggaagaaccggatctgctacctgcaggagatcttctccaacgagatggccaaggtggacgactccttcttccaccggctggaggagtccttcctggtggaggaggacaagaagcacgagcggcaccccatcttcggcaacatcgtggacgaggtggcctaccacgagaagtaccccaccatctaccacctgcggaagaagctggtggactccaccgacaaggccgacctgcggctgatctacctggccctggcccacatgatcaagttccggggccacttcctgatcgagggcgacctgaaccccgacaactccgacgtggacaagctgttcatccagctggtgcagacctacaaccagctgttcgaggagaaccccatcaacgcctccggcgtggacgccaaggccatcctgtccgcccggctgtccaagtcccggcggctggagaacctgatcgcccagctgcccggcgagaagaagaacggcctgttcggcaacctgatcgccctgtccctgggcctgacccccaacttcaagtccaacttcgacctggccgaggacgccaagctgcagctgtccaaggacacctacgacgacgacctggacaacctgctggcccagatcggcgaccagtacgccgacctgttcctggccgccaagaacctgtccgacgccatcctgctgtccgacatcctgcgggtgaacaccgagatcaccaaggcccccctgtccgcctccatgatcaagcggtacgacgagcaccaccaggacctgaccctgctgaaggccctggtgcggcagcagctgcccgagaagtacaaggagatcttcttcgaccagtccaagaacggctacgccggctacatcgacggcggcgcctcccaggaggagttctacaagttcatcaagcccatcctggagaagatggacggcaccgaggagctgctggtgaagctgaaccgggaggacctgctgcggaagcagcggaccttcgacaacggctccatcccccaccagatccacctgggcgagctgcacgccatcctgcggcggcaggaggacttctaccccttcctgaaggacaaccgggagaagatcgagaagatcctgaccttccggatcccctactacgtgggccccctggcccggggcaactcccggttcgcctggatgacccggaagtccgaggagaccatcaccccctggaacttcgaggaggtggtggacaagggcgcctccgcccagtccttcatcgagcggatgaccaacttcgacaagaacctgcccaacgagaaggtgctgcccaagcactccctgctgtacgagtacttcaccgtgtacaacgagctgaccaaggtgaagtacgtgaccgagggcatgcggaagcccgccttcctgtccggcgagcagaagaaggccatcgtggacctgctgttcaagaccaaccggaaggtgaccgtgaagcagctgaaggaggactacttcaagaagatcgagtgcttcgactccgtggagatctccggcgtggaggaccggttcaacgcctccctgggcacctaccacgacctgctgaagatcatcaaggacaaggacttcctggacaacgaggagaacgaggacatcctggaggacatcgtgctgaccctgaccctgttcgaggaccgggagatgatcgaggagcggctgaagacctacgcccacctgttcgacgacaaggtgatgaagcagctgaagcggcggcggtacaccggctggggccggctgtcccggaagctgatcaacggcatccgggacaagcagtccggcaagaccatcctggacttcctgaagtccgacggcttcgccaaccggaacttcatgcagctgatccacgacgactccctgaccttcaaggaggacatccagaaggcccaggtgtccggccagggcgactccctgcacgagcacatcgccaacctggccggctcccccgccatcaagaagggcatcctgcagaccgtgaaggtggtggacgagctggtgaaggtgatgggccggcacaagcccgagaacatcgtgatcgagatggcccgggagaaccagaccacccagaagggccagaagaactcccgggagcggatgaagcggatcgaggagggcatcaaggagctgggctcccagatcctgaaggagcaccccgtggagaacacccagctgcagaacgagaagctgtacctgtactacctgcagaacggccgggacatgtacgtggaccaggagctggacatcaaccggctgtccgactacgacgtggacgccatcgtgccccagtccttcctgaaggacgactccatcgacaacaaggtgctgacccggtccgacaagaaccggggcaagtccgacaacgtgccctccgaggaggtggtgaagaagatgaagaactactggcggcagctgctgaacgccaagctgatcacccagcggaagttcgacaacctgaccaaggccgagcggggcggcctgtccgagctggacaaggccggcttcatcaagcggcagctggtggagacccggcagatcaccaagcacgtggcccagatcctggactcccggatgaacaccaagtacgacgagaacgacaagctgatccgggaggtgaaggtgatcaccctgaagtccaagctggtgtccgacttccggaaggacttccagttctacaaggtgcgggagatcaacaactaccaccacgcccacgacgcctacctgaacgccgtggtgggcaccgccctgatcaagaagtaccccaagctggagtccgagttcgtgtacggcgactacaaggtgtacgacgtgcggaagatgatcgccaagtccgagcaggagatcggcaaggccaccgccaagtacttcttctactccaacatcatgaacttcttcaagaccgagatcaccctggccaacggcgagatccggaagcggcccctgatcgagaccaacggcgagaccggcgagatcgtgtgggacaagggccgggacttcgccaccgtgcggaaggtgctgtccatgccccaggtgaacatcgtgaagaagaccgaggtgcagaccggcggcttctccaaggagtccatcctgcccaagcggaactccgacaagctgatcgcccggaagaaggactgggaccccaagaagtacggcggcttcgactcccccaccgtggcctactccgtgctggtggtggccaaggtggagaagggcaagtccaagaagctgaagtccgtgaaggagctgctgggcatcaccatcatggagcggtcctccttcgagaagaaccccatcgacttcctggaggccaagggctacaaggaggtgaagaaggacctgatcatcaagctgcccaagtactccctgttcgagctggagaacggccggaagcggatgctggcctccgccggcgagctgcagaagggcaacgagctggccctgccctccaagtacgtgaacttcctgtacctggcctcccactacgagaagctgaagggctcccccgaggacaacgagcagaagcagctgttcgtggagcagcacaagcactacctggacgagatcatcgagcagatctccgagttctccaagcgggtgatcctggccgacgccaacctggacaaggtgctgtccgcctacaacaagcaccgggacaagcccatccgggagcaggccgagaacatcatccacctgttcaccctgaccaacctgggcgcccccgccgccttcaagtacttcgacaccaccatcgaccggaagcggtacacctccaccaaggaggtgctggacgccaccctgatccaccagtccatcaccggcctgtacgagacccggatcgacctgtcccagctgggcggcgactccggcggctcctccggcggctccaagcggaccgccgacggctccgagttcgagtcccccaagaagaagcggaaggtgtccggcggctcctccggcggctccatggactccaccaaggagaagtgcgactcctacaaggacgacctgctgctgcggatgggcctgaacgacaacaaggccggcatggagggcctggacaaggagaagatcaacaagatcatcatggaggccaccaagggctcccggttctacggcaacgagctgaagaaggagaagcaggtgaaccagcggatcgagaacatgatgcagcagaaggcccagatcacctcccagcagctgcggaaggcccagctgcaggtggaccggttcgccatggagctggagcagtcccggaacctgtccaacaccatcgtgcacatcgacatggacgccttctacgccgccgtggagatgcgggacaaccccgagctgaaggacaagcccatcgccgtgggctccatgtccatgctgtccacctccaactaccacgcccggcggttcggcgtgcgggccgccatgcccggcttcatcgccaagcggctgtgcccccagctgatcatcgtgccccccaacttcgacaagtaccgggccgtgtccaaggaggtgaaggagatcctggccgactacgaccccaacttcatggccatgtccctggacgaggcctacctgaacatcaccaagcacctggaggagcggcagaactggcccgaggacaagcggcggtacttcatcaagatgggctcctccgtggagaacgacaaccccggcaaggaggtgaacaagctgtccgagcacgagcggtccatctcccccctgctgttcgaggagtccccctccgacgtgcagccccccggcgaccccttccaggtgaacttcgaggagcagaacaacccccagatcctgcagaactccgtggtgttcggcacctccgcccaggaggtggtgaaggagatccggttccggatcgagcagaagaccaccctgaccgcctccgccggcatcgcccccaacaccatgctggccaaggtgtgctccgacaagaacaagcccaacggccagtaccagatcctgcccaaccggcaggccgtgatggacttcatcaaggacctgcccatccggaaggtgtccggcatcggcaaggtgaccgagaagatgctgaaggccctgggcatcatcacctgcaccgagctgtaccagcagcgggccctgctgtccctgctgttctccgagacctcctggcactacttcctgcacatctccctgggcctgggctccacccacctgacccgggaccgggtgcggaagtccatgtccgtggagcggaccttctccgagatcaacaaggccgaggagcagtactccctgtgccaggagctgtgctccgagctggcccaggacctgcagaaggagcggctgaagggccggaccgtgaccatcaagctgaagaacgtgaacttcgaggtgaagacccgggcctccaccgtgtcctccgtggtgtccaccgccgaggagatcttcgccatcgccaaggagctgctgaagaccgagatcgacgccgacttcccccaccccctgcggctgcggctgatgggcgtgcggatctcctccttccccaacgaggaggaccggaagcaccagcagggcggcggctccggcaagcggaccgccgacggctccggcggcggctcccccaagaagaagcggaaggtgtccgagtccgccacccccgagtccgtgtccggctggcggctgttcaagaagatctcctag

SEQ ID NO: 1447 - protein, 2220 aa, synthetic construct
  REGION 1..2220: note = Synthetic
MKRTADGSEFESPKKKRKVSGSETPGTSESATPESGKGDPKKPRGKMSSYAFFVQTCREEHKKKHPDASVNFSEFSKKCSERWKTMSAKEKGKFEDMAKADKARYEREMKTYIPPKGETKKKFKDPNAPKRPPSAFFLFCSEYRPKIKGEHPGLSIGDVAKKLGEMWNNTAADDKQPYEKKAAKLKEKYEKDIAAYRAKGKPDAAKKGVVKAEKSKKKKGTKDSTKDIPETPSKDGTKDSTKDIPETPSKDDKKYSIGLDIGTNSVGWAVITDEYKVPSKKFKVLGNTDRHSIKKNLIGALLFDSGETAEATRLKRTARRRYTRRKNRICYLQEIFSNEMAKVDDSFFHRLEESFLVEEDKKHERHPIFGNIVDEVAYHEKYPTIYHLRKKLVDSTDKADLRLIYLALAHMIKFRGHFLIEGDLNPDNSDVDKLFIQLVQTYNQLFEENPINASGVDAKAILSARLSKSRRLENLIAQLPGEKKNGLFGNLIALSLGLTPNFKSNFDLAEDAKLQLSKDTYDDDLDNLLAQIGDQYADLFLAAKNLSDAILLSDILRVNTEITKAPLSASMIKRYDEHHQDLTLLKALVRQQLPEKYKEIFFDQSKNGYAGYIDGGASQEEFYKFIKPILEKMDGTEELLVKLNREDLLRKQRTFDNGSIPHQIHLGELHAILRRQEDFYPFLKDNREKIEKILTFRIPYYVGPLARGNSRFAWMTRKSEETITPWNFEEVVDKGASAQSFIERMTNFDKNLPNEKVLPKHSLLYEYFTVYNELTKVKYVTEGMRKPAFLSGEQKKAIVDLLFKTNRKVTVKQLKEDYFKKIECFDSVEISGVEDRFNASLGTYHDLLKIIKDKDFLDNEENEDILEDIVLTLTLFEDREMIEERLKTYAHLFDDKVMKQLKRRRYTGWGRLSRKLINGIRDKQSGKTILDFLKSDGFANRNFMQLIHDDSLTFKEDIQKAQVSGQGDSLHEHIANLAGSPAIKKGILQTVKVVDELVKVMGRHKPENIVIEMARENQTTQKGQKNSRERMKRIEEGIKELGSQILKEHPVENTQLQNEKLYLYYLQNGRDMYVDQELDINRLSDYDVDAIVPQSFLKDDSIDNKVLTRSDKNRGKSDNVPSEEVVKKMKNYWRQLLNAKLITQRKFDNLTKAERGGLSELDKAGFIKRQLVETRQITKHVAQILDSRMNTKYDENDKLIREVKVITLKSKLVSDFRKDFQFYKVREINNYHHAHDAYLNAVVGTALIKKYPKLESEFVYGDYKVYDVRKMIAKSEQEIGKATAKYFFYSNIMNFFKTEITLANGEIRKRPLIETNGETGEIVWDKGRDFATVRKVLSMPQVNIVKKTEVQTGGFSKESILPKRNSDKLIARKKDWDPKKYGGFDSPTVAYSVLVVAKVEKGKSKKLKSVKELLGITIMERSSFEKNPIDFLEAKGYKEVKKDLIIKLPKYSLFELENGRKRMLASAGELQKGNELALPSKYVNFLYLASHYEKLKGSPEDNEQKQLFVEQHKHYLDEIIEQISEFSKRVILADANLDKVLSAYNKHRDKPIREQAENIIHLFTLTNLGAPAAFKYFDTTIDRKRYTSTKEVLDATLIHQSITGLYETRIDLSQLGGDSGGSSGGSKRTADGSEFESPKKKRKVSGGSSGGSMDSTKEKCDSYKDDLLLRMGLNDNKAGMEGLDKEKINKIIMEATKGSRFYGNELKKEKQVNQRIENMMQQKAQITSQQLRKAQLQVDRFAMELEQSRNLSNTIVHIDMDAFYAAVEMRDNPELKDKPIAVGSMSMLSTSNYHARRFGVRAAMPGFIAKRLCPQLIIVPPNFDKYRAVSKEVKEILADYDPNFMAMSLDEAYLNITKHLEERQNWPEDKRRYFIKMGSSVENDNPGKEVNKLSEHERSISPLLFEESPSDVQPPGDPFQVNFEEQNNPQILQNSVVFGTSAQEVVKEIRFRIEQKTTLTASAGIAPNTMLAKVCSDKNKPNGQYQILPNRQAVMDFIKDLPIRKVSGIGKVTEKMLKALGIITCTELYQQRALLSLLFSETSWHYFLHISLGLGSTHLTRDRVRKSMSVERTFSEINKAEEQYSLCQELCSELAQDLQKERLKGRTVTIKLKNVNFEVKTRASTVSSVVSTAEEIFAIAKELLKTEIDADFPHPLRLRLMGVRISSFPNEEDRKHQQGGGSGKRTADGSGGGSPKKKRKVSESATPESVSGWRLFKKIS

SEQ ID NO: 1448 - RNA, 8275 nt, synthetic construct
  misc_feature 1..8275: note = Synthetic
  source 1..8275: mol_type = other RNA
gggaagctcagaataaacgctcaactttggccggatctgccaccatgaagcggcccgccgccaccaagaaggccggccaggccaagaagaagaagtccggctccgagacccccggcacctccgagtccgccacccccgagtccggcaagggcgaccccaagaagccccggggcaagatgtcctcctacgccttcttcgtgcagacctgccgggaggagcacaagaagaagcaccccgacgcctccgtgaacttctccgagttctccaagaagtgctccgagcggtggaagaccatgtccgccaaggagaagggcaagttcgaggacatggccaaggccgacaaggcccggtacgagcgggagatgaagacctacatcccccccaagggcgagaccaagaagaagttcaaggaccccaacgcccccaagcggcccccctccgccttcttcctgttctgctccgagtaccggcccaagatcaagggcgagcaccccggcctgtccatcggcgacgtggccaagaagctgggcgagatgtggaacaacaccgccgccgacgacaagcagccctacgagaagaaggccgccaagctgaaggagaagtacgagaaggacatcgccgcctaccgggccaagggcaagcccgacgccgccaagaagggcgtggtgaaggccgagaagtccaagaagaagaagggcaccaaggactccaccaaggacatccccgagaccccctccaaggacggcaccaaggactccaccaaggacatccccgagaccccctccaaggacgacaagaagtactccatcggcctggacatcggcaccaactccgtgggctgggccgtgatcaccgacgagtacaaggtgccctccaagaagttcaaggtgctgggcaacaccgaccggcactccatcaagaagaacctgatcggcgccctgctgttcgactccggcgagaccgccgaggccacccggctgaagcggaccgcccggcggcggtacacccggcggaagaaccggatctgctacctgcaggagatcttctccaacgagatggccaaggtggacgactccttcttccaccggctggaggagtccttcctggtggaggaggacaagaagcacgagcggcaccccatcttcggcaacatcgtggacgaggtggcctaccacgagaagtaccccaccatctaccacctgcggaagaagctggtggactccaccgacaaggccgacctgcggctgatctacctggccctggcccacatgatcaagttccggggccacttcctgatcgagggcgacctgaaccccgacaactccgacgtggacaagctgttcatccagctggtgcagacctacaaccagctgttcgaggagaaccccatcaacgcctccggcgtggacgccaaggccatcctgtccgcccggctgtccaagtcccggcggctggagaacctgatcgcccagctgcccggcgagaagaagaacggcctgttcggcaacctgatcgccctgtccctgggcctgacccccaacttcaagtccaacttcgacctggccgaggacgccaagctgcagctgtccaaggacacctacgacgacgacctggacaacctgctggcccagatcggcgaccagtacgccgacctgttcctggccgccaagaacctgtccgacgccatcctgctgtccgacatcctgcgggtgaacaccgagatcaccaaggcccccctgtccgcctccatgatcaagcggtacgacgagcaccaccaggacctgaccctgctgaaggccctggtgcggcagcagctgcccgagaagtacaaggagatcttcttcgaccagtccaagaacggctacgccggctacatcgacggcggcgcctcccaggaggagttctacaagttcatcaagcccatcctggagaagatggacggcaccgaggagctgctggtgaagctgaaccgggaggacctgctgcggaagcagcggaccttcgacaacggctccatcccccaccagatccacctgggcgagctgcacgccatcctgcggcggcaggaggacttctaccccttcctgaaggacaaccgggagaagatcgagaagatcctgaccttccggatcccctactacgtgggccccctggcccggggcaactcccggttcgcctggatgacccggaagtccgaggagaccatcaccccctggaacttcgaggaggtggtggacaagggcgcctccgcccagtccttcatcgagcggatgaccaacttcgacaagaacctgcccaacgagaaggtgctgcccaagcactccctgctgtacgagtacttcaccgtgtacaacgagctgaccaaggtgaagtacgtgaccgagggcatgcggaagcccgccttcctgtccggcgagcagaagaaggccatcgtggacctgctgttcaagaccaaccggaaggtgaccgtgaagcagctgaaggaggactacttcaagaagatcgagtgcttcgactccgtggagatctccggcgtggaggaccggttcaacgcctccctgggcacctaccacgacctgctgaagatcatcaaggacaaggacttcctggacaacgaggagaacgaggacatcctggaggacatcgtgctgaccctgaccctgttcgaggaccgggagatgatcgaggagcggctgaagacctacgcccacctgttcgacgacaaggtgatgaagcagctgaagcggcggcggtacaccggctggggccggctgtcccggaagctgatcaacggcatccgggacaagcagtccggcaagaccatcctggacttcctgaagtccgacggcttcgccaaccggaacttcatgcagctgatccacgacgactccctgaccttcaaggaggacatccagaaggcccaggtgtccggccagggcgactccctgcacgagcacatcgccaacctggccggctcccccgccatcaagaagggcatcctgcagaccgtgaaggtggtggacgagctggtgaaggtgatgggccggcacaagcccgagaacatcgtgatcgagatggcccgggagaaccagaccacccagaagggccagaagaactcccgggagcggatgaagcggatcgaggagggcatcaaggagctgggctcccagatcctgaaggagcaccccgtggagaacacccagctgcagaacgagaagctgtacctgtactacctgcagaacggccgggacatgtacgtggaccaggagctggacatcaaccggctgtccgactacgacgtggacgccatcgtgccccagtccttcctgaaggacgactccatcgacaacaaggtgctgacccggtccgacaagaaccggggcaagtccgacaacgtgccctccgaggaggtggtgaagaagatgaagaactactggcggcagctgctgaacgccaagctgatcacccagcggaagttcgacaacctgaccaaggccgagcggggcggcctgtccgagctggacaaggccggcttcatcaagcggcagctggtggagacccggcagatcaccaagcacgtggcccagatcctggactcccggatgaacaccaagtacgacgagaacgacaagctgatccgggaggtgaaggtgatcaccctgaagtccaagctggtgtccgacttccggaaggacttccagttctacaaggtgcgggagatcaacaactaccaccacgcccacgacgcctacctgaacgccgtggtgggcaccgccctgatcaagaagtaccccaagctggagtccgagttcgtgtacggcgactacaaggtgtacgacgtgcggaagatgatcgccaagtccgagcaggagatcggcaaggccaccgccaagtacttcttctactccaacatcatgaacttcttcaagaccgagatcaccctggccaacggcgagatccggaagcggcccctgatcgagaccaacggcgagaccggcgagatcgtgtgggacaagggccgggacttcgccaccgtgcggaaggtgctgtccatgccccaggtgaacatcgtgaagaagaccgaggtgcagaccggcggcttctccaaggagtccatcctgcccaagcggaactccgacaagctgatcgcccggaagaaggactgggaccccaagaagtacggcggcttcgactcccccaccgtggcctactccgtgctggtggtggccaaggtggagaagggcaagtccaagaagctgaagtccgtgaaggagctgctgggcatcaccatcatggagcggtcctccttcgagaagaaccccatcgacttcctggaggccaagggctacaaggaggtgaagaaggacctgatcatcaagctgcccaagtactccctgttcgagctggagaacggccggaagcggatgctggcctccgccggcgagctgcagaagggcaacgagctggccctgccctccaagtacgtgaacttcctgtacctggcctcccactacgagaagctgaagggctcccccgaggacaacgagcagaagcagctgttcgtggagcagcacaagcactacctggacgagatcatcgagcagatctccgagttctccaagcgggtgatcctggccgacgccaacctggacaaggtgctgtccgcctacaacaagcaccgggacaagcccatccgggagcaggccgagaacatcatccacctgttcaccctgaccaacctgggcgcccccgccgccttcaagtacttcgacaccaccatcgaccggaagcggtacacctccaccaaggaggtgctggacgccaccctgatccaccagtccatcaccggcctgtacgagacccggatcgacctgtcccagctgggcggcgacggcgcccccgagtccgccaccgagtccggcggcacctccaccgagtccgagggctccgccggccccaagaagaagcggaaggtgacctccaccgagtccgagggctccgccggctccgccggctccacctccggctcctcctccggcatgaagatcgccgtggtggacaaggccctgaacaacacccggtacgacaagcacttccagctgtacggcgaggaggtggacgtgttccacatgtgcaacgagaagctgtccggccggctgctgaagaagcacatcaccatcggcacccccgagaaccccttcgaccccaacgactacgacttcgtgatcctggtgggcgccgagcccttcctgtacttcgccggcaagaagggcatcggcgactacaccggcaagcgggtggagtacaacggctacgccaactggatcgcctccatctcccccgcccagctgcacttcaagcccgagatgaagcccgtgttcgacgccaccgtggagaacatccacgacatcatcaacggccgggagaagatcgccaaggccggcgactaccggcccatcaccgaccccgacgaggccgaggagtacatcaagatggtgtacaacatggtgatcggccccgtggccttcgcctccgccacctccgccctgtactgccgggacggctacctgctgggcgtgtccatctcccaccaggagtaccagggcgtgtacatcgactccgactgcctgaccgaggtggccgtgtactacctgcagaagatcctggactccgagaaccacaccatcgtgttccacaacctgaagttcgacatgcacttctacaagtaccacctgggcctgaccttcgacaaggcccacaaggagcggcggctgcacgacaccatgctgcagcactacgtgctggacgagcggcggggcacccacggcctgaagtccctggccatgaagtacaccgacatgggcgactacgacttcgagctggacaagttcaaggacgactactgcaaggcccacaagatcaagaaggaggacttcacctacgacctgatccccttcgacatcatgtggccctacgccgccaaggacaccgacgccaccatccggctgcacaacttcttcctgcccaagatcgagaagaacgagaagctgtgctccctgtactacgacgtgctgatgcccggctgcgtgttcctgcagcgggtggaggaccggggcgtgcccatctccatcgaccggctgaaggaggcccagtaccagctgacccacaacctgaacaaggcccgggagaagctgtacacctaccccgaggtgaagcagctggagcaggaccagaacgaggccttcaaccccaactccgtgaagcagctgcgggtgctgctgttcgactacgtgggcctgacccccaccggcaagctgaccgacaccggcgccgactccaccgacgccgaggccctgaacgagctggccacccagcaccccatcgccaagaccctgctggagatccggaagctgaccaagctgatctccacctacgtggagaagatcctgctgtccatcgacgccgacggctgcatccggaccggcttccacgagcacatgaccacctccggccggctgtcctcctccggcaagctgaacctgcagcagctgccccgggacgagtccatcatcaagggctgcgtggtggccccccccggctaccgggtgatcgcctgggacctgaccaccgccgaggtgtactacgccgccgtgctgtccggcgaccggaacatgcagcaggtgttcatcaacatgcggaacgagcccgacaagtaccccgacttccactccaacatcgcccacatggtgttcaagctgcagtgcgagccccgggacgtgaagaagctgttccccgccctgcggcaggccgccaaggccatcaccttcggcatcctgtacggctccggccccgccaaggtggcccactccgtgaacgaggccctgctggagcaggccgccaagaccggcgagcccttcgtggagtgcaccgtggccgacgccaaggagtacatcgagacctacttcggccagttcccccagctgaagcggtggatcgacaagtgccacgaccagatcaagaaccacggcttcatctactcccacttcggccggaagcggcggctgcacaacatccactccgaggaccggggcgtgcagggcgaggagatccggtccggcttcaacgccatcatccagtccgcctcctccgactccctgctgctgggcgccgtggacgccgacaacgagatcatctccctgggcctggagcaggagatgaagatcgtgatgctggtgcacgactccgtggtggccatcgtgcgggaggacctgatcgaccagtacaacgagatcctgatccggaacatccagaaggaccggggcatctccatccccggctgccccatcggcatcgactccgactccgaggccggcggctcccgggactactcctgcggcaagatgaagaagcagcacccctccatcgcctgcatcgacgacgacgagtacacccggtacgtgaagggcgtgctgctggacgccgagttcgagtacaagaagctggccgccatggacaaggagcaccccgaccactccaagtacaaggacgacaagttcatcgccgtgtgcaaggacctggacaacgtgaagcggatcctgggcgccggcggcggctccggcaagcggaccgccgacggctccggcggcggctcccccaagaagaagcggaaggtgcctgccgctaagagagtgaagctggactccgagtccgccacccccgagtccgtgtccggctggcggctgttcaagaagatctcctagctagcaccagcctcaagaacacccgaatggagtctctaagctacataataccaacttacactttacaaaatgttgtcccccaaaatgtagccattcgtatctgctcctaataaaaagaaagtttcttcacattctctcgagaaaaaaaaaaaatggaaaaaaaaaaaacggaaaaaaaaaaaaggtaaaaaaaaaaaatataaaaaaaaaaaacataaaaaaaaaaaacgaaaaaaaaaaaacgtaaaaaaaaaaaactcaaaaaaaaaaaagataaaaaaaaaaaacctaaaaaaaaaaaatgtaaaaaaaaaaaagggaaaaaaaaaaaacgcaaaaaaaaaaaacacaaaaaaaaaaaatgcaaaaaaaaaaaatcgaaaaaaaaaaaatctaaaaaaaaaaaacgaaaaaaaaaaaacccaaaaaaaaaaaagacaaaaaaaaaaaatagaaaaaaaaaaagttaaaaaaaaaaaactgaaaaaaaaaaaatttaaaaaaaaaaaatctag

SEQ ID NO: 1449 - DNA, 7716 bp, synthetic construct
  misc_feature 1..7716: note = Synthetic
  source 1..7716: mol_type = other DNA
atgaagcggcccgccgccaccaagaaggccggccaggccaagaagaagaagtccggctccgagacccccggcacctccgagtccgccacccccgagtccggcaagggcgaccccaagaagccccggggcaagatgtcctcctacgccttcttcgtgcagacctgccgggaggagcacaagaagaagcaccccgacgcctccgtgaacttctccgagttctccaagaagtgctccgagcggtggaagaccatgtccgccaaggagaagggcaagttcgaggacatggccaaggccgacaaggcccggtacgagcgggagatgaagacctacatcccccccaagggcgagaccaagaagaagttcaaggaccccaacgcccccaagcggcccccctccgccttcttcctgttctgctccgagtaccggcccaagatcaagggcgagcaccccggcctgtccatcggcgacgtggccaagaagctgggcgagatgtggaacaacaccgccgccgacgacaagcagccctacgagaagaaggccgccaagctgaaggagaagtacgagaaggacatcgccgcctaccgggccaagggcaagcccgacgccgccaagaagggcgtggtgaaggccgagaagtccaagaagaagaagggcaccaaggactccaccaaggacatccccgagaccccctccaaggacggcaccaaggactccaccaaggacatccccgagaccccctccaaggacgacaagaagtactccatcggcctggacatcggcaccaactccgtgggctgggccgtgatcaccgacgagtacaaggtgccctccaagaagttcaaggtgctgggcaacaccgaccggcactccatcaagaagaacctgatcggcgccctgctgttcgactccggcgagaccgccgaggccacccggctgaagcggaccgcccggcggcggtacacccggcggaagaaccggatctgctacctgcaggagatcttctccaacgagatggccaaggtggacgactccttcttccaccggctggaggagtccttcctggtggaggaggacaagaagcacgagcggcaccccatcttcggcaacatcgtggacgaggtggcctaccacgagaagtaccccaccatctaccacctgcggaagaagctggtggactccaccgacaaggccgacctgcggctgatctacctggccctggcccacatgatcaagttccggggccacttcctgatcgagggcgacctgaaccccgacaactccgacgtggacaagctgttcatccagctggtgcagacctacaaccagctgttcgaggagaaccccatcaacgcctccggcgtggacgccaaggccatcctgtccgcccggctgtccaagtcccggcggctggagaacctgatcgcccagctgcccggcgagaagaagaacggcctgttcggcaacctgatcgccctgtccctgggcctgacccccaacttcaagtccaacttcgacctggccgaggacgccaagctgcagctgtccaaggacacctacgacgacgacctggacaacctgctggcccagatcggcgaccagtacgccgacctgttcctggccgccaagaacctgtccgacgccatcctgctgtccgacatcctgcgggtgaacaccgagatcaccaaggcccccctgtccgcctccatgatcaagcggtacgacgagcaccaccaggacctgaccctgctgaaggccctggtgcggcagcagctgcccgagaagtacaaggagatcttcttcgaccagtccaagaacggctacgccggctacatcgacggcggcgcctcccaggaggagttctacaagttcatcaagcccatcctggagaagatggacggcaccgaggagctgctggtgaagctgaaccgggaggacctgctgcggaagcagcggaccttcgacaacggctccatcccccaccagatccacctgggcgagctgcacgccatcctgcggcggcaggaggacttctaccccttcctgaaggacaaccgggagaagatcgagaagatcctgaccttccggatcccctactacgtgggccccctggcccggggcaactcccggttcgcctggatgacccggaagtccgaggagaccatcaccccctggaacttcgaggaggtggtggacaagggcgcctccgcccagtccttcatcgagcggatgaccaacttcgacaagaacctgcccaacgagaaggtgctgcccaagcactccctgctgtacgagtacttcaccgtgtacaacgagctgaccaaggtgaagtacgtgaccgagggcatgcggaagcccgccttcctgtccggcgagcagaagaaggccatcgtggacctgctgttcaagaccaaccggaaggtgaccgtgaagcagctgaaggaggactacttcaagaagatcgagtgcttcgactccgtggagatctccggcgtggaggaccggttcaacgcctccctgggcacctaccacgacctgctgaagatcatcaaggacaaggacttcctggacaacgaggagaacgaggacatcctggaggacatcgtgctgaccctgaccctgttcgaggaccgggagatgatcgaggagcggctgaagacctacgcccacctgttcgacgacaaggtgatgaagcagctgaagcggcggcggtacaccggctggggccggctgtcccggaagctgatcaacggcatccgggacaagcagtccggcaagaccatcctggacttcctgaagtccgacggcttcgccaaccggaacttcatgcagctgatccacgacgactccctgaccttcaaggaggacatccagaaggcccaggtgtccggccagggcgactccctgcacgagcacatcgccaacctggccggctcccccgccatcaagaagggcatcctgcagaccgtgaaggtggtggacgagctggtgaaggtgatgggccggcacaagcccgagaacatcgtgatcgagatggcccgggagaaccagaccacccagaagggccagaagaactcccgggagcggatgaagcggatcgaggagggcatcaaggagctgggctcccagatcctgaaggagcaccccgtggagaacacccagctgcagaacgagaagctgtacctgtactacctgcagaacggccgggacatgtacgtggaccaggagctggacatcaaccggctgtccgactacgacgtggacgccatcgtgccccagtccttcctgaaggacgactccatcgacaacaaggtgctgacccggtccgacaagaaccggggcaagtccgacaacgtgccctccgaggaggtggtgaagaagatgaagaactactggcggcagctgctgaacgccaagctgatcacccagcggaagttcgacaacctgaccaaggccgagcggggcggcctgtccgagctggacaaggccggcttcatcaagcggcagctggtggagacccggcagatcaccaagcacgtggcccagatcctggactcccggatgaacaccaagtacgacgagaacgacaagctgatccgggaggtgaaggtgatcaccctgaagtccaagctggtgtccgacttccggaaggacttccagttctacaaggtgcgggagatcaacaactaccaccacgcccacgacgcctacctgaacgccgtggtgggcaccgccctgatcaagaagtaccccaagctggagtccgagttcgtgtacggcgactacaaggtgtacgacgtgcggaagatgatcgccaagtccgagcaggagatcggcaaggccaccgccaagtacttcttctactccaacatcatgaacttcttcaagaccgagatcaccctggccaacggcgagatccggaagcggcccctgatcgagaccaacggcgagaccggcgagatcgtgtgggacaagggccgggacttcgccaccgtgcggaaggtgctgtccatgccccaggtgaacatcgtgaagaagaccgaggtgcagaccggcggcttctccaaggagtccatcctgcccaagcggaactccgacaagctgatcgcccggaagaaggactgggaccccaagaagtacggcggcttcgactcccccaccgtggcctactccgtgctggtggtggccaaggtggagaagggcaagtccaagaagctgaagtccgtgaaggagctgctgggcatcaccatcatggagcggtcctccttcgagaagaaccccatcgacttcctggaggccaagggctacaaggaggtgaagaaggacctgatcatcaagctgcccaagtactccctgttcgagctggagaacggccggaagcggatgctggcctccgccggcgagctgcagaagggcaacgagctggccctgccctccaagtacgtgaacttcctgtacctggcctcccactacgagaagctgaagggctcccccgaggacaacgagcagaagcagctgttcgtggagcagcacaagcactacctggacgagatcatcgagcagatctccgagttctccaagcgggtgatcctggccgacgccaacctggacaaggtgctgtccgcctacaacaagcaccgggacaagcccatccgggagcaggccgagaacatcatccacctgttcaccctgaccaacctgggcgcccccgccgccttcaagtacttcgacaccaccatcgaccggaagcggtacacctccaccaaggaggtgctggacgccaccctgatccaccagtccatcaccggcctgtacgagacccggatcgacctgtcccagctgggcggcgacggcgcccccgagtccgccaccgagtccggcggcacctccaccgagtccgagggctccgccggccccaagaagaagcggaaggtgacctccaccgagtccgagggctccgccggctccgccggctccacctccggctcctcctccggcatgaagatcgccgtggtggacaaggccctgaacaacacccggtacgacaagcacttccagctgtacggcgaggaggtggacgtgttccacatgtgcaacgagaagctgtccggccggctgctgaagaagcacatcaccatcggcacccccgagaaccccttcgaccccaacgactacgacttcgtgatcctggtgggcgccgagcccttcctgtacttcgccggcaagaagggcatcggcgactacaccggcaagcgggtggagtacaacggctacgccaactggatcgcctccatctcccccgcccagctgcacttcaagcccgagatgaagcccgtgttcgacgccaccgtggagaacatccacgacatcatcaacggccgggagaagatcgccaaggccggcgactaccggcccatcaccgaccccgacgaggccgaggagtacatcaagatggtgtacaacatggtgatcggccccgtggccttcgcctccgccacctccgccctgtactgccgggacggctacctgctgggcgtgtccatctcccaccaggagtaccagggcgtgtacatcgactccgactgcctgaccgaggtggccgtgtactacctgcagaagatcctggactccgagaaccacaccatcgtgttccacaacctgaagttcgacatgcacttctacaagtaccacctgggcctgaccttcgacaaggcccacaaggagcggcggctgcacgacaccatgctgcagcactacgtgctggacgagcggcggggcacccacggcctgaagtccctggccatgaagtacaccgacatgggcgactacgacttcgagctggacaagttcaaggacgactactgcaaggcccacaagatcaagaaggaggacttcacctacgacctgatccccttcgacatcatgtggccctacgccgccaaggacaccgacgccaccatccggctgcacaacttcttcctgcccaagatcgagaagaacgagaagctgtgctccctgtactacgacgtgctgatgcccggctgcgtgttcctgcagcgggtggaggaccggggcgtgcccatctccatcgaccggctgaaggaggcccagtaccagctgacccacaacctgaacaaggcccgggagaagctgtacacctaccccgaggtgaagcagctggagcaggaccagaacgaggccttcaaccccaactccgtgaagcagctgcgggtgctgctgttcgactacgtgggcctgacccccaccggcaagctgaccgacaccggcgccgactccaccgacgccgaggccctgaacgagctggccacccagcaccccatcgccaagaccctgctggagatccggaagctgaccaagctgatctccacctacgtggagaagatcctgctgtccatcgacgccgacggctgcatccggaccggcttccacgagcacatgaccacctccggccggctgtcctcctccggcaagctgaacctgcagcagctgccccgggacgagtccatcatcaagggctgcgtggtggccccccccggctaccgggtgatcgcctgggacctgaccaccgccgaggtgtactacgccgccgtgctgtccggcgaccggaacatgcagcaggtgttcatcaacatgcggaacgagcccgacaagtaccccgacttccactccaacatcgcccacatggtgttcaagctgcagtgcgagccccgggacgtgaagaagctgttccccgccctgcggcaggccgccaaggccatcaccttcggcatcctgtacggctccggccccgccaaggtggcccactccgtgaacgaggccctgctggagcaggccgccaagaccggcgagcccttcgtggagtgcaccgtggccgacgccaaggagtacatcgagacctacttcggccagttcccccagctgaagcggtggatcgacaagtgccacgaccagatcaagaaccacggcttcatctactcccacttcggccggaagcggcggctgcacaacatccactccgaggaccggggcgtgcagggcgaggagatccggtccggcttcaacgccatcatccagtccgcctcctccgactccctgctgctgggcgccgtggacgccgacaacgagatcatctccctgggcctggagcaggagatgaagatcgtgatgctggtgcacgactccgtggtggccatcgtgcgggaggacctgatcgaccagtacaacgagatcctgatccggaacatccagaaggaccggggcatctccatccccggctgccccatcggcatcgactccgactccgaggccggcggctcccgggactactcctgcggcaagatgaagaagcagcacccctccatcgcctgcatcgacgacgacgagtacacccggtacgtgaagggcgtgctgctggacgccgagttcgagtacaagaagctggccgccatggacaaggagcaccccgaccactccaagtacaaggacgacaagttcatcgccgtgtgcaaggacctggacaacgtgaagcggatcctgggcgccggcggcggctccggcaagcggaccgccgacggctccggcggcggctcccccaagaagaagcggaaggtgcctgccgctaagagagtgaagctggactccgagtccgccacccccgagtccgtgtccggctggcggctgttcaagaagatctcctag

SEQ ID NO: 1450 - protein, 2571 aa, synthetic construct
  REGION 1..2571: note = Synthetic
MKRPAATKKAGQAKKKKSGSETPGTSESATPESGKGDPKKPRGKMSSYAFFVQTCREEHKKKHPDASVNFSEFSKKCSERWKTMSAKEKGKFEDMAKADKARYEREMKTYIPPKGETKKKFKDPNAPKRPPSAFFLFCSEYRPKIKGEHPGLSIGDVAKKLGEMWNNTAADDKQPYEKKAAKLKEKYEKDIAAYRAKGKPDAAKKGVVKAEKSKKKKGTKDSTKDIPETPSKDGTKDSTKDIPETPSKDDKKYSIGLDIGTNSVGWAVITDEYKVPSKKFKVLGNTDRHSIKKNLIGALLFDSGETAEATRLKRTARRRYTRRKNRICYLQEIFSNEMAKVDDSFFHRLEESFLVEEDKKHERHPIFGNIVDEVAYHEKYPTIYHLRKKLVDSTDKADLRLIYLALAHMIKFRGHFLIEGDLNPDNSDVDKLFIQLVQTYNQLFEENPINASGVDAKAILSARLSKSRRLENLIAQLPGEKKNGLFGNLIALSLGLTPNFKSNFDLAEDAKLQLSKDTYDDDLDNLLAQIGDQYADLFLAAKNLSDAILLSDILRVNTEITKAPLSASMIKRYDEHHQDLTLLKALVRQQLPEKYKEIFFDQSKNGYAGYIDGGASQEEFYKFIKPILEKMDGTEELLVKLNREDLLRKQRTFDNGSIPHQIHLGELHAILRRQEDFYPFLKDNREKIEKILTFRIPYYVGPLARGNSRFAWMTRKSEETITPWNFEEVVDKGASAQSFIERMTNFDKNLPNEKVLPKHSLLYEYFTVYNELTKVKYVTEGMRKPAFLSGEQKKAIVDLLFKTNRKVTVKQLKEDYFKKIECFDSVEISGVEDRFNASLGTYHDLLKIIKDKDFLDNEENEDILEDIVLTLTLFEDREMIEERLKTYAHLFDDKVMKQLKRRRYTGWGRLSRKLINGIRDKQSGKTILDFLKSDGFANRNFMQLIHDDSLTFKEDIQKAQVSGQGDSLHEHIANLAGSPAIKKGILQTVKVVDELVKVMGRHKPENIVIEMARENQTTQKGQKNSRERMKRIEEGIKELGSQILKEHPVENTQLQNEKLYLYYLQNGRDMYVDQELDINRLSDYDVDAIVPQSFLKDDSIDNKVLTRSDKNRGKSDNVPSEEVVKKMKNYWRQLLNAKLITQRKFDNLTKAERGGLSELDKAGFIKRQLVETRQITKHVAQILDSRMNTKYDENDKLIREVKVITLKSKLVSDFRKDFQFYKVREINNYHHAHDAYLNAVVGTALIKKYPKLESEFVYGDYKVYDVRKMIAKSEQEIGKATAKYFFYSNIMNFFKTEITLANGEIRKRPLIETNGETGEIVWDKGRDFATVRKVLSMPQVNIVKKTEVQTGGFSKESILPKRNSDKLIARKKDWDPKKYGGFDSPTVAYSVLVVAKVEKGKSKKLKSVKELLGITIMERSSFEKNPIDFLEAKGYKEVKKDLIIKLPKYSLFELENGRKRMLASAGELQKGNELALPSKYVNFLYLASHYEKLKGSPEDNEQKQLFVEQHKHYLDEIIEQISEFSKRVILADANLDKVLSAYNKHRDKPIREQAENIIHLFTLTNLGAPAAFKYFDTTIDRKRYTSTKEVLDATLIHQSITGLYETRIDLSQLGGDGAPESATESGGTSTESEGSAGPKKKRKVTSTESEGSAGSAGSTSGSSSGMKIAVVDKALNNTRYDKHFQLYGEEVDVFHMCNEKLSGRLLKKHITIGTPENPFDPNDYDFVILVGAEPFLYFAGKKGIGDYTGKRVEYNGYANWIASISPAQLHFKPEMKPVFDATVENIHDIINGREKIAKAGDYRPITDPDEAEEYIKMVYNMVIGPVAFASATSALYCRDGYLLGVSISHQEYQGVYIDSDCLTEVAVYYLQKILDSENHTIVFHNLKFDMHFYKYHLGLTFDKAHKERRLHDTMLQHYVLDERRGTHGLKSLAMKYTDMGDYDFELDKFKDDYCKAHKIKKEDFTYDLIPFDIMWPYAAKDTDATIRLHNFFLPKIEKNEKLCSLYYDVLMPGCVFLQRVEDRGVPISIDRLKEAQYQLTHNLNKAREKLYTYPEVKQLEQDQNEAFNPNSVKQLRVLLFDYVGLTPTGKLTDTGADSTDAEALNELATQHPIAKTLLEIRKLTKLISTYVEKILLSIDADGCIRTGFHEHMTTSGRLSSSGKLNLQQLPRDESIIKGCVVAPPGYRVIAWDLTTAEVYYAAVLSGDRNMQQVFINMRNEPDKYPDFHSNIAHMVFKLQCEPRDVKKLFPALRQAAKAITFGILYGSGPAKVAHSVNEALLEQAAKTGEPFVECTVADAKEYIETYFGQFPQLKRWIDKCHDQIKNHGFIYSHFGRKRRLHNIHSEDRGVQGEEIRSGFNAIIQSASSDSLLLGAVDADNEIISLGLEQEMKIVMLVHDSVVAIVREDLIDQYNEILIRNIQKDRGISIPGCPIGIDSDSEAGGSRDYSCGKMKKQHPSIACIDDDEYTRYVKGVLLDAEFEYKKLAAMDKEHPDHSKYKDDKFIAVCKDLDNVKRILGAGGGSGKRTADGSGGGSPKKKRKVPAAKRVKLDSESATPESVSGWRLFKKIS

SEQ ID NO: 1451 - RNA, 7331 nt, synthetic construct
  misc_feature 1..7331: note = Synthetic
  source 1..7331: mol_type = other RNA
aggactcactatttgttttcgcgcccagttgcaaaaagtgtcgaagctcagaataaacgctcaactttggccggatctgccaccatgggcaagcggcccgccgccaccaagaaggccggccaggccaagaagaagaagtccggctccgagacccccggcacctccgagtccgccacccccgagtccggcaagggcgaccccaagaagccccggggcaagatgtcctcctacgccttcttcgtgcagacctgccgggaggagcacaagaagaagcaccccgacgcctccgtgaacttctccgagttctccaagaagtgctccgagcggtggaagaccatgtccgccaaggagaagggcaagttcgaggacatggccaaggccgacaaggcccggtacgagcgggagatgaagacctacatcccccccaagggcgagaccaagaagaagttcaaggaccccaacgcccccaagcggcccccctccgccttcttcctgttctgctccgagtaccggcccaagatcaagggcgagcaccccggcctgtccatcggcgacgtggccaagaagctgggcgagatgtggaacaacaccgccgccgacgacaagcagccctacgagaagaaggccgccaagctgaaggagaagtacgagaaggacatcgccgcctaccgggccaagggcaagcccgacgccgccaagaagggcgtggtgaaggccgagaagtccaagaagaagaagggcaccaaggactccaccaaggacatccccgagaccccctccaaggacggcaccaaggactccaccaaggacatccccgagaccccctccaaggacgacaagaagtactccatcggcctggacatcggcaccaactccgtgggctgggccgtgatcaccgacgagtacaaggtgccctccaagaagttcaaggtgctgggcaacaccgaccggcactccatcaagaagaacctgatcggcgccctgctgttcgactccggcgagaccgccgaggccacccggctgaagcggaccgcccggcggcggtacacccggcggaagaaccggatctgctacctgcaggagatcttctccaacgagatggccaaggtggacgactccttcttccaccggctggaggagtccttcctggtggaggaggacaagaagcacgagcggcaccccatcttcggcaacatcgtggacgaggtggcctaccacgagaagtaccccaccatctaccacctgcggaagaagctggtggactccaccgacaaggccgacctgcggctgatctacctggccctggcccacatgatcaagttccggggccacttcctgatcgagggcgacctgaaccccgacaactccgacgtggacaagctgttcatccagctggtgcagacctacaaccagctgttcgaggagaaccccatcaacgcctccggcgtggacgccaaggccatcctgtccgcccggctgtccaagtcccggcggctggagaacctgatcgcccagctgcccggcgagaagaagaacggcctgttcggcaacctgatcgccctgtccctgggcctgacccccaacttcaagtccaacttcgacctggccgaggacgccaagctgcagctgtccaaggacacctacgacgacgacctggacaacctgctggcccagatcggcgaccagtacgccgacctgttcctggccgccaagaacctgtccgacgccatcctgctgtccgacatcctgcgggtgaacaccgagatcaccaaggcccccctgtccgcctccatgatcaagcggtacgacgagcaccaccaggacctgaccctgctgaaggccctggtgcggcagcagctgcccgagaagtacaaggagatcttcttcgaccagtccaagaacggctacgccggctacatcgacggcggcgcctcccaggaggagttctacaagttcatcaagcccatcctggagaagatggacggcaccgaggagctgctggtgaagctgaaccgggaggacctgctgcggaagcagcggaccttcgacaacggctccatcccccaccagatccacctgggcgagctgcacgccatcctgcggcggcaggaggacttctaccccttcctgaaggacaaccgggagaagatcgagaagatcctgaccttccggatcccctactacgtgggccccctggcccggggcaactcccggttcgcctggatgacccggaagtccgaggagaccatcaccccctggaacttcgaggaggtggtggacaagggcgcctccgcccagtccttcatcgagcggatgaccaacttcgacaagaacctgcccaacgagaaggtgctgcccaagcactccctgctgtacgagtacttcaccgtgtacaacgagctgaccaaggtgaagtacgtgaccgagggcatgcggaagcccgccttcctgtccggcgagcagaagaaggccatcgtggacctgctgttcaagaccaaccggaaggtgaccgtgaagcagctgaaggaggactacttcaagaagatcgagtgcttcgactccgtggagatctccggcgtggaggaccggttcaacgcctccctgggcacctaccacgacctgctgaagatcatcaaggacaaggacttcctggacaacgaggagaacgaggacatcctggaggacatcgtgctgaccctgaccctgttcgaggaccgggagatgatcgaggagcggctgaagacctacgcccacctgttcgacgacaaggtgatgaagcagctgaagcggcggcggtacaccggctggggccggctgtcccggaagctgatcaacggcatccgggacaagcagtccggcaagaccatcctggacttcctgaagtccgacggcttcgccaaccggaacttcatgcagctgatccacgacgactccctgaccttcaaggaggacatccagaaggcccaggtgtccggccagggcgactccctgcacgagcacatcgccaacctggccggctcccccgccatcaagaagggcatcctgcagaccgtgaaggtggtggacgagctggtgaaggtgatgggccggcacaagcccgagaacatcgtgatcgagatggcccgggagaaccagaccacccagaagggccagaagaactcccgggagcggatgaagcggatcgaggagggcatcaaggagctgggctcccagatcctgaaggagcaccccgtggagaacacccagctgcagaacgagaagctgtacctgtactacctgcagaacggccgggacatgtacgtggaccaggagctggacatcaaccggctgtccgactacgacgtggacgccatcgtgccccagtccttcctgaaggacgactccatcgacaacaaggtgctgacccggtccgacaagaaccggggcaagtccgacaacgtgccctccgaggaggtggtgaagaagatgaagaactactggcggcagctgctgaacgccaagctgatcacccagcggaagttcgacaacctgaccaaggccgagcggggcggcctgtccgagctggacaaggccggcttcatcaagcggcagctggtggagacccggcagatcaccaagcacgtggcccagatcctggactcccggatgaacaccaagtacgacgagaacgacaagctgatccgggaggtgaaggtgatcaccctgaagtccaagctggtgtccgacttccggaaggacttccagttctacaaggtgcgggagatcaacaactaccaccacgcccacgacgcctacctgaacgccgtggtgggcaccgccctgatcaagaagtaccccaagctggagtccgagttcgtgtacggcgactacaaggtgtacgacgtgcggaagatgatcgccaagtccgagcaggagatcggcaaggccaccgccaagtacttcttctactccaacatcatgaacttcttcaagaccgagatcaccctggccaacggcgagatccggaagcggcccctgatcgagaccaacggcgagaccggcgagatcgtgtgggacaagggccgggacttcgccaccgtgcggaaggtgctgtccatgccccaggtgaacatcgtgaagaagaccgaggtgcagaccggcggcttctccaaggagtccatcctgcccaagcggaactccgacaagctgatcgcccggaagaaggactgggaccccaagaagtacggcggcttcgactcccccaccgtggcctactccgtgctggtggtggccaaggtggagaagggcaagtccaagaagctgaagtccgtgaaggagctgctgggcatcaccatcatggagcggtcctccttcgagaagaaccccatcgacttcctggaggccaagggctacaaggaggtgaagaaggacctgatcatcaagctgcccaagtactccctgttcgagctggagaacggccggaagcggatgctggcctccgccggcgagctgcagaagggcaacgagctggccctgccctccaagtacgtgaacttcctgtacctggcctcccactacgagaagctgaagggctcccccgaggacaacgagcagaagcagctgttcgtggagcagcacaagcactacctggacgagatcatcgagcagatctccgagttctccaagcgggtgatcctggccgacgccaacctggacaaggtgctgtccgcctacaacaagcaccgggacaagcccatccgggagcaggccgagaacatcatccacctgttcaccctgaccaacctgggcgcccccgccgccttcaagtacttcgacaccaccatcgaccggaagcggtacacctccaccaaggaggtgctggacgccaccctgatccaccagtccatcaccggcctgtacgagacccggatcgacctgtcccagctgggcggcgactccggcggctcctccggcggctccaagcggaccgccgacggctccgagttcgagtcccccaagaagaagcggaaggtgtccggcggctcctccggcggctccatggactccaccaaggagaagtgcgactcctacaaggacgacctgctgctgcggatgggcctgaacgacaacaaggccggcatggagggcctggacaaggagaagatcaacaagatcatcatggaggccaccaagggctcccggttctacggcaacgagctgaagaaggagaagcaggtgaaccagcggatcgagaacatgatgcagcagaaggcccagatcacctcccagcagctgcggaaggcccagctgcaggtggaccggttcgccatggagctggagcagtcccggaacctgtccaacaccatcgtgcacatcgacatggacgccttctacgccgccgtggagatgcgggacaaccccgagctgaaggacaagcccatcgccgtgggctccatgtccatgctgtccacctccaactaccacgcccggcggttcggcgtgcgggccgccatgcccggcttcatcgccaagcggctgtgcccccagctgatcatcgtgccccccaacttcgacaagtaccgggccgtgtccaaggaggtgaaggagatcctggccgactacgaccccaacttcatggccatgtccctggacgaggcctacctgaacatcaccaagcacctggaggagcggcagaactggcccgaggacaagcggcggtacttcatcaagatgggctcctccgtggagaacgacaaccccggcaaggaggtgaacaagctgtccgagcacgagcggtccatctcccccctgctgttcgaggagtccccctccgacgtgcagccccccggcgaccccttccaggtgaacttcgaggagcagaacaacccccagatcctgcagaactccgtggtgttcggcacctccgcccaggaggtggtgaaggagatccggttccggatcgagcagaagaccaccctgaccgcctccgccggcatcgcccccaacaccatgctggccaaggtgtgctccgacaagaacaagcccaacggccagtaccagatcctgcccaaccggcaggccgtgatggacttcatcaaggacctgcccatccggaaggtgtccggcatcggcaaggtgaccgagaagatgctgaaggccctgggcatcatcacctgcaccgagctgtaccagcagcgggccctgctgtccctgctgttctccgagacctcctggcactacttcctgcacatctccctgggcctgggctccacccacctgacccgggaccgggtgcggaagtccatgtccgtggagcggaccttctccgagatcaacaaggccgaggagcagtactccctgtgccaggagctgtgctccgagctggcccaggacctgcagaaggagcggctgaagggccggaccgtgaccatcaagctgaagaacgtgaacttcgaggtgaagacccgggcctccaccgtgtcctccgtggtgtccaccgccgaggagatcttcgccatcgccaaggagctgctgaagaccgagatcgacgccgacttcccccaccccctgcggctgcggctgatgggcgtgcggatctcctccttccccaacgaggaggaccggaagcaccagcagtccggctccgagacccccggcacctccgagtccgccacccccgagtcccccaagaagaagcggaaggtgtccggctccgagacccccggcacctccgagtccgccacccccgagtccatcgccgccctggagaaggagatcgccgccctggagaaggagaacgccgccctggagtgggagatcgccgccctggagaagtagctagcaccagcctcaagaacacccgaatggagtctctaagctacataataccaacttacactttacaaaatgttgtcccccaaaatgtagccattcgtatctgctcctaataaaaagaaagtttcttcacattctctcgagaaaaaaaaaaaatggaaaaaaaaaaaacggaaaaaaaaaaaaggtaaaaaaaaaaaatataaaaaaaaaaaacataaaaaaaaaaaacgaaaaaaaaaaaacgtaaaaaaaaaaaactcaaaaaaaaaaaagataaaaaaaaaaaacctaaaaaaaaaaaatgtaaaaaaaaaaaagggaaaaaaaaaaaacgcaaaaaaaaaaaacacaaaaaaaaaaaatgcaaaaaaaaaaaatcgaaaaaaaaaaaatctaaaaaaaaaaaacgaaaaaaaaaaaacccaaaaaaaaaaaagacaaaaaaaaaaaatagaaaaaaaaaaagttaaaaaaaaaaaactgaaaaaaaaaaaatttaaaaaaaaaaaatctag

SEQ ID NO: 1452 - DNA, 6732 bp, synthetic construct
  misc_feature 1..6732: note = Synthetic
  source 1..6732: mol_type = other DNA
atgggcaagcggcccgccgccaccaagaaggccggccaggccaagaagaagaagtccggctccgagacccccggcacctccgagtccgccacccccgagtccggcaagggcgaccccaagaagccccggggcaagatgtcctcctacgccttcttcgtgcagacctgccgggaggagcacaagaagaagcaccccgacgcctccgtgaacttctccgagttctccaagaagtgctccgagcggtggaagaccatgtccgccaaggagaagggcaagttcgaggacatggccaaggccgacaaggcccggtacgagcgggagatgaagacctacatcccccccaagggcgagaccaagaagaagttcaaggaccccaacgcccccaagcggcccccctccgccttcttcctgttctgctccgagtaccggcccaagatcaagggcgagcaccccggcctgtccatcggcgacgtggccaagaagctgggcgagatgtggaacaacaccgccgccgacgacaagcagccctacgagaagaaggccgccaagctgaaggagaagtacgagaaggacatcgccgcctaccgggccaagggcaagcccgacgccgccaagaagggcgtggtgaaggccgagaagtccaagaagaagaagggcaccaaggactccaccaaggacatccccgagaccccctccaaggacggcaccaaggactccaccaaggacatccccgagaccccctccaaggacgacaagaagtactccatcggcctggacatcggcaccaactccgtgggctgggccgtgatcaccgacgagtacaaggtgccctccaagaagttcaaggtgctgggcaacaccgaccggcactccatcaagaagaacctgatcggcgccctgctgttcgactccggcgagaccgccgaggccacccggctgaagcggaccgcccggcggcggtacacccggcggaagaaccggatctgctacctgcaggagatcttctccaacgagatggccaaggtggacgactccttcttccaccggctggaggagtccttcctggtggaggaggacaagaagcacgagcggcaccccatcttcggcaacatcgtggacgaggtggcctaccacgagaagtaccccaccatctaccacctgcggaagaagctggtggactccaccgacaaggccgacctgcggctgatctacctggccctggcccacatgatcaagttccggggccacttcctgatcgagggcgacctgaaccccgacaactccgacgtggacaagctgttcatccagctggtgcagacctacaaccagctgttcgaggagaaccccatcaacgcctccggcgtggacgccaaggccatcctgtccgcccggctgtccaagtcccggcggctggagaacctgatcgcccagctgcccggcgagaagaagaacggcctgttcggcaacctgatcgccctgtccctgggcctgacccccaacttcaagtccaacttcgacctggccgaggacgccaagctgcagctgtccaaggacacctacgacgacgacctggacaacctgctggcccagatcggcgaccagtacgccgacctgttcctggccgccaagaacctgtccgacgccatcctgctgtccgacatcctgcgggtgaacaccgagatcaccaaggcccccctgtccgcctccatgatcaagcggtacgacgagcaccaccaggacctgaccctgctgaaggccctggtgcggcagcagctgcccgagaagtacaaggagatcttcttcgaccagtccaagaacggctacgccggctacatcgacggcggcgcctcccaggaggagttctacaagttcatcaagcccatcctggagaagatggacggcaccgaggagctgctggtgaagctgaaccgggaggacctgctgcggaagcagcggaccttcgacaacggctccatcccccaccagatccacctgggcgagctgcacgccatcctgcggcggcaggaggacttctaccccttcctgaaggacaaccgggagaagatcgagaagatcctgaccttccggatcccctactacgtgggccccctggcccggggcaactcccggttcgcctggatgacccggaagtccgaggagaccatcaccccctggaacttcgaggaggtggtggacaagggcgcctccgcccagtccttcatcgagcggatgaccaacttcgacaagaacctgcccaacgagaaggtgctgcccaagcactccctgctgtacgagtacttcaccgtgtacaacgagctgaccaaggtgaagtacgtgaccgagggcatgcggaagcccgccttcctgtccggcgagcagaagaaggccatcgtggacctgctgttcaagaccaaccggaaggtgaccgtgaagcagctgaaggaggactacttcaagaagatcgagtgcttcgactccgtggagatctccggcgtggaggaccggttcaacgcctccctgggcacctaccacgacctgctgaagatcatcaaggacaaggacttcctggacaacgaggagaacgaggacatcctggaggacatcgtgctgaccctgaccctgttcgaggaccgggagatgatcgaggagcggctgaagacctacgcccacctgttcgacgacaaggtgatgaagcagctgaagcggcggcggtacaccggctggggccggctgtcccggaagctgatcaacggcatccgggacaagcagtccggcaagaccatcctggacttcctgaagtccgacggcttcgccaaccggaacttcatgcagctgatccacgacgactccctgaccttcaaggaggacatccagaaggcccaggtgtccggccagggcgactccctgcacgagcacatcgccaacctggccggctcccccgccatcaagaagggcatcctgcagaccgtgaaggtggtggacgagctggtgaaggtgatgggccggcacaagcccgagaacatcgtgatcgagatggcccgggagaaccagaccacccagaagggccagaagaactcccgggagcggatgaagcggatcgaggagggcatcaaggagctgggctcccagatcctgaaggagcaccccgtggagaacacccagctgcagaacgagaagctgtacctgtactacctgcagaacggccgggacatgtacgtggaccaggagctggacatcaaccggctgtccgactacgacgtggacgccatcgtgccccagtccttcctgaaggacgactccatcgacaacaaggtgctgacccggtccgacaagaaccggggcaagtccgacaacgtgccctccgaggaggtggtgaagaagatgaagaactactggcggcagctgctgaacgccaagctgatcacccagcggaagttcgacaacctgaccaaggccgagcggggcggcctgtccgagctggacaaggccggcttcatcaagcggcagctggtggagacccggcagatcaccaagcacgtggcccagatcctggactcccggatgaacaccaagtacgacgagaacgacaagctgatccgggaggtgaaggtgatcaccctgaagtccaagctggtgtccgacttccggaaggacttccagttctacaaggtgcgggagatcaacaactaccaccacgcccacgacgcctacctgaacgccgtggtgggcaccgccctgatcaagaagtaccccaagctggagtccgagttcgtgtacggcgactacaaggtgtacgacgtgcggaagatgatcgccaagtccgagcaggagatcggcaaggccaccgccaagtacttcttctactccaacatcatgaacttcttcaagaccgagatcaccctggccaacggcgagatccggaagcggcccctgatcgagaccaacggcgagaccggcgagatcgtgtgggacaagggccgggacttcgccaccgtgcggaaggtgctgtccatgccccaggtgaacatcgtgaagaagaccgaggtgcagaccggcggcttctccaaggagtccatcctgcccaagcggaactccgacaagctgatcgcccggaagaaggactgggaccccaagaagtacggcggcttcgactcccccaccgtggcctactccgtgctggtggtggccaaggtggagaagggcaagtccaagaagctgaagtccgtgaaggagctgctgggcatcaccatcatggagcggtcctccttcgagaagaaccccatcgacttcctggaggccaagggctacaaggaggtgaagaaggacctgatcatcaagctgcccaagtactccctgttcgagctggagaacggccggaagcggatgctggcctccgccggcgagctgcagaagggcaacgagctggccctgccctccaagtacgtgaacttcctgtacctggcctcccactacgagaagctgaagggctcccccgaggacaacgagcagaagcagctgttcgtggagcagcacaagcactacctggacgagatcatcgagcagatctccgagttctccaagcgggtgatcctggccgacgccaacctggacaaggtgctgtccgcctacaacaagcaccgggacaagcccatccgggagcaggccgagaacatcatccacctgttcaccctgaccaacctgggcgcccccgccgccttcaagtacttcgacaccaccatcgaccggaagcggtacacctccaccaaggaggtgctggacgccaccctgatccaccagtccatcaccggcctgtacgagacccggatcgacctgtcccagctgggcggcgactccggcggctcctccggcggctccaagcggaccgccgacggctccgagttcgagtcccccaagaagaagcggaaggtgtccggcggctcctccggcggctccatggactccaccaaggagaagtgcgactcctacaaggacgacctgctgctgcggatgggcctgaacgacaacaaggccggcatggagggcctggacaaggagaagatcaacaagatcatcatggaggccaccaagggctcccggttctacggcaacgagctgaagaaggagaagcaggtgaaccagcggatcgagaacatgatgcagcagaaggcccagatcacctcccagcagctgcggaaggcccagctgcaggtggaccggttcgccatggagctggagcagtcccggaacctgtccaacaccatcgtgcacatcgacatggacgccttctacgccgccgtggagatgcgggacaaccccgagctgaaggacaagcccatcgccgtgggctccatgtccatgctgtccacctccaactaccacgcccggcggttcggcgtgcgggccgccatgcccggcttcatcgccaagcggctgtgcccccagctgatcatcgtgccccccaacttcgacaagtaccgggccgtgtccaaggaggtgaaggagatcctggccgactacgaccccaacttcatggccatgtccctggacgaggcctacctgaacatcaccaagcacctggaggagcggcagaactggcccgaggacaagcggcggtacttcatcaagatgggctcctccgtggagaacgacaaccccggcaaggaggtgaacaagctgtccgagcacgagcggtccatctcccccctgctgttcgaggagtccccctccgacgtgcagccccccggcgaccccttccaggtgaacttcgaggagcagaacaacccccagatcctgcagaactccgtggtgttcggcacctccgcccaggaggtggtgaaggagatccggttccggatcgagcagaagaccaccctgaccgcctccgccggcatcgcccccaacaccatgctggccaaggtgtgctccgacaagaacaagcccaacggccagtaccagatcctgcccaaccggcaggccgtgatggacttcatcaaggacctgcccatccggaaggtgtccggcatcggcaaggtgaccgagaagatgctgaaggccctgggcatcatcacctgcaccgagctgtaccagcagcgggccctgctgtccctgctgttctccgagacctcctggcactacttcctgcacatctccctgggcctgggctccacccacctgacccgggaccgggtgcggaagtccatgtccgtggagcggaccttctccgagatcaacaaggccgaggagcagtactccctgtgccaggagctgtgctccgagctggcccaggacctgcagaaggagcggctgaagggccggaccgtgaccatcaagctgaagaacgtgaacttcgaggtgaagacccgggcctccaccgtgtcctccgtggtgtccaccgccgaggagatcttcgccatcgccaaggagctgctgaagaccgagatcgacgccgacttcccccaccccctgcggctgcggctgatgggcgtgcggatctcctccttccccaacgaggaggaccggaagcaccagcagtccggctccgagacccccggcacctccgagtccgccacccccgagtcccccaagaagaagcggaaggtgtccggctccgagacccccggcacctccgagtccgccacccccgagtccatcgccgccctggagaaggagatcgccgccctggagaaggagaacgccgccctggagtgggagatcgccgccctggagaagtag

SEQ ID NO: 1453 - protein, 2243 aa, synthetic construct
  REGION 1..2243: note = Synthetic
MGKRPAATKKAGQAKKKKSGSETPGTSESATPESGKGDPKKPRGKMSSYAFFVQTCREEHKKKHPDASVNFSEFSKKCSERWKTMSAKEKGKFEDMAKADKARYEREMKTYIPPKGETKKKFKDPNAPKRPPSAFFLFCSEYRPKIKGEHPGLSIGDVAKKLGEMWNNTAADDKQPYEKKAAKLKEKYEKDIAAYRAKGKPDAAKKGVVKAEKSKKKKGTKDSTKDIPETPSKDGTKDSTKDIPETPSKDDKKYSIGLDIGTNSVGWAVITDEYKVPSKKFKVLGNTDRHSIKKNLIGALLFDSGETAEATRLKRTARRRYTRRKNRICYLQEIFSNEMAKVDDSFFHRLEESFLVEEDKKHERHPIFGNIVDEVAYHEKYPTIYHLRKKLVDSTDKADLRLIYLALAHMIKFRGHFLIEGDLNPDNSDVDKLFIQLVQTYNQLFEENPINASGVDAKAILSARLSKSRRLENLIAQLPGEKKNGLFGNLIALSLGLTPNFKSNFDLAEDAKLQLSKDTYDDDLDNLLAQIGDQYADLFLAAKNLSDAILLSDILRVNTEITKAPLSASMIKRYDEHHQDLTLLKALVRQQLPEKYKEIFFDQSKNGYAGYIDGGASQEEFYKFIKPILEKMDGTEELLVKLNREDLLRKQRTFDNGSIPHQIHLGELHAILRRQEDFYPFLKDNREKIEKILTFRIPYYVGPLARGNSRFAWMTRKSEETITPWNFEEVVDKGASAQSFIERMTNFDKNLPNEKVLPKHSLLYEYFTVYNELTKVKYVTEGMRKPAFLSGEQKKAIVDLLFKTNRKVTVKQLKEDYFKKIECFDSVEISGVEDRFNASLGTYHDLLKIIKDKDFLDNEENEDILEDIVLTLTLFEDREMIEERLKTYAHLFDDKVMKQLKRRRYTGWGRLSRKLINGIRDKQSGKTILDFLKSDGFANRNFMQLIHDDSLTFKEDIQKAQVSGQGDSLHEHIANLAGSPAIKKGILQTVKVVDELVKVMGRHKPENIVIEMARENQTTQKGQKNSRERMKRIEEGIKELGSQILKEHPVENTQLQNEKLYLYYLQNGRDMYVDQELDINRLSDYDVDAIVPQSFLKDDSIDNKVLTRSDKNRGKSDNVPSEEVVKKMKNYWRQLLNAKLITQRKFDNLTKAERGGLSELDKAGFIKRQLVETRQITKHVAQILDSRMNTKYDENDKLIREVKVITLKSKLVSDFRKDFQFYKVREINNYHHAHDAYLNAVVGTALIKKYPKLESEFVYGDYKVYDVRKMIAKSEQEIGKATAKYFFYSNIMNFFKTEITLANGEIRKRPLIETNGETGEIVWDKGRDFATVRKVLSMPQVNIVKKTEVQTGGFSKESILPKRNSDKLIARKKDWDPKKYGGFDSPTVAYSVLVVAKVEKGKSKKLKSVKELLGITIMERSSFEKNPIDFLEAKGYKEVKKDLIIKLPKYSLFELENGRKRMLASAGELQKGNELALPSKYVNFLYLASHYEKLKGSPEDNEQKQLFVEQHKHYLDEIIEQISEFSKRVILADANLDKVLSAYNKHRDKPIREQAENIIHLFTLTNLGAPAAFKYFDTTIDRKRYTSTKEVLDATLIHQSITGLYETRIDLSQLGGDSGGSSGGSKRTADGSEFESPKKKRKVSGGSSGGSMDSTKEKCDSYKDDLLLRMGLNDNKAGMEGLDKEKINKIIMEATKGSRFYGNELKKEKQVNQRIENMMQQKAQITSQQLRKAQLQVDRFAMELEQSRNLSNTIVHIDMDAFYAAVEMRDNPELKDKPIAVGSMSMLSTSNYHARRFGVRAAMPGFIAKRLCPQLIIVPPNFDKYRAVSKEVKEILADYDPNFMAMSLDEAYLNITKHLEERQNWPEDKRRYFIKMGSSVENDNPGKEVNKLSEHERSISPLLFEESPSDVQPPGDPFQVNFEEQNNPQILQNSVVFGTSAQEVVKEIRFRIEQKTTLTASAGIAPNTMLAKVCSDKNKPNGQYQILPNRQAVMDFIKDLPIRKVSGIGKVTEKMLKALGIITCTELYQQRALLSLLFSETSWHYFLHISLGLGSTHLTRDRVRKSMSVERTFSEINKAEEQYSLCQELCSELAQDLQKERLKGRTVTIKLKNVNFEVKTRASTVSSVVSTAEEIFAIAKELLKTEIDADFPHPLRLRLMGVRISSFPNEEDRKHQQSGSETPGTSESATPESPKKKRKVSGSETPGTSESATPESIAALEKEIAALEKENAALEWEIAALEK

SEQ ID NO: 1454-1461 - skipped (8 entries)

SEQ ID NO: 1462 - RNA, 951 nt, synthetic construct
  misc_feature 1..951: note = Synthetic
  source 1..951: mol_type = other RNA
aggactcactatttgttttcgcgcccagttgcaaaaagtgtcgaagctcagaataaacgctcaactttggccggatctgccaccatggccgccgccatgaccgacccccgggagaccgtgccccccggcaactccggcgaggagaccatcggcgaggccttcgcctggctgaaccggaccgtggaggccatcaaccgggaggccgtgaaccacctgccccgggagctgatcttccaggtgtggcagcggtcctggcggtactggcacgacgagcagggcatgtccgagtcctacaccaagtaccggtacctgtgcatcatccagaaggccgtgtacatgcacgtgcggaagggctgcacctgcctgggccggggccacggccccggcggctggcggcccggccccccccctccccccccacccggcctggtgtagctagcaccagcctcaagaacacccgaatggagtctctaagctacataataccaacttacactttacaaaatgttgtcccccaaaatgtagccattcgtatctgctcctaataaaaagaaagtttcttcacattctctcgagaaaaaaaaaaaatggaaaaaaaaaaaacggaaaaaaaaaaaaggtaaaaaaaaaaaatataaaaaaaaaaaacataaaaaaaaaaaacgaaaaaaaaaaaacgtaaaaaaaaaaaactcaaaaaaaaaaaagataaaaaaaaaaaacctaaaaaaaaaaaatgtaaaaaaaaaaaagggaaaaaaaaaaaacgcaaaaaaaaaaaacacaaaaaaaaaaaatgcaaaaaaaaaaaatcgaaaaaaaaaaaatctaaaaaaaaaaaacgaaaaaaaaaaaacccaaaaaaaaaaaagacaaaaaaaaaaaatagaaaaaaaaaaaagttaaaaaaaaaaaactgaaaaaaaaaaaatttaaaaaaaaaaaatctag

SEQ ID NO: 1463 - DNA, 351 bp, synthetic construct
  misc_feature 1..351: note = Synthetic
  source 1..351: mol_type = other DNA
atggccgccgccatgaccgacccccgggagaccgtgccccccggcaactccggcgaggagaccatcggcgaggccttcgcctggctgaaccggaccgtggaggccatcaaccgggaggccgtgaaccacctgccccgggagctgatcttccaggtgtggcagcggtcctggcggtactggcacgacgagcagggcatgtccgagtcctacaccaagtaccggtacctgtgcatcatccagaaggccgtgtacatgcacgtgcggaagggctgcacctgcctgggccggggccacggccccggcggctggcggcccggccccccccctccccccccacccggcctggtgtag

SEQ ID NO: 1464 - protein, 116 aa, synthetic construct
  REGION 1..116: note = Synthetic
MAAAMTDPRETVPPGNSGEETIGEAFAWLNRTVEAINREAVNHLPRELIFQVWQRSWRYWHDEQGMSESYTKYRYLCIIQKAVYMHVRKGCTCLGRGHGPGGWRPGPPPPPPPGLV

SEQ ID NO: 1465 - RNA, 1743 nt, synthetic construct
  misc_feature 1..1743: note = Synthetic
  source 1..1743: mol_type = other RNA
aggactcactatttgttttcgcgcccagttgcaaaaagtgtcgaagctcagaataaacgctcaactttggccggatctgccaccatgggcatccagggcctggccaagctgatcgccgacgtggccccctccgccatccgggagaacgacatcaagtcctacttcggccggaaggtggccatcgacgcctccatgtccatctaccagttcctgatcgccgtgcggcagggcggcgacgtgctgcagaacgaggagggcgagaccacctcccacctgatgggcatgttctaccggaccatccggatgatggagaacggcatcaagcccgtgtacgtgttcgacggcaagcccccccagctgaagtccggcgagctggccaagcggtccgagcggcgggccgaggccgagaagcagctgcagcaggcccaggccgccggcgccgagcaggaggtggagaagttcaccaagcggctggtgaaggtgaccaagcagcacaacgacgagtgcaagcacctgctgtccctgatgggcatcccctacctggacgccccctccgaggccgaggcctcctgcgccgccctggtgaaggccggcaaggtgtacgccgccgccaccgaggacatggactgcctgaccttcggctcccccgtgctgatgcggcacctgaccgcctccgaggccaagaagctgcccatccaggagttccacctgtcccggatcctgcaggagctgggcctgaaccaggagcagttcgtggacctgtgcatcctgctgggctccgactactgcgagtccatccggggcatcggccccaagcgggccgtggacctgatccagaagcacaagtccatcgaggagatcgtgcggcggctggaccccaacaagtaccccgtgcccgagaactggctgcacaaggaggcccaccagctgttcctggagcccgaggtgctggaccccgagtccgtggagctgaagtggtccgagcccaacgaggaggagctgatcaagttcatgtgcggcgagaagcagttctccgaggagcggatccggtccggcgtgaagcggctgtccaagtcccggcagggctccacccagggccggctggacgacttcttcaaggtgaccggctccctgtcctccgccaagcggaaggagcccgagcccaagggctccaccaagaagaaggccaagaccggcgccgccggcaagttcaagcggggcaagtagctagcaccagcctcaagaacacccgaatggagtctctaagctacataataccaacttacactttacaaaatgttgtcccccaaaatgtagccattcgtatctgctcctaataaaaagaaagtttcttcacattctctcgagaaaaaaaaaaaatggaaaaaaaaaaaacggaaaaaaaaaaaaggtaaaaaaaaaaaatataaaaaaaaaaaacataaaaaaaaaaaacgaaaaaaaaaaaacgtaaaaaaaaaaaactcaaaaaaaaaaaagataaaaaaaaaaaacctaaaaaaaaaaaatgtaaaaaaaaaaaagggaaaaaaaaaaaacgcaaaaaaaaaaaacacaaaaaaaaaaaatgcaaaaaaaaaaaatcgaaaaaaaaaaaatctaaaaaaaaaaaacgaaaaaaaaaaaacccaaaaaaaaaaaagacaaaaaaaaaaaatagaaaaaaaaaaaagttaaaaaaaaaaaactgaaaaaaaaaaaatttaaaaaaaaaaaatctag

SEQ ID NO: 1466 - DNA, 1143 bp, synthetic construct
  misc_feature 1..1143: note = Synthetic
  source 1..1143: mol_type = other DNA
atgggcatccagggcctggccaagctgatcgccgacgtggccccctccgccatccgggagaacgacatcaagtcctacttcggccggaaggtggccatcgacgcctccatgtccatctaccagttcctgatcgccgtgcggcagggcggcgacgtgctgcagaacgaggagggcgagaccacctcccacctgatgggcatgttctaccggaccatccggatgatggagaacggcatcaagcccgtgtacgtgttcgacggcaagcccccccagctgaagtccggcgagctggccaagcggtccgagcggcgggccgaggccgagaagcagctgcagcaggcccaggccgccggcgccgagcaggaggtggagaagttcaccaagcggctggtgaaggtgaccaagcagcacaacgacgagtgcaagcacctgctgtccctgatgggcatcccctacctggacgccccctccgaggccgaggcctcctgcgccgccctggtgaaggccggcaaggtgtacgccgccgccaccgaggacatggactgcctgaccttcggctcccccgtgctgatgcggcacctgaccgcctccgaggccaagaagctgcccatccaggagttccacctgtcccggatcctgcaggagctgggcctgaaccaggagcagttcgtggacctgtgcatcctgctgggctccgactactgcgagtccatccggggcatcggccccaagcgggccgtggacctgatccagaagcacaagtccatcgaggagatcgtgcggcggctggaccccaacaagtaccccgtgcccgagaactggctgcacaaggaggcccaccagctgttcctggagcccgaggtgctggaccccgagtccgtggagctgaagtggtccgagcccaacgaggaggagctgatcaagttcatgtgcggcgagaagcagttctccgaggagcggatccggtccggcgtgaagcggctgtccaagtcccggcagggctccacccagggccggctggacgacttcttcaaggtgaccggctccctgtcctccgccaagcggaaggagcccgagcccaagggctccaccaagaagaaggccaagaccggcgccgccggcaagttcaagcggggcaagtag

SEQ ID NO: 1467 - protein, 380 aa, synthetic construct
  REGION 1..380: note = Synthetic
MGIQGLAKLIADVAPSAIRENDIKSYFGRKVAIDASMSIYQFLIAVRQGGDVLQNEEGETTSHLMGMFYRTIRMMENGIKPVYVFDGKPPQLKSGELAKRSERRAEAEKQLQQAQAAGAEQEVEKFTKRLVKVTKQHNDECKHLLSLMGIPYLDAPSEAEASCAALVKAGKVYAAATEDMDCLTFGSPVLMRHLTASEAKKLPIQEFHLSRILQELGLNQEQFVDLCILLGSDYCESIRGIGPKRAVDLIQKHKSIEEIVRRLDPNKYPVPENWLHKEAHQLFLEPEVLDPESVELKWSEPNEEELIKFMCGEKQFSEERIRSGVKRLSKSRQGSTQGRLDDFFKVTGSLSSAKRKEPEPKGSTKKKAKTGAAGKFKRGK

SEQ ID NO: 1468 - DNA, 345 bp, synthetic construct
  misc_feature 1..345: note = Synthetic
  source 1..345: mol_type = other DNA
gccgccgccatgaccgacccccgggagaccgtgccccccggcaactccggcgaggagaccatcggcgaggccttcgcctggctgaaccggaccgtggaggccatcaaccgggaggccgtgaaccacctgccccgggagctgatcttccaggtgtggcagcggtcctggcggtactggcacgacgagcagggcatgtccgagtcctacaccaagtaccggtacctgtgcatcatccagaaggccgtgtacatgcacgtgcggaagggctgcacctgcctgggccggggccacggccccggcggctggcggcccggccccccccctccccccccacccggcctggtg

SEQ ID NO: 1469 - protein, 115 aa, synthetic construct
  REGION 1..115: note = Synthetic
AAAMTDPRETVPPGNSGEETIGEAFAWLNRTVEAINREAVNHLPRELIFQVWQRSWRYWHDEQGMSESYTKYRYLCIIQKAVYMHVRKGCTCLGRGHGPGGWRPGPPPPPPPGLV

SEQ ID NO: 1470 - DNA, 339 bp, synthetic construct
  misc_feature 1..339: note = Synthetic
  source 1..339: mol_type = other DNA
atgaccgacccccgggagaccgtgccccccggcaactccggcgaggagaccatcggcgaggccttcgcctggctgaaccggaccgtggaggccatcaaccgggaggccgtgaaccacctgccccgggagctgatcttccaggtgtggcagcggtcctggcggtactggcacgacgagcagggcatgtccgagtcctacaccaagtaccggtacctgtgcatcatccagaaggccgtgtacatgcacgtgcggaagggctgcacctgcctgggccggggccacggccccggcggctggcggcccggccccccccctccccccccacccggcctggtgtag

SEQ ID NO: 1471 - DNA, 1218 bp, synthetic construct
  misc_feature 1..1218: note = Synthetic
  source 1..1218: mol_type = other DNA
atgggcatccagggcctggccaagctgatcgccgacgtggccccctccgccatccgggagaacgacatcaagtcctacttcggccggaaggtggccatcgacgcctccatgtccatctaccagttcctgatcgccgtgcggcagggcggcgacgtgctgcagaacgaggagggcgagaccacctcccacctgatgggcatgttctaccggaccatccggatgatggagaacggcatcaagcccgtgtacgtgttcgacggcaagcccccccagctgaagtccggcgagctggccaagcggtccgagcggcgggccgaggccgagaagcagctgcagcaggcccaggccgccggcgccgagcaggaggtggagaagttcaccaagcggctggtgaaggtgaccaagcagcacaacgacgagtgcaagcacctgctgtccctgatgggcatcccctacctggacgccccctccgaggccgaggcctcctgcgccgccctggtgaaggccggcaaggtgtacgccgccgccaccgaggacatggactgcctgaccttcggctcccccgtgctgatgcggcacctgaccgcctccgaggccaagaagctgcccatccaggagttccacctgtcccggatcctgcaggagctgggcctgaaccaggagcagttcgtggacctgtgcatcctgctgggctccgactactgcgagtccatccggggcatcggccccaagcgggccgtggacctgatccagaagcacaagtccatcgaggagatcgtgcggcggctggaccccaacaagtaccccgtgcccgagaactggctgcacaaggaggcccaccagctgttcctggagcccgaggtgctggaccccgagtccgtggagctgaagtggtccgagcccaacgaggaggagctgatcaagttcatgtgcggcgagaagcagttctccgaggagcggatccggtccggcgtgaagcggctgtccaagtcccggcagggctccacccagggccggctggacgacttcttcaaggtgaccggctccctgtcctccgccaagcggaaggagcccgagcccaagggctccaccaagaagaaggccaagaccggcgccgccggcaagttcaagcggggcaagtccggcggctccaagcggaccgccgacggctccgagttcgaggtgtccggctggcggctgttcaagaagatctcctag

SEQ ID NO: 1472 - RNA, 1778 nt, synthetic construct
  misc_feature 1..1778: note = Synthetic
  source 1..1778: mol_type = other RNA
gggaagctcagaataaacgctcaactttggccggatctgccaccatgggcatccagggcctggccaagctgatcgccgacgtggccccctccgccatccgggagaacgacatcaagtcctacttcggccggaaggtggccatcgacgcctccatgtccatctaccagttcctgatcgccgtgcggcagggcggcgacgtgctgcagaacgaggagggcgagaccacctcccacctgatgggcatgttctaccggaccatccggatgatggagaacggcatcaagcccgtgtacgtgttcgacggcaagcccccccagctgaagtccggcgagctggccaagcggtccgagcggcgggccgaggccgagaagcagctgcagcaggcccaggccgccggcgccgagcaggaggtggagaagttcaccaagcggctggtgaaggtgaccaagcagcacaacgacgagtgcaagcacctgctgtccctgatgggcatcccctacctggacgccccctccgaggccgaggcctcctgcgccgccctggtgaaggccggcaaggtgtacgccgccgccaccgaggacatggactgcctgaccttcggctcccccgtgctgatgcggcacctgaccgcctccgaggccaagaagctgcccatccaggagttccacctgtcccggatcctgcaggagctgggcctgaaccaggagcagttcgtggacctgtgcatcctgctgggctccgactactgcgagtccatccggggcatcggccccaagcgggccgtggacctgatccagaagcacaagtccatcgaggagatcgtgcggcggctggaccccaacaagtaccccgtgcccgagaactggctgcacaaggaggcccaccagctgttcctggagcccgaggtgctggaccccgagtccgtggagctgaagtggtccgagcccaacgaggaggagctgatcaagttcatgtgcggcgagaagcagttctccgaggagcggatccggtccggcgtgaagcggctgtccaagtcccggcagggctccacccagggccggctggacgacttcttcaaggtgaccggctccctgtcctccgccaagcggaaggagcccgagcccaagggctccaccaagaagaaggccaagaccggcgccgccggcaagttcaagcggggcaagtccggcggctccaagcggaccgccgacggctccgagttcgaggtgtccggctggcggctgttcaagaagatctcctagctagcaccagcctcaagaacacccgaatggagtctctaagctacataataccaacttacactttacaaaatgttgtcccccaaaatgtagccattcgtatctgctcctaataaaaagaaagtttcttcacattctctcgagaaaaaaaaaaaatggaaaaaaaaaaaacggaaaaaaaaaaaaggtaaaaaaaaaaaatataaaaaaaaaaaacataaaaaaaaaaaacgaaaaaaaaaaaacgtaaaaaaaaaaaactcaaaaaaaaaaaagataaaaaaaaaaaacctaaaaaaaaaaaatgtaaaaaaaaaaaagggaaaaaaaaaaaacgcaaaaaaaaaaaacacaaaaaaaaaaaatgcaaaaaaaaaaaatcgaaaaaaaaaaaatctaaaaaaaaaaaacgaaaaaaaaaaaacccaaaaaaaaaaaagacaaaaaaaaaaaatagaaaaaaaaaaaagttaaaaaaaaaaaactgaaaaaaaaaaaatttaaaaaaaaaaaatctag

SEQ ID NO: 1473 - protein, 405 aa, synthetic construct
  REGION 1..405: note = Synthetic
MGIQGLAKLIADVAPSAIRENDIKSYFGRKVAIDASMSIYQFLIAVRQGGDVLQNEEGETTSHLMGMFYRTIRMMENGIKPVYVFDGKPPQLKSGELAKRSERRAEAEKQLQQAQAAGAEQEVEKFTKRLVKVTKQHNDECKHLLSLMGIPYLDAPSEAEASCAALVKAGKVYAAATEDMDCLTFGSPVLMRHLTASEAKKLPIQEFHLSRILQELGLNQEQFVDLCILLGSDYCESIRGIGPKRAVDLIQKHKSIEEIVRRLDPNKYPVPENWLHKEAHQLFLEPEVLDPESVELKWSEPNEEELIKFMCGEKQFSEERIRSGVKRLSKSRQGSTQGRLDDFFKVTGSLSSAKRKEPEPKGSTKKKAKTGAAGKFKRGKSGGSKRTADGSEFEVSGWRLFKKIS

SEQ ID NO: 1474 - DNA, 1140 bp, synthetic construct
  misc_feature 1..1140: note = Synthetic
  source 1..1140: mol_type = other DNA
atgggcatccagggcctggccaagctgatcgccgacgtggccccctccgccatccgggagaacgacatcaagtcctacttcggccggaaggtggccatcgacgcctccatgtccatctaccagttcctgatcgccgtgcggcagggcggcgacgtgctgcagaacgaggagggcgagaccacctcccacctgatgggcatgttctaccggaccatccggatgatggagaacggcatcaagcccgtgtacgtgttcgacggcaagcccccccagctgaagtccggcgagctggccaagcggtccgagcggcgggccgaggccgagaagcagctgcagcaggcccaggccgccggcgccgagcaggaggtggagaagttcaccaagcggctggtgaaggtgaccaagcagcacaacgacgagtgcaagcacctgctgtccctgatgggcatcccctacctggacgccccctccgaggccgaggcctcctgcgccgccctggtgaaggccggcaaggtgtacgccgccgccaccgaggacatggactgcctgaccttcggctcccccgtgctgatgcggcacctgaccgcctccgaggccaagaagctgcccatccaggagttccacctgtcccggatcctgcaggagctgggcctgaaccaggagcagttcgtggacctgtgcatcctgctgggctccgactactgcgagtccatccggggcatcggccccaagcgggccgtggacctgatccagaagcacaagtccatcgaggagatcgtgcggcggctggaccccaacaagtaccccgtgcccgagaactggctgcacaaggaggcccaccagctgttcctggagcccgaggtgctggaccccgagtccgtggagctgaagtggtccgagcccaacgaggaggagctgatcaagttcatgtgcggcgagaagcagttctccgaggagcggatccggtccggcgtgaagcggctgtccaagtcccggcagggctccacccagggccggctggacgacttcttcaaggtgaccggctccctgtcctccgccaagcggaaggagcccgagcccaagggctccaccaagaagaaggccaagaccggcgccgccggcaagttcaagcggggcaag

SEQ ID NO: 1475 - protein, 380 aa, synthetic construct; identical to SEQ ID NO: 1467
  REGION 1..380: note = Synthetic

SEQ ID NO: 1476 - DNA, 1386 bp, synthetic construct
  misc_feature 1..1386: note = Synthetic
  source 1..1386: mol_type = other DNA
tccggcggctccaagcggaccgccgacggctccgagttcgagcccaagaagaagcggaaggtgtccgagtccgccacccccgagtccgtgtccggctggcggctgttcaagaagatctcctagatgggcatccagggcctggccaagctgatcgccgacgtggccccctccgccatccgggagaacgacatcaagtcctacttcggccggaaggtggccatcgacgcctccatgtccatctaccagttcctgatcgccgtgcggcagggcggcgacgtgctgcagaacgaggagggcgagaccacctcccacctgatgggcatgttctaccggaccatccggatgatggagaacggcatcaagcccgtgtacgtgttcgacggcaagcccccccagctgaagtccggcgagctggccaagcggtccgagcggcgggccgaggccgagaagcagctgcagcaggcccaggccgccggcgccgagcaggaggtggagaagttcaccaagcggctggtgaaggtgaccaagcagcacaacgacgagtgcaagcacctgctgtccctgatgggcatcccctacctggacgccccctccgaggccgaggcctcctgcgccgccctggtgaaggccggcaaggtgtacgccgccgccaccgaggacatggactgcctgaccttcggctcccccgtgctgatgcggcacctgaccgcctccgaggccaagaagctgcccatccaggagttccacctgtcccggatcctgcaggagctgggcctgaaccaggagcagttcgtggacctgtgcatcctgctgggctccgactactgcgagtccatccggggcatcggccccaagcgggccgtggacctgatccagaagcacaagtccatcgaggagatcgtgcggcggctggacccctccaagtaccccgtgcccgagaactggctgcacaaggaggcccaccagctgttcctgaagcccgaggtgctggaccccgagtccgtggagctgaagtggtccgagcccaacgaggaggagctggtgaagttcatgtgcggcgagaagcagttctccgaggagcggatccggtccggcgtgaagcggctgtccaagtcccggcagggctccacccagggccggctggacgacttcttcaaggtgaccggctccctgtcctccgccaagcggaaggagcccgagcccaagggctccaccaagaagaaggccaagaccggcgccgccggcaagttcaagcggggcaagtccggcggctccaagcggaccgccgacggctccgagttcgagcccaagaagaagcggaaggtgtccgagtccgccacccccgagtccgtgtccggctggcggctgttcaagaagatctcctag

SEQ ID NO: 1477 - RNA, 1823 nt, synthetic construct
  misc_feature 1..1823: note = Synthetic
  source 1..1823: mol_type = other RNA
gggaagctcagaataaacgctcaactttggccggatctgccaccatgggcatccagggcctggccaagctgatcgccgacgtggccccctccgccatccgggagaacgacatcaagtcctacttcggccggaaggtggccatcgacgcctccatgtccatctaccagttcctgatcgccgtgcggcagggcggcgacgtgctgcagaacgaggagggcgagaccacctcccacctgatgggcatgttctaccggaccatccggatgatggagaacggcatcaagcccgtgtacgtgttcgacggcaagcccccccagctgaagtccggcgagctggccaagcggtccgagcggcgggccgaggccgagaagcagctgcagcaggcccaggccgccggcgccgagcaggaggtggagaagttcaccaagcggctggtgaaggtgaccaagcagcacaacgacgagtgcaagcacctgctgtccctgatgggcatcccctacctggacgccccctccgaggccgaggcctcctgcgccgccctggtgaaggccggcaaggtgtacgccgccgccaccgaggacatggactgcctgaccttcggctcccccgtgctgatgcggcacctgaccgcctccgaggccaagaagctgcccatccaggagttccacctgtcccggatcctgcaggagctgggcctgaaccaggagcagttcgtggacctgtgcatcctgctgggctccgactactgcgagtccatccggggcatcggccccaagcgggccgtggacctgatccagaagcacaagtccatcgaggagatcgtgcggcggctggacccctccaagtaccccgtgcccgagaactggctgcacaaggaggcccaccagctgttcctgaagcccgaggtgctggaccccgagtccgtggagctgaagtggtccgagcccaacgaggaggagctggtgaagttcatgtgcggcgagaagcagttctccgaggagcggatccggtccggcgtgaagcggctgtccaagtcccggcagggctccacccagggccggctggacgacttcttcaaggtgaccggctccctgtcctccgccaagcggaaggagcccgagcccaagggctccaccaagaagaaggccaagaccggcgccgccggcaagttcaagcggggcaagtccggcggctccaagcggaccgccgacggctccgagttcgagcccaagaagaagcggaaggtgtccgagtccgccacccccgagtccgtgtccggctggcggctgttcaagaagatctcctagctagcaccagcctcaagaacacccgaatggagtctctaagctacataataccaacttacactttacaaaatgttgtcccccaaaatgtagccattcgtatctgctcctaataaaaagaaagtttcttcacattctctcgagaaaaaaaaaaaatggaaaaaaaaaaaacggaaaaaaaaaaaaggtaaaaaaaaaaaatataaaaaaaaaaaacataaaaaaaaaaaacgaaaaaaaaaaaacgtaaaaaaaaaaaactcaaaaaaaaaaaagataaaaaaaaaaaacctaaaaaaaaaaaatgtaaaaaaaaaaaagggaaaaaaaaaaaacgcaaaaaaaaaaaacacaaaaaaaaaaaatgcaaaaaaaaaaaatcgaaaaaaaaaaaatctaaaaaaaaaaaacgaaaaaaaaaaaacccaaaaaaaaaaaagacaaaaaaaaaaaatagaaaaaaaaaaaagttaaaaaaaaaaaactgaaaaaaaaaaaatttaaaaaaaaaaaatctag

SEQ ID NO: 1478 - protein, 420 aa, synthetic construct
  REGION 1..420: note = Synthetic
MGIQGLAKLIADVAPSAIRENDIKSYFGRKVAIDASMSIYQFLIAVRQGGDVLQNEEGETTSHLMGMFYRTIRMMENGIKPVYVFDGKPPQLKSGELAKRSERRAEAEKQLQQAQAAGAEQEVEKFTKRLVKVTKQHNDECKHLLSLMGIPYLDAPSEAEASCAALVKAGKVYAAATEDMDCLTFGSPVLMRHLTASEAKKLPIQEFHLSRILQELGLNQEQFVDLCILLGSDYCESIRGIGPKRAVDLIQKHKSIEEIVRRLDPSKYPVPENWLHKEAHQLFLKPEVLDPESVELKWSEPNEEELVKFMCGEKQFSEERIRSGVKRLSKSRQGSTQGRLDDFFKVTGSLSSAKRKEPEPKGSTKKKAKTGAAGKFKRGKSGGSKRTADGSEFEPKKKRKVSESATPESVSGWRLFKKIS

SEQ ID NO: 1479 - DNA, 1203 bp, synthetic construct
  misc_feature 1..1203: note = Synthetic
  source 1..1203: mol_type = other DNA
atgggcatccagggcctggccaagctgatcgccgacgtggccccctccgccatccgggagaacgacatcaagtcctacttcggccggaaggtggccatcgacgcctccatgtccatctaccagttcctgatcgccgtgcggcagggcggcgacgtgctgcagaacgaggagggcgagaccacctcccacctgatgggcatgttctaccggaccatccggatgatggagaacggcatcaagcccgtgtacgtgttcgacggcaagcccccccagctgaagtccggcgagctggccaagcggtccgagcggcgggccgaggccgagaagcagctgcagcaggcccaggccgccggcgccgagcaggaggtggagaagttcaccaagcggctggtgaaggtgaccaagcagcacaacgacgagtgcaagcacctgctgtccctgatgggcatcccctacctggacgccccctccgaggccgaggcctcctgcgccgccctggtgaaggccggcaaggtgtacgccgccgccaccgaggacatggactgcctgaccttcggctcccccgtgctgatgcggcacctgaccgcctccgaggccaagaagctgcccatccaggagttccacctgtcccggatcctgcaggagctgggcctgaaccaggagcagttcgtggacctgtgcatcctgctgggctccgactactgcgagtccatccggggcatcggccccaagcgggccgtggacctgatccagaagcacaagtccatcgaggagatcgtgcggcggctggacccctccaagtaccccgtgcccgagaactggctgcacaaggaggcccaccagctgttcctgaagcccgaggtgctggaccccgagtccgtggagctgaagtggtccgagcccaacgaggaggagctggtgaagttcatgtgcggcgagaagcagttctccgaggagcggatccggtccggcgtgaagcggctgtccaagtcccggcagggctccacccagggccggctggacgacttcttcaaggtgaccggctccctgtcctccgccaagcggaaggagcccgagcccaagggctccaccaagaagaaggccaagaccggcgccgccggcaagttcaagcggggcaagtccggcggctccaagcggaccgccgacggctccgagttcgagcccaagaagaagcggaaggtg

SEQ ID NO: 1480 - skipped

SEQ ID NO: 1481 - DNA, 1263 bp, synthetic construct
  misc_feature 1..1263: note = Synthetic
  source 1..1263: mol_type = other DNA
atgggcatccacggcctggccaagctgatcgccgacgtggcccccggcgccatccgggagaacgacatcaagtcctacttcggccggaaggtggccatcgacgcctccatgtccatctaccagttcctgatcgccgtgcggcagggcgccgacatgctgcagaacgaggagggcgagaccacctcccacctgatgggcatgttctaccggaccatccggatggtggagaacggcatcaagcccgtgtacgtgttcgacggcaagcccccccagctgaagtccggcgagctggccaagcggaccgagcggcgggccgaggccgagaagcagctgcaggaggcccaggaggccggcgaggaggacaacgtggagaagttctccaagcggctggtgaaggtgaccaagcagcacaacgacgagtgcaagaagctgctgaccctgatgggcatcccctacgtggaggcccccggcgaggccgaggcctcctgcgccaccctggtgaaggccggcaaggtgtacgccgccgccaccgaggacatggactgcctgaccttcggctcccccgtgctgatgcggcacctgaccgcctccgaggccaagaagctgcccatccaggagttccacctgaaccgggtgctgcaggacctggacctgacctgggagcagttcgtggacctgtgcatcctgctgggctgcgactactgcgagtccatccggggcatcggccccaagcgggccgtggagctgatcaagcagcacaagaccatcgagaagatcgtgcagcacatcgaccccaagaagtaccccctgcccgagaactggctgcacaaggaggcccagcagctgttcctgcagcccgacgtggtggaccccgaggccgtggagctgaagtggtccgagcccgacgaggacggcctggtgctgttcatgtgcggcgagaagcagttcaacgaggagcggatccggaacggcatcaagcggctgtccaagtcccggcagggctccacccagggccggctggacgacttcttcaaggtgaccggctccatcacctccgccaagcggaaggagcccgagcccaagggctccgccaagaagaaggccaagggcaactccgccgccgccgccaagttcaagaagtccggcggctccaagcggaccgccgacggctccgagttcgagcccaagaagaagcggaaggtgtccgagtccgccacccccgagtccgtgtccggctggcggctgttcaagaagatctcctag

SEQ ID NO: 1482 - RNA, 1823 nt, synthetic construct
  misc_feature 1..1823: note = Synthetic
  source 1..1823: mol_type = other RNA
gggaagctcagaataaacgctcaactttggccggatctgccaccatgggcatccacggcctggccaagctgatcgccgacgtggcccccggcgccatccgggagaacgacatcaagtcctacttcggccggaaggtggccatcgacgcctccatgtccatctaccagttcctgatcgccgtgcggcagggcgccgacatgctgcagaacgaggagggcgagaccacctcccacctgatgggcatgttctaccggaccatccggatggtggagaacggcatcaagcccgtgtacgtgttcgacggcaagcccccccagctgaagtccggcgagctggccaagcggaccgagcggcgggccgaggccgagaagcagctgcaggaggcccaggaggccggcgaggaggacaacgtggagaagttctccaagcggctggtgaaggtgaccaagcagcacaacgacgagtgcaagaagctgctgaccctgatgggcatcccctacgtggaggcccccggcgaggccgaggcctcctgcgccaccctggtgaaggccggcaaggtgtacgccgccgccaccgaggacatggactgcctgaccttcggctcccccgtgctgatgcggcacctgaccgcctccgaggccaagaagctgcccatccaggagttccacctgaaccgggtgctgcaggacctggacctgacctgggagcagttcgtggacctgtgcatcctgctgggctgcgactactgcgagtccatccggggcatcggccccaagcgggccgtggagctgatcaagcagcacaagaccatcgagaagatcgtgcagcacatcgaccccaagaagtaccccctgcccgagaactggctgcacaaggaggcccagcagctgttcctgcagcccgacgtggtggaccccgaggccgtggagctgaagtggtccgagcccgacgaggacggcctggtgctgttcatgtgcggcgagaagcagttcaacgaggagcggatccggaacggcatcaagcggctgtccaagtcccggcagggctccacccagggccggctggacgacttcttcaaggtgaccggctccatcacctccgccaagcggaaggagcccgagcccaagggctccgccaagaagaaggccaagggcaactccgccgccgccgccaagttcaagaagtccggcggctccaagcggaccgccgacggctccgagttcgagcccaagaagaagcggaaggtgtccgagtccgccacccccgagtccgtgtccggctggcggctgttcaagaagatctcctagctagcaccagcctcaagaacacccgaatggagtctctaagctacataataccaacttacactttacaaaatgttgtcccccaaaatgtagccattcgtatctgctcctaataaaaagaaagtttcttcacattctctcgagaaaaaaaaaaaatggaaaaaaaaaaaacggaaaaaaaaaaaaggtaaaaaaaaaaaatataaaaaaaaaaaacataaaaaaaaaaaacgaaaaaaaaaaaacgtaaaaaaaaaaaactcaaaaaaaaaaaagataaaaaaaaaaaacctaaaaaaaaaaaatgtaaaaaaaaaaaagggaaaaaaaaaaaacgcaaaaaaaaaaaacacaaaaaaaaaaaatgcaaaaaaaaaaaatcgaaaaaaaaaaaatctaaaaaaaaaaaacgaaaaaaaaaaaacccaaaaaaaaaaaagacaaaaaaaaaaaatagaaaaaaaaaaaagttaaaaaaaaaaaactgaaaaaaaaaaaatttaaaaaaaaaaaatctag

SEQ ID NO: 1483 - protein, 420 aa, synthetic construct
  REGION 1..420: note = Synthetic
MGIHGLAKLIADVAPGAIRENDIKSYFGRKVAIDASMSIYQFLIAVRQGADMLQNEEGETTSHLMGMFYRTIRMVENGIKPVYVFDGKPPQLKSGELAKRTERRAEAEKQLQEAQEAGEEDNVEKFSKRLVKVTKQHNDECKKLLTLMGIPYVEAPGEAEASCATLVKAGKVYAAATEDMDCLTFGSPVLMRHLTASEAKKLPIQEFHLNRVLQDLDLTWEQFVDLCILLGCDYCESIRGIGPKRAVELIKQHKTIEKIVQHIDPKKYPLPENWLHKEAQQLFLQPDVVDPEAVELKWSEPDEDGLVLFMCGEKQFNEERIRNGIKRLSKSRQGSTQGRLDDFFKVTGSITSAKRKEPEPKGSAKKKAKGNSAAAAKFKKSGGSKRTADGSEFEPKKKRKVSESATPESVSGWRLFKKIS

SEQ ID NO: 1484 - DNA, 1203 bp, synthetic construct
  misc_feature 1..1203: note = Synthetic
  source 1..1203: mol_type = other DNA
atgggcatccacggcctggccaagctgatcgccgacgtggcccccggcgccatccgggagaacgacatcaagtcctacttcggccggaaggtggccatcgacgcctccatgtccatctaccagttcctgatcgccgtgcggcagggcgccgacatgctgcagaacgaggagggcgagaccacctcccacctgatgggcatgttctaccggaccatccggatggtggagaacggcatcaagcccgtgtacgtgttcgacggcaagcccccccagctgaagtccggcgagctggccaagcggaccgagcggcgggccgaggccgagaagcagctgcaggaggcccaggaggccggcgaggaggacaacgtggagaagttctccaagcggctggtgaaggtgaccaagcagcacaacgacgagtgcaagaagctgctgaccctgatgggcatcccctacgtggaggcccccggcgaggccgaggcctcctgcgccaccctggtgaaggccggcaaggtgtacgccgccgccaccgaggacatggactgcctgaccttcggctcccccgtgctgatgcggcacctgaccgcctccgaggccaagaagctgcccatccaggagttccacctgaaccgggtgctgcaggacctggacctgacctgggagcagttcgtggacctgtgcatcctgctgggctgcgactactgcgagtccatccggggcatcggccccaagcgggccgtggagctgatcaagcagcacaagaccatcgagaagatcgtgcagcacatcgaccccaagaagtaccccctgcccgagaactggctgcacaaggaggcccagcagctgttcctgcagcccgacgtggtggaccccgaggccgtggagctgaagtggtccgagcccgacgaggacggcctggtgctgttcatgtgcggcgagaagcagttcaacgaggagcggatccggaacggcatcaagcggctgtccaagtcccggcagggctccacccagggccggctggacgacttcttcaaggtgaccggctccatcacctccgccaagcggaaggagcccgagcccaagggctccgccaagaagaaggccaagggcaactccgccgccgccgccaagttcaagaagtccggcggctccaagcggaccgccgacggctccgagttcgagcccaagaagaagcggaaggtg

SEQ ID NO: 1485 - protein, 401 aa, synthetic construct
  REGION 1..401: note = Synthetic
MGIHGLAKLIADVAPGAIRENDIKSYFGRKVAIDASMSIYQFLIAVRQGADMLQNEEGETTSHLMGMFYRTIRMVENGIKPVYVFDGKPPQLKSGELAKRTERRAEAEKQLQEAQEAGEEDNVEKFSKRLVKVTKQHNDECKKLLTLMGIPYVEAPGEAEASCATLVKAGKVYAAATEDMDCLTFGSPVLMRHLTASEAKKLPIQEFHLNRVLQDLDLTWEQFVDLCILLGCDYCESIRGIGPKRAVELIKQHKTIEKIVQHIDPKKYPLPENWLHKEAQQLFLQPDVVDPEAVELKWSEPDEDGLVLFMCGEKQFNEERIRNGIKRLSKSRQGSTQGRLDDFFKVTGSITSAKRKEPEPKGSAKKKAKGNSAAAAKFKKSGGSKRTADGSEFEPKKKRKV

SEQ ID NO: 1486 - DNA, 1347 bp, synthetic construct
  misc_feature 1..1347: note = Synthetic
  source 1..1347: mol_type = other DNA
atgggcatccagggcctggccaagctgatcgccgacgtggccccctccgccatccgggagaacgacatcaagtcctacttcggccggaaggtggccatcgacgcctccatgtccatctaccagttcctgatcgccgtgcggcagggcggcgacgtgctgcagaacgaggagggcgagaccacctcccacctgatgggcatgttctaccggaccatccggatgatggagaacggcatcaagcccgtgtacgtgttcgacggcaagcccccccagctgaagtccggcgagctggccaagcggtccgagcggcgggccgaggccgagaagcagctgcagcaggcccaggccgccggcgccgagcaggaggtggagaagttcaccaagcggctggtgaaggtgaccaagcagcacaacgacgagtgcaagcacctgctgtccctgatgggcatcccctacctggacgccccctccgaggccgaggcctcctgcgccgccctggtgaaggccggcaaggtgtacgccgccgccaccgaggacatggactgcctgaccttcggctcccccgtgctgatgcggcacctgaccgcctccgaggccaagaagctgcccatccaggagttccacctgtcccggatcctgcaggagctgggcctgaaccaggagcagttcgtggacctgtgcatcctgctgggctccgactactgcgagtccatccggggcatcggccccaagcgggccgtggacctgatccagaagcacaagtccatcgaggagatcgtgcggcggctggaccccaacaagtaccccgtgcccgagaactggctgcacaaggaggcccaccagctgttcctggagcccgaggtgctggaccccgagtccgtggagctgaagtggtccgagcccaacgaggaggagctgatcaagttcatgtgcggcgagaagcagttctccgaggagcggatccggtccggcgtgaagcggctgtccaagtcccggcagggctccacccagggccggctggacgacttcttcaaggtgaccggctccctgtcctccgccaagcggaaggagcccgagcccaagggctccaccaagaagaaggccaagaccggcgccgccggcaagttcaagcggggcaagtccggcggctccaagcggaccgccgacggctccgagttcgagcccaagaagaagcggaaggtgtccgagtccgccacccccgagtccgtgtccggctggcggctgttcaagaagatctccaagatcgccgccctgaaggagaagatcgccgccctgaaggagaagaacgccgccctgaagtggaagatcgccgccctgaaggagtag

SEQ ID NO: 1487 - RNA, 1907 nt, synthetic construct
  misc_feature 1..1907: note = Synthetic
  source 1..1907: mol_type = other RNA
gggaagctcagaataaacgctcaactttggccggatctgccaccatgggcatccagggcctggccaagctgatcgccgacgtggccccctccgccatccgggagaacgacatcaagtcctacttcggccggaaggtggccatcgacgcctccatgtccatctaccagttcctgatcgccgtgcggcagggcggcgacgtgctgcagaacgaggagggcgagaccacctcccacctgatgggcatgttctaccggaccatccggatgatggagaacggcatcaagcccgtgtacgtgttcgacggcaagcccccccagctgaagtccggcgagctggccaagcggtccgagcggcgggccgaggccgagaagcagctgcagcaggcccaggccgccggcgccgagcaggaggtggagaagttcaccaagcggctggtgaaggtgaccaagcagcacaacgacgagtgcaagcacctgctgtccctgatgggcatcccctacctggacgccccctccgaggccgaggcctcctgcgccgccctggtgaaggccggcaaggtgtacgccgccgccaccgaggacatggactgcctgaccttcggctcccccgtgctgatgcggcacctgaccgcctccgaggccaagaagctgcccatccaggagttccacctgtcccggatcctgcaggagctgggcctgaaccaggagcagttcgtggacctgtgcatcctgctgggctccgactactgcgagtccatccggggcatcggccccaagcgggccgtggacctgatccagaagcacaagtccatcgaggagatcgtgcggcggctggaccccaacaagtaccccgtgcccgagaactggctgcacaaggaggcccaccagctgttcctggagcccgaggtgctggaccccgagtccgtggagctgaagtggtccgagcccaacgaggaggagctgatcaagttcatgtgcggcgagaagcagttctccgaggagcggatccggtccggcgtgaagcggctgtccaagtcccggcagggctccacccagggccggctggacgacttcttcaaggtgaccggctccctgtcctccgccaagcggaaggagcccgagcccaagggctccaccaagaagaaggccaagaccggcgccgccggcaagttcaagcggggcaagtccggcggctccaagcggaccgccgacggctccgagttcgagcccaagaagaagcggaaggtgtccgagtccgccacccccgagtccgtgtccggctggcggctgttcaagaagatctccaagatcgccgccctgaaggagaagatcgccgccctgaaggagaagaacgccgccctgaagtggaagatcgccgccctgaaggagtagctagcaccagcctcaagaacacccgaatggagtctctaagctacataataccaacttacactttacaaaatgttgtcccccaaaatgtagccattcgtatctgctcctaataaaaagaaagtttcttcacattctctcgagaaaaaaaaaaaatggaaaaaaaaaaaacggaaaaaaaaaaaaggtaaaaaaaaaaaatataaaaaaaaaaaacataaaaaaaaaaaacgaaaaaaaaaaaacgtaaaaaaaaaaaactcaaaaaaaaaaaagataaaaaaaaaaaacctaaaaaaaaaaaatgtaaaaaaaaaaaagggaaaaaaaaaaaacgcaaaaaaaaaaaacacaaaaaaaaaaaatgcaaaaaaaaaaaatcgaaaaaaaaaaaatctaaaaaaaaaaaacgaaaaaaaaaaaacccaaaaaaaaaaaagacaaaaaaaaaaaatagaaaaaaaaaaaagttaaaaaaaaaaaactgaaaaaaaaaaaatttaaaaaaaaaaaatctag

SEQ ID NO: 1488 - protein, 448 aa, synthetic construct
  REGION 1..448: note = Synthetic
MGIQGLAKLIADVAPSAIRENDIKSYFGRKVAIDASMSIYQFLIAVRQGGDVLQNEEGETTSHLMGMFYRTIRMMENGIKPVYVFDGKPPQLKSGELAKRSERRAEAEKQLQQAQAAGAEQEVEKFTKRLVKVTKQHNDECKHLLSLMGIPYLDAPSEAEASCAALVKAGKVYAAATEDMDCLTFGSPVLMRHLTASEAKKLPIQEFHLSRILQELGLNQEQFVDLCILLGSDYCESIRGIGPKRAVDLIQKHKSIEEIVRRLDPNKYPVPENWLHKEAHQLFLEPEVLDPESVELKWSEPNEEELIKFMCGEKQFSEERIRSGVKRLSKSRQGSTQGRLDDFFKVTGSLSSAKRKEPEPKGSTKKKAKTGAAGKFKRGKSGGSKRTADGSEFEPKKKRKVSESATPESVSGWRLFKKISKIAALKEKIAALKEKNAALKWKIAALKE

SEQ ID NO: 1489 - DNA, 1290 bp, synthetic construct
  misc_feature 1..1290: note = Synthetic
  source 1..1290: mol_type = other DNA
atgggcatccagggcctggccaagctgatcgccgacgtggccccctccgccatccgggagaacgacatcaagtcctacttcggccggaaggtggccatcgacgcctccatgtccatctaccagttcctgatcgccgtgcggcagggcggcgacgtgctgcagaacgaggagggcgagaccacctcccacctgatgggcatgttctaccggaccatccggatgatggagaacggcatcaagcccgtgtacgtgttcgacggcaagcccccccagctgaagtccggcgagctggccaagcggtccgagcggcgggccgaggccgagaagcagctgcagcaggcccaggccgccggcgccgagcaggaggtggagaagttcaccaagcggctggtgaaggtgaccaagcagcacaacgacgagtgcaagcacctgctgtccctgatgggcatcccctacctggacgccccctccgaggccgaggcctcctgcgccgccctggtgaaggccggcaaggtgtacgccgccgccaccgaggacatggactgcctgaccttcggctcccccgtgctgatgcggcacctgaccgcctccgaggccaagaagctgcccatccaggagttccacctgtcccggatcctgcaggagctgggcctgaaccaggagcagttcgtggacctgtgcatcctgctgggctccgactactgcgagtccatccggggcatcggccccaagcgggccgtggacctgatccagaagcacaagtccatcgaggagatcgtgcggcggctggaccccaacaagtaccccgtgcccgagaactggctgcacaaggaggcccaccagctgttcctggagcccgaggtgctggaccccgagtccgtggagctgaagtggtccgagcccaacgaggaggagctgatcaagttcatgtgcggcgagaagcagttctccgaggagcggatccggtccggcgtgaagcggctgtccaagtcccggcagggctccacccagggccggctggacgacttcttcaaggtgaccggctccctgtcctccgccaagcggaaggagcccgagcccaagggctccaccaagaagaaggccaagaccggcgccgccggcaagttcaagcggggcaagtccggcggctccaagcggaccgccgacggctccgagttcgagcccaagaagaagcggaaggtgaagatcgccgccctgaaggagaagatcgccgccctgaaggagaagaacgccgccctgaagtggaagatcgccgccctgaaggagtag

SEQ ID NO: 1490 - protein, 429 aa, synthetic construct
  REGION 1..429: note = Synthetic
MGIQGLAKLIADVAPSAIRENDIKSYFGRKVAIDASMSIYQFLIAVRQGGDVLQNEEGETTSHLMGMFYRTIRMMENGIKPVYVFDGKPPQLKSGELAKRSERRAEAEKQLQQAQAAGAEQEVEKFTKRLVKVTKQHNDECKHLLSLMGIPYLDAPSEAEASCAALVKAGKVYAAATEDMDCLTFGSPVLMRHLTASEAKKLPIQEFHLSRILQELGLNQEQFVDLCILLGSDYCESIRGIGPKRAVDLIQKHKSIEEIVRRLDPNKYPVPENWLHKEAHQLFLEPEVLDPESVELKWSEPNEEELIKFMCGEKQFSEERIRSGVKRLSKSRQGSTQGRLDDFFKVTGSLSSAKRKEPEPKGSTKKKAKTGAAGKFKRGKSGGSKRTADGSEFEPKKKRKVKIAALKEKIAALKEKNAALKWKIAALKE

SEQ ID NO: 1491 - DNA, 1347 bp, synthetic construct
  misc_feature 1..1347: note = Synthetic
  source 1..1347: mol_type = other DNA
atgggcatccagggcctggccaagctgatcgccgacgtggccccctccgccatccgggagaacgacatcaagtcctacttcggccggaaggtggccatcgacgcctccatgtccatctaccagttcctgatcgccgtgcggcagggcggcgacgtgctgcagaacgaggagggcgagaccacctcccacctgatgggcatgttctaccggaccatccggatgatggagaacggcatcaagcccgtgtacgtgttcgacggcaagcccccccagctgaagtccggcgagctggccaagcggtccgagcggcgggccgaggccgagaagcagctgcagcaggcccaggccgccggcgccgagcaggaggtggagaagttcaccaagcggctggtgaaggtgaccaagcagcacaacgacgagtgcaagcacctgctgtccctgatgggcatcccctacctggacgccccctccgaggccgaggcctcctgcgccgccctggtgaaggccggcaaggtgtacgccgccgccaccgaggacatggactgcctgaccttcggctcccccgtgctgatgcggcacctgaccgcctccgaggccaagaagctgcccatccaggagttccacctgtcccggatcctgcaggagctgggcctgaaccaggagcagttcgtggacctgtgcatcctgctgggctccgactactgcgagtccatccggggcatcggccccaagcgggccgtggacctgatccagaagcacaagtccatcgaggagatcgtgcggcggctggaccccaacaagtaccccgtgcccgagaactggctgcacaaggaggcccaccagctgttcctggagcccgaggtgctggaccccgagtccgtggagctgaagtggtccgagcccaacgaggaggagctgatcaagttcatgtgcggcgagaagcagttctccgaggagcggatccggtccggcgtgaagcggctgtccaagtcccggcagggctccacccagggccggctggacgacttcttcaaggtgaccggctccctgtcctccgccaagcggaaggagcccgagcccaagggctccaccaagaagaaggccaagaccggcgccgccggcaagttcaagcggggcaagtccggcggctccaagcggaccgccgacggctccgagttcgagcccaagaagaagcggaaggtgtccgagtccgccacccccgagtccgtgtccggctggcggctgttcaagaagatctccgagatcgccgccctggagaaggagatcgccgccctggagaaggagaacgccgccctggagtgggagatcgccgccctggagaagtag

SEQ ID NO: 1492 - RNA, 1907 nt, synthetic construct
  misc_feature 1..1907: note = Synthetic
  source 1..1907: mol_type = other RNA
gggaagctcagaataaacgctcaactttggccggatctgccaccatgggcatccagggcctggccaagctgatcgccgacgtggccccctccgccatccgggagaacgacatcaagtcctacttcggccggaaggtggccatcgacgcctccatgtccatctaccagttcctgatcgccgtgcggcagggcggcgacgtgctgcagaacgaggagggcgagaccacctcccacctgatgggcatgttctaccggaccatccggatgatggagaacggcatcaagcccgtgtacgtgttcgacggcaagcccccccagctgaagtccggcgagctggccaagcggtccgagcggcgggccgaggccgagaagcagctgcagcaggcccaggccgccggcgccgagcaggaggtggagaagttcaccaagcggctggtgaaggtgaccaagcagcacaacgacgagtgcaagcacctgctgtccctgatgggcatcccctacctggacgccccctccgaggccgaggcctcctgcgccgccctggtgaaggccggcaaggtgtacgccgccgccaccgaggacatggactgcctgaccttcggctcccccgtgctgatgcggcacctgaccgcctccgaggccaagaagctgcccatccaggagttccacctgtcccggatcctgcaggagctgggcctgaaccaggagcagttcgtggacctgtgcatcctgctgggctccgactactgcgagtccatccggggcatcggccccaagcgggccgtggacctgatccagaagcacaagtccatcgaggagatcgtgcggcggctggaccccaacaagtaccccgtgcccgagaactggctgcacaaggaggcccaccagctgttcctggagcccgaggtgctggaccccgagtccgtggagctgaagtggtccgagcccaacgaggaggagctgatcaagttcatgtgcggcgagaagcagttctccgaggagcggatccggtccggcgtgaagcggctgtccaagtcccggcagggctccacccagggccggctggacgacttcttcaaggtgaccggctccctgtcctccgccaagcggaaggagcccgagcccaagggctccaccaagaagaaggccaagaccggcgccgccggcaagttcaagcggggcaagtccggcggctccaagcggaccgccgacggctccgagttcgagcccaagaagaagcggaaggtgtccgagtccgccacccccgagtccgtgtccggctggcggctgttcaagaagatctccgagatcgccgccctggagaaggagatcgccgccctggagaaggagaacgccgccctggagtgggagatcgccgccctggagaagtagctagcaccagcctcaagaacacccgaatggagtctctaagctacataataccaacttacactttacaaaatgttgtcccccaaaatgtagccattcgtatctgctcctaataaaaagaaagtttcttcacattctctcgagaaaaaaaaaaaatggaaaaaaaaaaaacggaaaaaaaaaaaaggtaaaaaaaaaaaatataaaaaaaaaaaacataaaaaaaaaaaacgaaaaaaaaaaaacgtaaaaaaaaaaaactcaaaaaaaaaaaagataaaaaaaaaaaacctaaaaaaaaaaaatgtaaaaaaaaaaaagggaaaaaaaaaaaacgcaaaaaaaaaaaacacaaaaaaaaaaaatgcaaaaaaaaaaaatcgaaaaaaaaaaaatctaaaaaaaaaaaacgaaaaaaaaaaaacccaaaaaaaaaaaagacaaaaaaaaaaaatagaaaaaaaaaaaagttaaaaaaaaaaaactgaaaaaaaaaaaatttaaaaaaaaaaaatctag

SEQ ID NO: 1493 - protein, 448 aa, synthetic construct
  REGION 1..448: note = Synthetic
MGIQGLAKLIADVAPSAIRENDIKSYFGRKVAIDASMSIYQFLIAVRQGGDVLQNEEGETTSHLMGMFYRTIRMMENGIKPVYVFDGKPPQLKSGELAKRSERRAEAEKQLQQAQAAGAEQEVEKFTKRLVKVTKQHNDECKHLLSLMGIPYLDAPSEAEASCAALVKAGKVYAAATEDMDCLTFGSPVLMRHLTASEAKKLPIQEFHLSRILQELGLNQEQFVDLCILLGSDYCESIRGIGPKRAVDLIQKHKSIEEIVRRLDPNKYPVPENWLHKEAHQLFLEPEVLDPESVELKWSEPNEEELIKFMCGEKQFSEERIRSGVKRLSKSRQGSTQGRLDDFFKVTGSLSSAKRKEPEPKGSTKKKAKTGAAGKFKRGKSGGSKRTADGSEFEPKKKRKVSESATPESVSGWRLFKKISEIAALEKEIAALEKENAALEWEIAALEK

SEQ ID NO: 1494 - DNA, 1290 bp, synthetic construct
  misc_feature 1..1290: note = Synthetic
  source 1..1290: mol_type = other DNA
atgggcatccagggcctggccaagctgatcgccgacgtggccccctccgccatccgggagaacgacatcaagtcctacttcggccggaaggtggccatcgacgcctccatgtccatctaccagttcctgatcgccgtgcggcagggcggcgacgtgctgcagaacgaggagggcgagaccacctcccacctgatgggcatgttctaccggaccatccggatgatggagaacggcatcaagcccgtgtacgtgttcgacggcaagcccccccagctgaagtccggcgagctggccaagcggtccgagcggcgggccgaggccgagaagcagctgcagcaggcccaggccgccggcgccgagcaggaggtggagaagttcaccaagcggctggtgaaggtgaccaagcagcacaacgacgagtgcaagcacctgctgtccctgatgggcatcccctacctggacgccccctccgaggccgaggcctcctgcgccgccctggtgaaggccggcaaggtgtacgccgccgccaccgaggacatggactgcctgaccttcggctcccccgtgctgatgcggcacctgaccgcctccgaggccaagaagctgcccatccaggagttccacctgtcccggatcctgcaggagctgggcctgaaccaggagcagttcgtggacctgtgcatcctgctgggctccgactactgcgagtccatccggggcatcggccccaagcgggccgtggacctgatccagaagcacaagtccatcgaggagatcgtgcggcggctggaccccaacaagtaccccgtgcccgagaactggctgcacaaggaggcccaccagctgttcctggagcccgaggtgctggaccccgagtccgtggagctgaagtggtccgagcccaacgaggaggagctgatcaagttcatgtgcggcgagaagcagttctccgaggagcggatccggtccggcgtgaagcggctgtccaagtcccggcagggctccacccagggccggctggacgacttcttcaaggtgaccggctccctgtcctccgccaagcggaaggagcccgagcccaagggctccaccaagaagaaggccaagaccggcgccgccggcaagttcaagcggggcaagtccggcggctccaagcggaccgccgacggctccgagttcgagcccaagaagaagcggaaggtggagatcgccgccctggagaaggagatcgccgccctggagaaggagaacgccgccctggagtgggagatcgccgccctggagaagtag

SEQ ID NO: 1495 - protein, 429 aa, synthetic construct
  REGION 1..429: note = Synthetic
MGIQGLAKLIADVAPSAIRENDIKSYFGRKVAIDASMSIYQFLIAVRQGGDVLQNEEGETTSHLMGMFYRTIRMMENGIKPVYVFDGKPPQLKSGELAKRSERRAEAEKQLQQAQAAGAEQEVEKFTKRLVKVTKQHNDECKHLLSLMGIPYLDAPSEAEASCAALVKAGKVYAAATEDMDCLTFGSPVLMRHLTASEAKKLPIQEFHLSRILQELGLNQEQFVDLCILLGSDYCESIRGIGPKRAVDLIQKHKSIEEIVRRLDPNKYPVPENWLHKEAHQLFLEPEVLDPESVELKWSEPNEEELIKFMCGEKQFSEERIRSGVKRLSKSRQGSTQGRLDDFFKVTGSLSSAKRKEPEPKGSTKKKAKTGAAGKFKRGKSGGSKRTADGSEFEPKKKRKVEIAALEKEIAALEKENAALEWEIAALEK

SEQ ID NO: 1496 - DNA, 2016 bp, synthetic construct
  misc_feature 1..2016: note = Synthetic
  source 1..2016: mol_type = other DNA
atggactacaaggacgacgacgacaaggactacaaggacgacgacgacaaggactacaaggacgacgacgacaaggccgccgccatgtccgtggagctgacccccccccggtccgacggctccgtgggcttcgcccccgtggtggtgccccccgccccccggaagcccctgcggcggcgggccgtgtccgacctggagaagctgtacaaggtgaagcggcggctggtgttcggcgccgacgacggcgccgtggacaacgacacctccaacaacaactccggctcctcctccaccacctcccggtcccggcggaagaccgccgccgacgtggtgtccgactcccccaagcggaccgacgactcctccaccgccggcgaggacggctacacccactgcgtgcactcctgcgcctgcacccccggcgagcggcacctgctgtgctgcgagctggtgtccatcggcgactccgtgtccgtggcccggtgccccctgtgctccctgggcatctccaccacctacctgtcccggggctgctgccggggccggtccaaggtgaccggcggcgacgaggacgaggaggacgaggacgaggaggagaactcccaggacgaggaccgggacgaggaggaggccgcctccgcctcctcctccggcggcctggagtggtccgacgactccaactccgccctgtcctggtccgacgagaacatcatcatctcccccttccccggcctgaagtgctacgtgaccaccttcgaggacatccggcagcccgtgctgctggagaccggctccgcctacctgcccgtgtacgtgccctacgacgagtccttctgccggaaccggtgcctggagcggggcggcgacgacgacgacgagcgggacgccaccctgatcggcaagggctccttcggccaggtgtggcggctgtccgacaagaagaccgccctgaaggccgccgcctccgagtccatcaacgagaccctgctgaccgtgtggatctccggcgtggtgcggtcccgggcccaggacgccggctaccggggcgagctggacgactccgtgtactgcaacatcctggtggccaccggctcctgcctgcggcacaacctggtgtccttcgcctccttcgaccgggacctgtacaactaccggggctggcactacgccggcctggcctcctaccggcgggccttctccggcatcgccgacgccctgcggttcctgaacctgcggtgcggcgtgggccacttcgacgtgacccccatgaacgtgctgatcaactacgaccgggccgacgaccggcagatcgcccgggccgtgatctgcgacttctccctgtcccagtgccacaccgagggcaccaccggccactgcgtggtggtgttccagcagaccaagaccgtgcgggccctgcccaagtccgcctactacctgaccgacatctaccaccccgccttcaagcccctgatgctgcagaagctgtgcgccatcgagccccggaagcagttccccaagccctccgccaaccggttctgcgtgtccgacctgtgcgccctgggccacgtggccgccttctgcctggtgcgggtgctggacgagcggggccagctgaaggtgcggtccacctccgaggacgccctgttcggcgtggcccggaagacctgcgacgccctggcccggcactccgtggacgaggtggccaacttctgctccctgctgatcacccggcagctggcctacaccgccaccctgctgggctccgacgacatgcgggagcccatggcccggctgtgcgactacttcgagaccgtgtccgacaaggacgcccccgaccggttccggtccgtgtacaagcgggcccggcgggagatcgacggctcctacatggtgcggctgctgctggccgcctccgagaccgaggacggccggtacctgctggacaacatccgggccacctgcctgatggtggactccgaggacctggacgtggacccctacaagatcttcccctag

SEQ ID NO: 1497 - RNA, 2576 nt, synthetic construct
  misc_feature 1..2576: note = Synthetic
  source 1..2576: mol_type = other RNA
gggaagctcagaataaacgctcaactttggccggatctgccaccatggactacaaggacgacgacgacaaggactacaaggacgacgacgacaaggactacaaggacgacgacgacaaggccgccgccatgtccgtggagctgacccccccccggtccgacggctccgtgggcttcgcccccgtggtggtgccccccgccccccggaagcccctgcggcggcgggccgtgtccgacctggagaagctgtacaaggtgaagcggcggctggtgttcggcgccgacgacggcgccgtggacaacgacacctccaacaacaactccggctcctcctccaccacctcccggtcccggcggaagaccgccgccgacgtggtgtccgactcccccaagcggaccgacgactcctccaccgccggcgaggacggctacacccactgcgtgcactcctgcgcctgcacccccggcgagcggcacctgctgtgctgcgagctggtgtccatcggcgactccgtgtccgtggcccggtgccccctgtgctccctgggcatctccaccacctacctgtcccggggctgctgccggggccggtccaaggtgaccggcggcgacgaggacgaggaggacgaggacgaggaggagaactcccaggacgaggaccgggacgaggaggaggccgcctccgcctcctcctccggcggcctggagtggtccgacgactccaactccgccctgtcctggtccgacgagaacatcatcatctcccccttccccggcctgaagtgctacgtgaccaccttcgaggacatccggcagcccgtgctgctggagaccggctccgcctacctgcccgtgtacgtgccctacgacgagtccttctgccggaaccggtgcctggagcggggcggcgacgacgacgacgagcgggacgccaccctgatcggcaagggctccttcggccaggtgtggcggctgtccgacaagaagaccgccctgaaggccgccgcctccgagtccatcaacgagaccctgctgaccgtgtggatctccggcgtggtgcggtcccgggcccaggacgccggctaccggggcgagctggacgactccgtgtactgcaacatcctggtggccaccggctcctgcctgcggcacaacctggtgtccttcgcctccttcgaccgggacctgtacaactaccggggctggcactacgccggcctggcctcctaccggcgggccttctccggcatcgccgacgccctgcggttcctgaacctgcggtgcggcgtgggccacttcgacgtgacccccatgaacgtgctgatcaactacgaccgggccgacgaccggcagatcgcccgggccgtgatctgcgacttctccctgtcccagtgccacaccgagggcaccaccggccactgcgtggtggtgttccagcagaccaagaccgtgcgggccctgcccaagtccgcctactacctgaccgacatctaccaccccgccttcaagcccctgatgctgcagaagctgtgcgccatcgagccccggaagcagttccccaagccctccgccaaccggttctgcgtgtccgacctgtgcgccctgggccacgtggccgccttctgcctggtgcgggtgctggacgagcggggccagctgaaggtgcggtccacctccgaggacgccctgttcggcgtggcccggaagacctgcgacgccctggcccggcactccgtggacgaggtggccaacttctgctccctgctgatcacccggcagctggcctacaccgccaccctgctgggctccgacgacatgcgggagcccatggcccggctgtgcgactacttcgagaccgtgtccgacaaggacgcccccgaccggttccggtccgtgtacaagcgggcccggcgggagatcgacggctcctacatggtgcggctgctgctggccgcctccgagaccgaggacggccggtacctgctggacaacatccgggccacctgcctgatggtggactccgaggacctggacgtggacccctacaagatcttcccctagctagcaccagcctcaagaacacccgaatggagtctctaagctacataataccaacttacactttacaaaatgttgtcccccaaaatgtagccattcgtatctgctcctaataaaaagaaagtttcttcacattctctcgagaaaaaaaaaaaatggaaaaaaaaaaaacggaaaaaaaaaaaaggtaaaaaaaaaaaatataaaaaaaaaaaacataaaaaaaaaaaacgaaaaaaaaaaaacgtaaaaaaaaaaaactcaaaaaaaaaaaagataaaaaaaaaaaacctaaaaaaaaaaaatgtaaaaaaaaaaaagggaaaaaaaaaaaacgcaaaaaaaaaaaacacaaaaaaaaaaaatgcaaaaaaaaaaaatcgaaaaaaaaaaaatctaaaaaaaaaaaacgaaaaaaaaaaaacccaaaaaaaaaaaagacaaaaaaaaaaaatagaaaaaaaaaaaagttaaaaaaaaaaaactgaaaaaaaaaaaatttaaaaaaaaaaaatctag

SEQ ID NO: 1498 - protein, 671 aa, synthetic construct
  REGION 1..671: note = Synthetic
MDYKDDDDKDYKDDDDKDYKDDDDKAAAMSVELTPPRSDGSVGFAPVVVPPAPRKPLRRRAVSDLEKLYKVKRRLVFGADDGAVDNDTSNNNSGSSSTTSRSRRKTAADVVSDSPKRTDDSSTAGEDGYTHCVHSCACTPGERHLLCCELVSIGDSVSVARCPLCSLGISTTYLSRGCCRGRSKVTGGDEDEEDEDEEENSQDEDRDEEEAASASSSGGLEWSDDSNSALSWSDENIIISPFPGLKCYVTTFEDIRQPVLLETGSAYLPVYVPYDESFCRNRCLERGGDDDDERDATLIGKGSFGQVWRLSDKKTALKAAASESINETLLTVWISGVVRSRAQDAGYRGELDDSVYCNILVATGSCLRHNLVSFASFDRDLYNYRGWHYAGLASYRRAFSGIADALRFLNLRCGVGHFDVTPMNVLINYDRADDRQIARAVICDFSLSQCHTEGTTGHCVVVFQQTKTVRALPKSAYYLTDIYHPAFKPLMLQKLCAIEPRKQFPKPSANRFCVSDLCALGHVAAFCLVRVLDERGQLKVRSTSEDALFGVARKTCDALARHSVDEVANFCSLLITRQLAYTATLLGSDDMREPMARLCDYFETVSDKDAPDRFRSVYKRARREIDGSYMVRLLLAASETEDGRYLLDNIRATCLMVDSEDLDVDPYKIFP

SEQ ID NO: 1499 - DNA, 1932 bp, synthetic construct
  misc_feature 1..1932: note = Synthetic
  source 1..1932: mol_type = other DNA
atgtccgtggagctgacccccccccggtccgacggctccgtgggcttcgcccccgtggtggtgccccccgccccccggaagcccctgcggcggcgggccgtgtccgacctggagaagctgtacaaggtgaagcggcggctggtgttcggcgccgacgacggcgccgtggacaacgacacctccaacaacaactccggctcctcctccaccacctcccggtcccggcggaagaccgccgccgacgtggtgtccgactcccccaagcggaccgacgactcctccaccgccggcgaggacggctacacccactgcgtgcactcctgcgcctgcacccccggcgagcggcacctgctgtgctgcgagctggtgtccatcggcgactccgtgtccgtggcccggtgccccctgtgctccctgggcatctccaccacctacctgtcccggggctgctgccggggccggtccaaggtgaccggcggcgacgaggacgaggaggacgaggacgaggaggagaactcccaggacgaggaccgggacgaggaggaggccgcctccgcctcctcctccggcggcctggagtggtccgacgactccaactccgccctgtcctggtccgacgagaacatcatcatctcccccttccccggcctgaagtgctacgtgaccaccttcgaggacatccggcagcccgtgctgctggagaccggctccgcctacctgcccgtgtacgtgccctacgacgagtccttctgccggaaccggtgcctggagcggggcggcgacgacgacgacgagcgggacgccaccctgatcggcaagggctccttcggccaggtgtggcggctgtccgacaagaagaccgccctgaaggccgccgcctccgagtccatcaacgagaccctgctgaccgtgtggatctccggcgtggtgcggtcccgggcccaggacgccggctaccggggcgagctggacgactccgtgtactgcaacatcctggtggccaccggctcctgcctgcggcacaacctggtgtccttcgcctccttcgaccgggacctgtacaactaccggggctggcactacgccggcctggcctcctaccggcgggccttctccggcatcgccgacgccctgcggttcctgaacctgcggtgcggcgtgggccacttcgacgtgacccccatgaacgtgctgatcaactacgaccgggccgacgaccggcagatcgcccgggccgtgatctgcgacttctccctgtcccagtgccacaccgagggcaccaccggccactgcgtggtggtgttccagcagaccaagaccgtgcgggccctgcccaagtccgcctactacctgaccgacatctaccaccccgccttcaagcccctgatgctgcagaagctgtgcgccatcgagccccggaagcagttccccaagccctccgccaaccggttctgcgtgtccgacctgtgcgccctgggccacgtggccgccttctgcctggtgcgggtgctggacgagcggggccagctgaaggtgcggtccacctccgaggacgccctgttcggcgtggcccggaagacctgcgacgccctggcccggcactccgtggacgaggtggccaacttctgctccctgctgatcacccggcagctggcctacaccgccaccctgctgggctccgacgacatgcgggagcccatggcccggctgtgcgactacttcgagaccgtgtccgacaaggacgcccccgaccggttccggtccgtgtacaagcgggcccggcgggagatcgacggctcctacatggtgcggctgctgctggccgcctccgagaccgaggacggccggtacctgctggacaacatccgggccacctgcctgatggtggactccgaggacctggacgtggacccctacaagatcttcccctag

SEQ ID NO: 1500 - protein, 643 aa, synthetic construct
  REGION 1..643: note = Synthetic
MSVELTPPRSDGSVGFAPVVVPPAPRKPLRRRAVSDLEKLYKVKRRLVFGADDGAVDNDTSNNNSGSSSTTSRSRRKTAADVVSDSPKRTDDSSTAGEDGYTHCVHSCACTPGERHLLCCELVSIGDSVSVARCPLCSLGISTTYLSRGCCRGRSKVTGGDEDEEDEDEEENSQDEDRDEEEAASASSSGGLEWSDDSNSALSWSDENIIISPFPGLKCYVTTFEDIRQPVLLETGSAYLPVYVPYDESFCRNRCLERGGDDDDERDATLIGKGSFGQVWRLSDKKTALKAAASESINETLLTVWISGVVRSRAQDAGYRGELDDSVYCNILVATGSCLRHNLVSFASFDRDLYNYRGWHYAGLASYRRAFSGIADALRFLNLRCGVGHFDVTPMNVLINYDRADDRQIARAVICDFSLSQCHTEGTTGHCVVVFQQTKTVRALPKSAYYLTDIYHPAFKPLMLQKLCAIEPRKQFPKPSANRFCVSDLCALGHVAAFCLVRVLDERGQLKVRSTSEDALFGVARKTCDALARHSVDEVANFCSLLITRQLAYTATLLGSDDMREPMARLCDYFETVSDKDAPDRFRSVYKRARREIDGSYMVRLLLAASETEDGRYLLDNIRATCLMVDSEDLDVDPYKIFP

SEQ ID NO: 1501 - RNA, 983 nt, synthetic construct
  misc_feature 1..983: note = Synthetic
  source 1..983: mol_type = other RNA
gggaagctcagaataaacgctcaactttggccggatctgccaccatggactacaaggacgacgacgacaaggactacaaggacgacgacgacaaggactacaaggacgacgacgacaaggccgccgccatgaccgacccccgggagaccgtgccccccggcaactccggcgaggagaccatcggcgaggccttcgcctggctgaaccggaccgtggaggccatcaaccgggaggccgtgaaccacctgccccgggagctgatcttccaggtgtggcagcggtcctggcggtactggcacgacgagcagggcatgtccgagtcctacaccaagtaccggtacctgtgcatcatccagaaggccgtgtacatgcacgtgcggaagggctgcacctgcctgggccggggccacggccccggcggctggcggcccggccccccccctccccccccacccggcctggtgtagctagcaccagcctcaagaacacccgaatggagtctctaagctacataataccaacttacactttacaaaatgttgtcccccaaaatgtagccattcgtatctgctcctaataaaaagaaagtttcttcacattctctcgagaaaaaaaaaaaatggaaaaaaaaaaaacggaaaaaaaaaaaaggtaaaaaaaaaaaatataaaaaaaaaaaacataaaaaaaaaaaacgaaaaaaaaaaaacgtaaaaaaaaaaaactcaaaaaaaaaaaagataaaaaaaaaaaacctaaaaaaaaaaaatgtaaaaaaaaaaaagggaaaaaaaaaaaacgcaaaaaaaaaaaacacaaaaaaaaaaaatgcaaaaaaaaaaaatcgaaaaaaaaaaaatctaaaaaaaaaaaacgaaaaaaaaaaaacccaaaaaaaaaaaagacaaaaaaaaaaaatagaaaaaaaaaaaagttaaaaaaaaaaaactgaaaaaaaaaaaatttaaaaaaaaaaaatctag

SEQ ID NO: 1502 - RNA, 423 nt, synthetic construct
  misc_feature 1..423: note = Synthetic
  source 1..423: mol_type = other RNA
atggactacaaggacgacgacgacaaggactacaaggacgacgacgacaaggactacaaggacgacgacgacaaggccgccgccatgaccgacccccgggagaccgtgccccccggcaactccggcgaggagaccatcggcgaggccttcgcctggctgaaccggaccgtggaggccatcaaccgggaggccgtgaaccacctgccccgggagctgatcttccaggtgtggcagcggtcctggcggtactggcacgacgagcagggcatgtccgagtcctacaccaagtaccggtacctgtgcatcatccagaaggccgtgtacatgcacgtgcggaagggctgcacctgcctgggccggggccacggccccggcggctggcggcccggccccccccctccccccccacccggcctggtgtag

SEQ ID NO: 1503 - protein, 140 aa, synthetic construct
  REGION 1..140: note = Synthetic
MDYKDDDDKDYKDDDDKDYKDDDDKAAAMTDPRETVPPGNSGEETIGEAFAWLNRTVEAINREAVNHLPRELIFQVWQRSWRYWHDEQGMSESYTKYRYLCIIQKAVYMHVRKGCTCLGRGHGPGGWRPGPPPPPPPGLV

SEQ ID NO: 1504 - protein, 112 aa, synthetic construct
  REGION 1..112: note = Synthetic
MTDPRETVPPGNSGEETIGEAFAWLNRTVEAINREAVNHLPRELIFQVWQRSWRYWHDEQGMSESYTKYRYLCIIQKAVYMHVRKGCTCLGRGHGPGGWRPGPPPPPPPGLV

SEQ ID NO: 1505 - protein, 140 aa, synthetic construct
  REGION 1..140: note = Synthetic
MDYKDDDDKDYKDDDDKDYKDDDDKAAAMSDPRERIPPGNSGEETIEEAFEWLNRTVEGINRAAVNHLPRELIFQVWQRSWEYWHDEMGMSESYTKYRYLCLIQKALFMHCKKGCRCLGEGHGAGGWRTGPPPPPPPGLA

SEQ ID NO: 1506 - RNA, 1823 nt, synthetic construct
  misc_feature 1..1823: note = Synthetic
  source 1..1823: mol_type = other RNA
gggaagctcagaataaacgctcaactttggccggatctgccaccatgggcatccagggcctggccaagctgatcgccgacgtggccccctccgccatccgggagaacgacatcaagtcctacttcggccggaaggtggccatcgacgcctccatgtccatctaccagttcctgatcgccgtgcggcagggcggcgacgtgctgcagaacgaggagggcgagaccacctcccacctgatgggcatgttctaccggaccatccggatgatggagaacggcatcaagcccgtgtacgtgttcgacggcaagcccccccagctgaagtccggcgagctggccaagcggtccgagcggcgggccgaggccgagaagcagctgcagcaggcccaggccgccggcgccgagcaggaggtggagaagttcaccaagcggctggtgaaggtgaccaagcagcacaacgacgagtgcaagcacctgctgtccctgatgggcatcccctacctggacgccccctccgaggccgaggcctcctgcgccgccctggtgaaggccggcaaggtgtacgccgccgccaccgaggacatggactgcctgaccttcggctcccccgtgctgatgcggcacctgaccgcctccgaggccaagaagctgcccatccaggagttccacctgtcccggatcctgcaggagctgggcctgaaccaggagcagttcgtggacctgtgcatcctgctgggctccgactactgcgagtccatccggggcatcggccccaagcgggccgtggacctgatccagaagcacaagtccatcgaggagatcgtgcggcggctggaccccaacaagtaccccgtgcccgagaactggctgcacaaggaggcccaccagctgttcctggagcccgaggtgctggaccccgagtccgtggagctgaagtggtccgagcccaacgaggaggagctgatcaagttcatgtgcggcgagaagcagttctccgaggagcggatccggtccggcgtgaagcggctgtccaagtcccggcagggctccacccagggccggctggacgacttcttcaaggtgaccggctccctgtcctccgccaagcggaaggagcccgagcccaagggctccaccaagaagaaggccaagaccggcgccgccggcaagttcaagcggggcaagtccggcggctccaagcggaccgccgacggctccgagttcgagcccaagaagaagcggaaggtgtccgagtccgccacccccgagtccgtgtccggctggcggctgttcaagaagatctcctagctagcaccagcctcaagaacacccgaatggagtctctaagctacataataccaacttacactttacaaaatgttgtcccccaaaatgtagccattcgtatctgctcctaataaaaagaaagtttcttcacattctctcgagaaaaaaaaaaaatggaaaaaaaaaaaacggaaaaaaaaaaaaggtaaaaaaaaaaaatataaaaaaaaaaaacataaaaaaaaaaaacgaaaaaaaaaaaacgtaaaaaaaaaaaactcaaaaaaaaaaaagataaaaaaaaaaaacctaaaaaaaaaaaatgtaaaaaaaaaaaagggaaaaaaaaaaaacgcaaaaaaaaaaaacacaaaaaaaaaaaatgcaaaaaaaaaaaatcgaaaaaaaaaaaatctaaaaaaaaaaaacgaaaaaaaaaaaacccaaaaaaaaaaaagacaaaaaaaaaaaatagaaaaaaaaaaaagttaaaaaaaaaaaactgaaaaaaaaaaaatttaaaaaaaaaaaatctag

SEQ ID NO: 1507 - RNA, 1263 nt, synthetic construct
  misc_feature 1..1263: note = Synthetic
  source 1..1263: mol_type = other RNA
atgggcatccagggcctggccaagctgatcgccgacgtggccccctccgccatccgggagaacgacatcaagtcctacttcggccggaaggtggccatcgacgcctccatgtccatctaccagttcctgatcgccgtgcggcagggcggcgacgtgctgcagaacgaggagggcgagaccacctcccacctgatgggcatgttctaccggaccatccggatgatggagaacggcatcaagcccgtgtacgtgttcgacggcaagcccccccagctgaagtccggcgagctggccaagcggtccgagcggcgggccgaggccgagaagcagctgcagcaggcccaggccgccggcgccgagcaggaggtggagaagttcaccaagcggctggtgaaggtgaccaagcagcacaacgacgagtgcaagcacctgctgtccctgatgggcatcccctacctggacgccccctccgaggccgaggcctcctgcgccgccctggtgaaggccggcaaggtgtacgccgccgccaccgaggacatggactgcctgaccttcggctcccccgtgctgatgcggcacctgaccgcctccgaggccaagaagctgcccatccaggagttccacctgtcccggatcctgcaggagctgggcctgaaccaggagcagttcgtggacctgtgcatcctgctgggctccgactactgcgagtccatccggggcatcggccccaagcgggccgtggacctgatccagaagcacaagtccatcgaggagatcgtgcggcggctggaccccaacaagtaccccgtgcccgagaactggctgcacaaggaggcccaccagctgttcctggagcccgaggtgctggaccccgagtccgtggagctgaagtggtccgagcccaacgaggaggagctgatcaagttcatgtgcggcgagaagcagttctccgaggagcggatccggtccggcgtgaagcggctgtccaagtcccggcagggctccacccagggccggctggacgacttcttcaaggtgaccggctccctgtcctccgccaagcggaaggagcccgagcccaagggctccaccaagaagaaggccaagaccggcgccgccggcaagttcaagcggggcaagtccggcggctccaagcggaccgccgacggctccgagttcgagcccaagaagaagcggaaggtgtccgagtccgccacccccgagtccgtgtccggctggcggctgttcaagaagatctcctag

SEQ ID NO: 1508 - protein, 420 aa, synthetic construct
  REGION 1..420: note = Synthetic
MGIQGLAKLIADVAPSAIRENDIKSYFGRKVAIDASMSIYQFLIAVRQGGDVLQNEEGETTSHLMGMFYRTIRMMENGIKPVYVFDGKPPQLKSGELAKRSERRAEAEKQLQQAQAAGAEQEVEKFTKRLVKVTKQHNDECKHLLSLMGIPYLDAPSEAEASCAALVKAGKVYAAATEDMDCLTFGSPVLMRHLTASEAKKLPIQEFHLSRILQELGLNQEQFVDLCILLGSDYCESIRGIGPKRAVDLIQKHKSIEEIVRRLDPNKYPVPENWLHKEAHQLFLEPEVLDPESVELKWSEPNEEELIKFMCGEKQFSEERIRSGVKRLSKSRQGSTQGRLDDFFKVTGSLSSAKRKEPEPKGSTKKKAKTGAAGKFKRGKSGGSKRTADGSEFEPKKKRKVSESATPESVSGWRLFKKIS

SEQ ID NO: 1509 - RNA, 1203 nt, synthetic construct
  misc_feature 1..1203: note = Synthetic
  source 1..1203: mol_type = other RNA
atgggcatccagggcctggccaagctgatcgccgacgtggccccctccgccatccgggagaacgacatcaagtcctacttcggccggaaggtggccatcgacgcctccatgtccatctaccagttcctgatcgccgtgcggcagggcggcgacgtgctgcagaacgaggagggcgagaccacctcccacctgatgggcatgttctaccggaccatccggatgatggagaacggcatcaagcccgtgtacgtgttcgacggcaagcccccccagctgaagtccggcgagctggccaagcggtccgagcggcgggccgaggccgagaagcagctgcagcaggcccaggccgccggcgccgagcaggaggtggagaagttcaccaagcggctggtgaaggtgaccaagcagcacaacgacgagtgcaagcacctgctgtccctgatgggcatcccctacctggacgccccctccgaggccgaggcctcctgcgccgccctggtgaaggccggcaaggtgtacgccgccgccaccgaggacatggactgcctgaccttcggctcccccgtgctgatgcggcacctgaccgcctccgaggccaagaagctgcccatccaggagttccacctgtcccggatcctgcaggagctgggcctgaaccaggagcagttcgtggacctgtgcatcctgctgggctccgactactgcgagtccatccggggcatcggccccaagcgggccgtggacctgatccagaagcacaagtccatcgaggagatcgtgcggcggctggaccccaacaagtaccccgtgcccgagaactggctgcacaaggaggcccaccagctgttcctggagcccgaggtgctggaccccgagtccgtggagctgaagtggtccgagcccaacgaggaggagctgatcaagttcatgtgcggcgagaagcagttctccgaggagcggatccggtccggcgtgaagcggctgtccaagtcccggcagggctccacccagggccggctggacgacttcttcaaggtgaccggctccctgtcctccgccaagcggaaggagcccgagcccaagggctccaccaagaagaaggccaagaccggcgccgccggcaagttcaagcggggcaagtccggcggctccaagcggaccgccgacggctccgagttcgagcccaagaagaagcggaaggtg

SEQ ID NO: 1510 - protein, 401 aa, synthetic construct
  REGION 1..401: note = Synthetic
MGIQGLAKLIADVAPSAIRENDIKSYFGRKVAIDASMSIYQFLIAVRQGGDVLQNEEGETTSHLMGMFYRTIRMMENGIKPVYVFDGKPPQLKSGELAKRSERRAEAEKQLQQAQAAGAEQEVEKFTKRLVKVTKQHNDECKHLLSLMGIPYLDAPSEAEASCAALVKAGKVYAAATEDMDCLTFGSPVLMRHLTASEAKKLPIQEFHLSRILQELGLNQEQFVDLCILLGSDYCESIRGIGPKRAVDLIQKHKSIEEIVRRLDPNKYPVPENWLHKEAHQLFLEPEVLDPESVELKWSEPNEEELIKFMCGEKQFSEERIRSGVKRLSKSRQGSTQGRLDDFFKVTGSLSSAKRKEPEPKGSTKKKAKTGAAGKFKRGKSGGSKRTADGSEFEPKKKRKV

SEQ ID NO: 1511 - protein, 380 aa, synthetic construct; identical to SEQ ID NO: 1467
  REGION 1..380: note = Synthetic

SEQ ID NO: 1512 - protein, 380 aa, synthetic construct
  REGION 1..380: note = Synthetic
MGIQGLAKLIADVAPSAIRENDIKSYFGRKVAIDASMSIYQFLIAVRQGGDVLQNEEGETTSHLMGMFYRTIRMMENGIKPVYVFDGKPPQLKSGELAKRSERRAEAEKQLQQAQAAGAEQEVEKFTKRLVKVTKQHNDECKHLLSLMGIPYLDAPSEAEASCAALVKAGKVYAAATEDMACLTFGSPVLMRHLTASEAKKLPIQEFHLSRILQELGLNQEQFVDLCILLGSDYCESIRGIGPKRAVDLIQKHKSIEEIVRRLDPNKYPVPENWLHKEAHQLFLEPEVLDPESVELKWSEPNEEELIKFMCGEKQFSEERIRSGVKRLSKSRQGSTQGRLDDFFKVTGSLSSAKRKEPEPKGSTKKKAKTGAAGKFKRGK

SEQ ID NO: 1513 - protein, 380 aa, synthetic construct
  REGION 1..380: note = Synthetic
MGIHGLAKLIADVAPSAIRENDIKSYFGRKVAIDASMSIYQFLIAVRQGGDVLQNEEGETTSHLMGMFYRTIRMMENGIKPVYVFDGKPPQLKSGELAKRSERRAEAEKQLQQAQEAGMEEEVEKFTKRLVKVTKQHNDECKHLLSLMGIPYLDAPSEAEASCAALAKAGKVYAAATEDMDCLTFGSPVLMRHLTASEAKKLPIQEFHLSRVLQELGLNQEQFVDLCILLGSDYCESIRGIGPKRAVDLIQKHKSIEEIVRRLDPSKYPVPENWLHKEAQQLFLEPEVLDPESVELKWSEPNEEELVKFMCGEKQFSEERIRSGVKRLSKSRQGSTQGRLDDFFKVTGSLSSAKRKEPEPKGPAKKKAKTGGAGKFRRGK

SEQ ID NO: 1514 - protein, 401 aa, synthetic construct
  REGION 1..401: note = Synthetic
MGIQGLAKLIADVAPSAIRENDIKSYFGRKVAIDASMSIYQFLIAVRQGGDVLQNEEGETTSHLMGMFYRTIRMMENGIKPVYVFDGKPPQLKSGELAKRSERRAEAEKQLQQAQAAGAEQEVEKFTKRLVKVTKQHNDECKHLLSLMGIPYLDAPSEAEASCAALVKAGKVYAAATEDMDCLTFGSPVLMRHLTASEAKKLPIQEFHLSRILQELGLNQEQFVDLCILLGSDYCESIRGIGPKRAVDLIQKHKSIEEIVRRLDPSKYPVPENWLHKEAHQLFLKPEVLDPESVELKWSEPNEEELVKFMCGEKQFSEERIRSGVKRLSKSRQGSTQGRLDDFFKVTGSLSSAKRKEPEPKGSTKKKAKTGAAGKFKRGKSGGSKRTADGSEFEPKKKRKV

SEQ ID NO: 1515 - protein, 380 aa, synthetic construct
  REGION 1..380: note = Synthetic
MGIKGLAQVLSEHAPASVKHNDIKNYFGRKVAIDASMSLYQFLIQVRSQDGQQLMNEQGETTSHLMGMFYRTLRIVDNGIKPCFVFDGKPPTLKSGELAKRVARHQKAREDQEETKEVGTAEMVDRFAKRTVKVTRQHNDEAKRLLELMGIPFVNAPCEAEAQCAALARSGKVYAAASEDMDTLCFQAPVLLRHLTFSEQRKEPISEYNIEKALNGLDMSVEQFVDLCILLGCDYCEPIRGVGPARAVELIRQYGTLDRFVKEADRSKYPIPEDWPYEDARRLFLDAEVLPGEEIELKWKSPDADGIIQFLVKEKGFNEDRVKLGINRLEKASKTIPQGRLDSFFKPVPSSPKKPVDTKSKGSAKRKRDSNKGGESKKKR

SEQ ID NO: 1516 - protein, 401 aa, synthetic construct; identical to SEQ ID NO: 1485
  REGION 1..401: note = Synthetic

SEQ ID NO: 1517 - protein, 236 aa, synthetic construct
  REGION 1..236: note = Synthetic
MDVNMAAELSPTNSSSSGELSVSPEPPRETQAFLGKVTVIDYFTFQHKHLKVTNIDDMTETLYVKLPENMTRCDHLPITCEYLLGRGSYGAVYAHADNATVKLYDSVTELYHELMVCDMIQIGKATAEDGQDKALVDYLSACTSCHALFMPQFRCSLQDYGHWHDGSIEPLVRGFQGLKDAVYFLNRHCGLFHSDISPSNILVDFTDTMWGMGRLVLTDYGTASLHDRNKMLDVRL

SEQ ID NO: 1518 - protein, 429 aa, synthetic construct
  REGION 1..429: note = Synthetic
MDVNMAAELSPTNSSSSGELSVSPEPPRETQAFLGKVTVIDYFTFQHKHLKVTNIDDMTETLYVKLPENMTRCDHLPITCEYLLGRGSYGAVYAHADNATVKLYDSVTELYHELMVCDMIQIGKATAEDGQDKALVDYLSACTSCHALFMPQFRCSLQDYGHWHDGSIEPLVRGFQGLKDAVYFLNRHCGLFHSDISPSNILVDFTDTMWGMGRLVLTDYGTASLHDRNKMLDVRLKSSKGRQLYRLYCQREPFSIAKDTYKPLCLLSKCYILRGAGHIPDPSACGPVGAQTALRLDLQSLGYSLLYGIMRLADSTHKIPYPNPDMGFDRSDPLYFLQFAAPKVVLLEVLSQMWNLNLDMGLTSCGESPCVDVTAEHMSQFLQWCRSLKKRFKESYFFNCRPRFEHPHLPGLVAELLADDFFGPDGRRG

SEQ ID NO: 1519 - RNA, 390 nt, synthetic construct
  misc_feature 1..390: note = Synthetic
  source 1..390: mol_type = other RNA
atggcctccaacttcacccagttcgtgctggtggacaacggcggcaccggcgacgtgaccgtggccccctccaacttcgccaacggcgtggccgagtggatctcctccaactcccggtcccaggcctacaaggtgacctgctccgtgcggcagtcctccgcccagaaccggaagtacaccatcaaggtggaggtgcccaaggtggccacccagaccgtgggcggcgtggagctgcccgtggccgcctggcggtcctacctgaacatggagctgaccatccccatcttcgccaccaactccgactgcgagctgatcgtgaaggccatgcagggcctgctgaaggacggcaaccccatcccctccgccatcgccgccaactccggcatctac

SEQ ID NO: 1520 - protein, 130 aa, synthetic construct
  REGION 1..130: note = Synthetic
MASNFTQFVLVDNGGTGDVTVAPSNFANGVAEWISSNSRSQAYKVTCSVRQSSAQNRKYTIKVEVPKVATQTVGGVELPVAAWRSYLNMELTIPIFATNSDCELIVKAMQGLLKDGNPIPSAIAANSGIY

SEQ ID NO: 1521 - RNA, 423 nt, synthetic construct
  misc_feature 1..423: note = Synthetic
  source 1..423: mol_type = other RNA
atggactacaaggacgacgacgacaaggactacaaggacgacgacgacaaggactacaaggacgacgacgacaaggccgccgccatgtccgacccccgggagcggatcccccccggcaactccggcgaggagaccatcgaggaggccttcgagtggctgaaccggaccgtggagggcatcaaccgggccgccgtgaaccacctgccccgggagctgatcttccaggtgtggcagcggtcctgggagtactggcacgacgagatgggcatgtccgagtcctacaccaagtaccggtacctgtgcctgatccagaaggccctgttcatgcactgcaagaagggctgccggtgcctgggcgagggccacggcgccggcggctggcggaccggccccccccctccccccccacccggcctggcctag

SEQ ID NO: 1522 - RNA, 714 nt, synthetic construct
  misc_feature 1..714: note = Synthetic
  source 1..714: mol_type = other RNA
atggacgtgaacatggccgccgagctgtcccccaccaactcctcctcctccggcgagctgtccgtgtcccccgagcccccccgggagacccaggccttcctgggcaaggtgaccgtgatcgactacttcaccttccagcacaagcacctgaaggtgaccaacatcgacgacatgaccgagaccctgtacgtgaagctgcccgagaacatgacccggtgcgaccacctgcccatcacctgcgagtacctgctgggccggggctcctacggcgccgtgtacgcccacgccgacaacgccaccgtgaagctgtacgactccgtgaccgagctgtaccacgagctgatggtgtgcgacatgatccagatcggcaaggccaccgccgaggacggccaggacaaggccctggtggactacctgtccgcctgcacctcctgccacgccctgttcatgccccagttccggtgctccctgcaggactacggccactggcacgacggctccatcgagcccctggtgcggggcttccagggcctgaaggacgccgtgtacttcctgaaccggcactgcggcctgttccactccgacatctccccctccaacatcctggtggacttcaccgacaccatgtggggcatgggccggctggtgctgaccgactacggcaccgcctccctgcacgaccggaacaagatgctggacgtgcggctgtgataa

SEQ ID NO: 1523 - RNA, 1293 nt, synthetic construct
  misc_feature 1..1293: note = Synthetic
  source 1..1293: mol_type = other RNA
atggacgtgaacatggccgccgagctgtcccccaccaactcctcctcctccggcgagctgtccgtgtcccccgagcccccccgggagacccaggccttcctgggcaaggtgaccgtgatcgactacttcaccttccagcacaagcacctgaaggtgaccaacatcgacgacatgaccgagaccctgtacgtgaagctgcccgagaacatgacccggtgcgaccacctgcccatcacctgcgagtacctgctgggccggggctcctacggcgccgtgtacgcccacgccgacaacgccaccgtgaagctgtacgactccgtgaccgagctgtaccacgagctgatggtgtgcgacatgatccagatcggcaaggccaccgccgaggacggccaggacaaggccctggtggactacctgtccgcctgcacctcctgccacgccctgttcatgccccagttccggtgctccctgcaggactacggccactggcacgacggctccatcgagcccctggtgcggggcttccagggcctgaaggacgccgtgtacttcctgaaccggcactgcggcctgttccactccgacatctccccctccaacatcctggtggacttcaccgacaccatgtggggcatgggccggctggtgctgaccgactacggcaccgcctccctgcacgaccggaacaagatgctggacgtgcggctgaagtcctccaagggccggcagctgtaccggctgtactgccagcgggagcccttctccatcgccaaggacacctacaagcccctgtgcctgctgtccaagtgctacatcctgcggggcgccggccacatccccgacccctccgcctgcggccccgtgggcgcccagaccgccctgcggctggacctgcagtccctgggctactccctgctgtacggcatcatgcggctggccgactccacccacaagatcccctaccccaaccccgacatgggcttcgaccggtccgaccccctgtacttcctgcagttcgccgcccccaaggtggtgctgctggaggtgctgtcccagatgtggaacctgaacctggacatgggcctgacctcctgcggcgagtccccctgcgtggacgtgaccgccgagcacatgtcccagttcctgcagtggtgccggtccctgaagaagcggttcaaggagtcctacttcttcaactgccggccccggttcgagcacccccacctgcccggcctggtggccgagctgctggccgacgacttcttcggccccgacggccggcggggctgataa

SEQ ID NO: 1524 - RNA, 1143 nt, synthetic construct
  misc_feature 1..1143: note = Synthetic
  source 1..1143: mol_type = other RNA
atgggcatccagggcctggccaagctgatcgccgacgtggccccctccgccatccgggagaacgacatcaagtcctacttcggccggaaggtggccatcgacgcctccatgtccatctaccagttcctgatcgccgtgcggcagggcggcgacgtgctgcagaacgaggagggcgagaccacctcccacctgatgggcatgttctaccggaccatccggatgatggagaacggcatcaagcccgtgtacgtgttcgacggcaagcccccccagctgaagtccggcgagctggccaagcggtccgagcggcgggccgaggccgagaagcagctgcagcaggcccaggccgccggcgccgagcaggaggtggagaagttcaccaagcggctggtgaaggtgaccaagcagcacaacgacgagtgcaagcacctgctgtccctgatgggcatcccctacctggacgccccctccgaggccgaggcctcctgcgccgccctggtgaaggccggcaaggtgtacgccgccgccaccgaggacatggactgcctgaccttcggctcccccgtgctgatgcggcacctgaccgcctccgaggccaagaagctgcccatccaggagttccacctgtcccggatcctgcaggagctgggcctgaaccaggagcagttcgtggacctgtgcatcctgctgggctccgactactgcgagtccatccggggcatcggccccaagcgggccgtggacctgatccagaagcacaagtccatcgaggagatcgtgcggcggctggaccccaacaagtaccccgtgcccgagaactggctgcacaaggaggcccaccagctgttcctggagcccgaggtgctggaccccgagtccgtggagctgaagtggtccgagcccaacgaggaggagctgatcaagttcatgtgcggcgagaagcagttctccgaggagcggatccggtccggcgtgaagcggctgtccaagtcccggcagggctccacccagggccggctggacgacttcttcaaggtgaccggctccctgtcctccgccaagcggaaggagcccgagcccaagggctccaccaagaagaaggccaagaccggcgccgccggcaagttcaagcggggcaagtag

SEQ ID NO: 1525 - RNA, 1206 nt, synthetic construct
  misc_feature 1..1206: note = Synthetic
  source 1..1206: mol_type = other RNA
atgggcatccagggcctggccaagctgatcgccgacgtggccccctccgccatccgggagaacgacatcaagtcctacttcggccggaaggtggccatcgacgcctccatgtccatctaccagttcctgatcgccgtgcggcagggcggcgacgtgctgcagaacgaggagggcgagaccacctcccacctgatgggcatgttctaccggaccatccggatgatggagaacggcatcaagcccgtgtacgtgttcgacggcaagcccccccagctgaagtccggcgagctggccaagcggtccgagcggcgggccgaggccgagaagcagctgcagcaggcccaggccgccggcgccgagcaggaggtggagaagttcaccaagcggctggtgaaggtgaccaagcagcacaacgacgagtgcaagcacctgctgtccctgatgggcatcccctacctggacgccccctccgaggccgaggcctcctgcgccgccctggtgaaggccggcaaggtgtacgccgccgccaccgaggacatggcctgcctgaccttcggctcccccgtgctgatgcggcacctgaccgcctccgaggccaagaagctgcccatccaggagttccacctgtcccggatcctgcaggagctgggcctgaaccaggagcagttcgtggacctgtgcatcctgctgggctccgactactgcgagtccatccggggcatcggccccaagcgggccgtggacctgatccagaagcacaagtccatcgaggagatcgtgcggcggctggaccccaacaagtaccccgtgcccgagaactggctgcacaaggaggcccaccagctgttcctggagcccgaggtgctggaccccgagtccgtggagctgaagtggtccgagcccaacgaggaggagctgatcaagttcatgtgcggcgagaagcagttctccgaggagcggatccggtccggcgtgaagcggctgtccaagtcccggcagggctccacccagggccggctggacgacttcttcaaggtgaccggctccctgtcctccgccaagcggaaggagcccgagcccaagggctccaccaagaagaaggccaagaccggcgccgccggcaagttcaagcggggcaagtccggcggctccaagcggaccgccgacggctccgagttcgagcccaagaagaagcggaaggtgtag

SEQ ID NO: 1526 - RNA, 1206 nt, synthetic construct
  misc_feature 1..1206: note = Synthetic
  source 1..1206: mol_type = other RNA
atgggcatccacggcctggccaagctgatcgccgacgtggccccctccgccatccgggagaacgacatcaagtcctacttcggccggaaggtggccatcgacgcctccatgtccatctaccagttcctgatcgccgtgcggcagggcggcgacgtgctgcagaacgaggagggcgagaccacctcccacctgatgggcatgttctaccggaccatccggatgatggagaacggcatcaagcccgtgtacgtgttcgacggcaagcccccccagctgaagtccggcgagctggccaagcggtccgagcggcgggccgaggccgagaagcagctgcagcaggcccaggaggccggcatggaggaggaggtggagaagttcaccaagcggctggtgaaggtgaccaagcagcacaacgacgagtgcaagcacctgctgtccctgatgggcatcccctacctggacgccccctccgaggccgaggcctcctgcgccgccctggccaaggccggcaaggtgtacgccgccgccaccgaggacatggactgcctgaccttcggctcccccgtgctgatgcggcacctgaccgcctccgaggccaagaagctgcccatccaggagttccacctgtcccgggtgctgcaggagctgggcctgaaccaggagcagttcgtggacctgtgcatcctgctgggctccgactactgcgagtccatccggggcatcggccccaagcgggccgtggacctgatccagaagcacaagtccatcgaggagatcgtgcggcggctggacccctccaagtaccccgtgcccgagaactggctgcacaaggaggcccagcagctgttcctggagcccgaggtgctggaccccgagtccgtggagctgaagtggtccgagcccaacgaggaggagctggtgaagttcatgtgcggcgagaagcagttctccgaggagcggatccggtccggcgtgaagcggctgtccaagtcccggcagggctccacccagggccggctggacgacttcttcaaggtgaccggctccctgtcctccgccaagcggaaggagcccgagcccaagggccccgccaagaagaaggccaagaccggcggcgccggcaagttccggcggggcaagtccggcggctccaagcggaccgccgacggctccgagttcgagcccaagaagaagcggaaggtgtag

SEQ ID NO: 1527 - RNA, 1206 nt, synthetic construct
  misc_feature 1..1206: note = Synthetic
  source 1..1206: mol_type = other RNA
atgggcatccagggcctggccaagctgatcgccgacgtggccccctccgccatccgggagaacgacatcaagtcctacttcggccggaaggtggccatcgacgcctccatgtccatctaccagttcctgatcgccgtgcggcagggcggcgacgtgctgcagaacgaggagggcgagaccacctcccacctgatgggcatgttctaccggaccatccggatgatggagaacggcatcaagcccgtgtacgtgttcgacggcaagcccccccagctgaagtccggcgagctggccaagcggtccgagcggcgggccgaggccgagaagcagctgcagcaggcccaggccgccggcgccgagcaggaggtggagaagttcaccaagcggctggtgaaggtgaccaagcagcacaacgacgagtgcaagcacctgctgtccctgatgggcatcccctacctggacgccccctccgaggccgaggcctcctgcgccgccctggtgaaggccggcaaggtgtacgccgccgccaccgaggacatggactgcctgaccttcggctcccccgtgctgatgcggcacctgaccgcctccgaggccaagaagctgcccatccaggagttccacctgtcccggatcctgcaggagctgggcctgaaccaggagcagttcgtggacctgtgcatcctgctgggctccgactactgcgagtccatccggggcatcggccccaagcgggccgtggacctgatccagaagcacaagtccatcgaggagatcgtgcggcggctggacccctccaagtaccccgtgcccgagaactggctgcacaaggaggcccaccagctgttcctgaagcccgaggtgctggaccccgagtccgtggagctgaagtggtccgagcccaacgaggaggagctggtgaagttcatgtgcggcgagaagcagttctccgaggagcggatccggtccggcgtgaagcggctgtccaagtcccggcagggctccacccagggccggctggacgacttcttcaaggtgaccggctccctgtcctccgccaagcggaaggagcccgagcccaagggctccaccaagaagaaggccaagaccggcgccgccggcaagttcaagcggggcaagtccggcggctccaagcggaccgccgacggctccgagttcgagcccaagaagaagcggaaggtgtag

SEQ ID NO: 1528 - RNA, 1206 nt, synthetic construct
  misc_feature 1..1206: note = Synthetic
  source 1..1206: mol_type = other RNA
atgggcatcaagggcctggcccaggtgctgtccgagcacgcccccgcctccgtgaagcacaacgacatcaagaactacttcggccggaaggtggccatcgacgcctccatgtccctgtaccagttcctgatccaggtgcggtcccaggacggccagcagctgatgaacgagcagggcgagaccacctcccacctgatgggcatgttctaccggaccctgcggatcgtggacaacggcatcaagccctgcttcgtgttcgacggcaagccccccaccctgaagtccggcgagctggccaagcgggtggcccggcaccagaaggcccgggaggaccaggaggagaccaaggaggtgggcaccgccgagatggtggaccggttcgccaagcggaccgtgaaggtgacccggcagcacaacgacgaggccaagcggctgctggagctgatgggcatccccttcgtgaacgccccctgcgaggccgaggcccagtgcgccgccctggcccggtccggcaaggtgtacgccgccgcctccgaggacatggacaccctgtgcttccaggcccccgtgctgctgcggcacctgaccttctccgagcagcggaaggagcccatctccgagtacaacatcgagaaggccctgaacggcctggacatgtccgtggagcagttcgtggacctgtgcatcctgctgggctgcgactactgcgagcccatccggggcgtgggccccgcccgggccgtggagctgatccggcagtacggcaccctggaccggttcgtgaaggaggccgaccggtccaagtaccccatccccgaggactggccctacgaggacgcccggcggctgttcctggacgccgaggtgctgcccggcgaggagatcgagctgaagtggaagtcccccgacgccgacggcatcatccagttcctggtgaaggagaagggcttcaacgaggaccgggtgaagctgggcatcaaccggctggagaaggcctccaagaccatcccccagggccggctggactccttcttcaagcccgtgccctcctcccccaagaagcccgtggacaccaagtccaagggctccgccaagcggaagcgggactccaacaagggcggcgagtccaagaagaagcggtccggcggctccaagcggaccgccgacggctccgagttcgagcccaagaagaagcggaaggtgtag

SEQ ID NO: 1529 - RNA, 1206 nt, synthetic construct
  misc_feature 1..1206: note = Synthetic
  source 1..1206: mol_type = other RNA
atgggcatccacggcctggccaagctgatcgccgacgtggcccccggcgccatccgggagaacgacatcaagtcctacttcggccggaaggtggccatcgacgcctccatgtccatctaccagttcctgatcgccgtgcggcagggcgccgacatgctgcagaacgaggagggcgagaccacctcccacctgatgggcatgttctaccggaccatccggatggtggagaacggcatcaagcccgtgtacgtgttcgacggcaagcccccccagctgaagtccggcgagctggccaagcggaccgagcggcgggccgaggccgagaagcagctgcaggaggcccaggaggccggcgaggaggacaacgtggagaagttctccaagcggctggtgaaggtgaccaagcagcacaacgacgagtgcaagaagctgctgaccctgatgggcatcccctacgtggaggcccccggcgaggccgaggcctcctgcgccaccctggtgaaggccggcaaggtgtacgccgccgccaccgaggacatggactgcctgaccttcggctcccccgtgctgatgcggcacctgaccgcctccgaggccaagaagctgcccatccaggagttccacctgaaccgggtgctgcaggacctggacctgacctgggagcagttcgtggacctgtgcatcctgctgggctgcgactactgcgagtccatccggggcatcggccccaagcgggccgtggagctgatcaagcagcacaagaccatcgagaagatcgtgcagcacatcgaccccaagaagtaccccctgcccgagaactggctgcacaaggaggcccagcagctgttcctgcagcccgacgtggtggaccccgaggccgtggagctgaagtggtccgagcccgacgaggacggcctggtgctgttcatgtgcggcgagaagcagttcaacgaggagcggatccggaacggcatcaagcggctgtccaagtcccggcagggctccacccagggccggctggacgacttcttcaaggtgaccggctccatcacctccgccaagcggaaggagcccgagcccaagggctccgccaagaagaaggccaagggcaactccgccgccgccgccaagttcaagaagtccggcggctccaagcggaccgccgacggctccgagttcgagcccaagaagaagcggaaggtgtag

SEQ ID NO: 1530 - RNA, 1641 nt, synthetic construct
  misc_feature 1..1641: note = Synthetic
  source 1..1641: mol_type = other RNA
atgggcatccagggcctggccaagctgatcgccgacgtggccccctccgccatccgggagaacgacatcaagtcctacttcggccggaaggtggccatcgacgcctccatgtccatctaccagttcctgatcgccgtgcggcagggcggcgacgtgctgcagaacgaggagggcgagaccacctcccacctgatgggcatgttctaccggaccatccggatgatggagaacggcatcaagcccgtgtacgtgttcgacggcaagcccccccagctgaagtccggcgagctggccaagcggtccgagcggcgggccgaggccgagaagcagctgcagcaggcccaggccgccggcgccgagcaggaggtggagaagttcaccaagcggctggtgaaggtgaccaagcagcacaacgacgagtgcaagcacctgctgtccctgatgggcatcccctacctggacgccccctccgaggccgaggcctcctgcgccgccctggtgaaggccggcaaggtgtacgccgccgccaccgaggacatggactgcctgaccttcggctcccccgtgctgatgcggcacctgaccgcctccgaggccaagaagctgcccatccaggagttccacctgtcccggatcctgcaggagctgggcctgaaccaggagcagttcgtggacctgtgcatcctgctgggctccgactactgcgagtccatccggggcatcggccccaagcgggccgtggacctgatccagaagcacaagtccatcgaggagatcgtgcggcggctggaccccaacaagtaccccgtgcccgagaactggctgcacaaggaggcccaccagctgttcctggagcccgaggtgctggaccccgagtccgtggagctgaagtggtccgagcccaacgaggaggagctgatcaagttcatgtgcggcgagaagcagttctccgaggagcggatccggtccggcgtgaagcggctgtccaagtcccggcagggctccacccagggccggctggacgacttcttcaaggtgaccggctccctgtcctccgccaagcggaaggagcccgagcccaagggctccaccaagaagaaggccaagaccggcgccgccggcaagttcaagcggggcaagggcggcggcggctccggcggcggcggctcccccaagaagaagcggaaggtgggcggcggcggctccggcggcggcggctccgactacaaggacgacgacgacaaggactacaaggacgacgacgacaaggactacaaggacgacgacgacaaggccgccgccatgaccgacccccgggagaccgtgccccccggcaactccggcgaggagaccatcggcgaggccttcgcctggctgaaccggaccgtggaggccatcaaccgggaggccgtgaaccacctgccccgggagctgatcttccaggtgtggcagcggtcctggcggtactggcacgacgagcagggcatgtccgagtcctacaccaagtaccggtacctgtgcatcatccagaaggccgtgtacatgcacgtgcggaagggctgcacctgcctgggccggggccacggccccggcggctggcggcccggccccccccctccccccccacccggcctggtgtag

SEQ ID NO: 1531 - RNA, 1611 nt, synthetic construct
  misc_feature 1..1611: note = Synthetic
  source 1..1611: mol_type = other RNA
atgggcatccagggcctggccaagctgatcgccgacgtggccccctccgccatccgggagaacgacatcaagtcctacttcggccggaaggtggccatcgacgcctccatgtccatctaccagttcctgatcgccgtgcggcagggcggcgacgtgctgcagaacgaggagggcgagaccacctcccacctgatgggcatgttctaccggaccatccggatgatggagaacggcatcaagcccgtgtacgtgttcgacggcaagcccccccagctgaagtccggcgagctggccaagcggtccgagcggcgggccgaggccgagaagcagctgcagcaggcccaggccgccggcgccgagcaggaggtggagaagttcaccaagcggctggtgaaggtgaccaagcagcacaacgacgagtgcaagcacctgctgtccctgatgggcatcccctacctggacgccccctccgaggccgaggcctcctgcgccgccctggtgaaggccggcaaggtgtacgccgccgccaccgaggacatggactgcctgaccttcggctcccccgtgctgatgcggcacctgaccgcctccgaggccaagaagctgcccatccaggagttccacctgtcccggatcctgcaggagctgggcctgaaccaggagcagttcgtggacctgtgcatcctgctgggctccgactactgcgagtccatccggggcatcggccccaagcgggccgtggacctgatccagaagcacaagtccatcgaggagatcgtgcggcggctggaccccaacaagtaccccgtgcccgagaactggctgcacaaggaggcccaccagctgttcctggagcccgaggtgctggaccccgagtccgtggagctgaagtggtccgagcccaacgaggaggagctgatcaagttcatgtgcggcgagaagcagttctccgaggagcggatccggtccggcgtgaagcggctgtccaagtcccggcagggctccacccagggccggctggacgacttcttcaaggtgaccggctccctgtcctccgccaagcggaaggagcccgagcccaagggctccaccaagaagaaggccaagaccggcgccgccggcaagttcaagcggggcaaggactacaaggacgacgacgacaaggactacaaggacgacgacgacaaggactacaaggacgacgacgacaaggccgccgccatgaccgacccccgggagaccgtgccccccggcaactccggcgaggagaccatcggcgaggccttcgcctggctgaaccggaccgtggaggccatcaaccgggaggccgtgaaccacctgccccgggagctgatcttccaggtgtggcagcggtcctggcggtactggcacgacgagcagggcatgtccgagtcctacaccaagtaccggtacctgtgcatcatccagaaggccgtgtacatgcacgtgcggaagggctgcacctgcctgggccggggccacggccccggcggctggcggcccggccccccccctccccccccacccggcctggtgggcggcggcggctccggcggcggcggctcccccaagaagaagcggaaggtgtag

SEQ ID NO: 1532 - RNA, 1641 nt, synthetic construct
  misc_feature 1..1641: note = Synthetic
  source 1..1641: mol_type = other RNA
atgggcatccagggcctggccaagctgatcgccgacgtggccccctccgccatccgggagaacgacatcaagtcctacttcggccggaaggtggccatcgacgcctccatgtccatctaccagttcctgatcgccgtgcggcagggcggcgacgtgctgcagaacgaggagggcgagaccacctcccacctgatgggcatgttctaccggaccatccggatgatggagaacggcatcaagcccgtgtacgtgttcgacggcaagcccccccagctgaagtccggcgagctggccaagcggtccgagcggcgggccgaggccgagaagcagctgcagcaggcccaggccgccggcgccgagcaggaggtggagaagttcaccaagcggctggtgaaggtgaccaagcagcacaacgacgagtgcaagcacctgctgtccctgatgggcatcccctacctggacgccccctccgaggccgaggcctcctgcgccgccctggtgaaggccggcaaggtgtacgccgccgccaccgaggacatggactgcctgaccttcggctcccccgtgctgatgcggcacctgaccgcctccgaggccaagaagctgcccatccaggagttccacctgtcccggatcctgcaggagctgggcctgaaccaggagcagttcgtggacctgtgcatcctgctgggctccgactactgcgagtccatccggggcatcggccccaagcgggccgtggacctgatccagaagcacaagtccatcgaggagatcgtgcggcggctggacccctccaagtaccccgtgcccgagaactggctgcacaaggaggcccaccagctgttcctgaagcccgaggtgctggaccccgagtccgtggagctgaagtggtccgagcccaacgaggaggagctggtgaagttcatgtgcggcgagaagcagttctccgaggagcggatccggtccggcgtgaagcggctgtccaagtcccggcagggctccacccagggccggctggacgacttcttcaaggtgaccggctccctgtcctccgccaagcggaaggagcccgagcccaagggctccaccaagaagaaggccaagaccggcgccgccggcaagttcaagcggggcaagggcggcggcggctccggcggcggcggctcccccaagaagaagcggaaggtgggcggcggcggctccggcggcggcggctccgactacaaggacgacgacgacaaggactacaaggacgacgacgacaaggactacaaggacgacgacgacaaggccgccgccatgaccgacccccgggagaccgtgccccccggcaactccggcgaggagaccatcggcgaggccttcgcctggctgaaccggaccgtggaggccatcaaccgggaggccgtgaaccacctgccccgggagctgatcttccaggtgtggcagcggtcctggcggtactggcacgacgagcagggcatgtccgagtcctacaccaagtaccggtacctgtgcatcatccagaaggccgtgtacatgcacgtgcggaagggctgcacctgcctgggccggggccacggccccggcggctggcggcccggccccccccctccccccccacccggcctggtgtag

SEQ ID NO: 1533 - RNA, 1611 nt, synthetic construct
  misc_feature 1..1611: note = Synthetic
  source 1..1611: mol_type = other RNA
atgggcatccagggcctggccaagctgatcgccgacgtggccccctccgccatccgggagaacgacatcaagtcctacttcggccggaaggtggccatcgacgcctccatgtccatctaccagttcctgatcgccgtgcggcagggcggcgacgtgctgcagaacgaggagggcgagaccacctcccacctgatgggcatgttctaccggaccatccggatgatggagaacggcatcaagcccgtgtacgtgttcgacggcaagcccccccagctgaagtccggcgagctggccaagcggtccgagcggcgggccgaggccgagaagcagctgcagcaggcccaggccgccggcgccgagcaggaggtggagaagttcaccaagcggctggtgaaggtgaccaagcagcacaacgacgagtgcaagcacctgctgtccctgatgggcatcccctacctggacgccccctccgaggccgaggcctcctgcgccgccctggtgaaggccggcaaggtgtacgccgccgccaccgaggacatggactgcctgaccttcggctcccccgtgctgatgcggcacctgaccgcctccgaggccaagaagctgcccatccaggagttccacctgtcccggatcctgcaggagctgggcctgaaccaggagcagttcgtggacctgtgcatcctgctgggctccgactactgcgagtccatccggggcatcggccccaagcgggccgtggacctgatccagaagcacaagtccatcgaggagatcgtgcggcggctggacccctccaagtaccccgtgcccgagaactggctgcacaaggaggcccaccagctgttcctgaagcccgaggtgctggaccccgagtccgtggagctgaagtggtccgagcccaacgaggaggagctggtgaagttcatgtgcggcgagaagcagttctccgaggagcggatccggtccggcgtgaagcggctgtccaagtcccggcagggctccacccagggccggctggacgacttcttcaaggtgaccggctccctgtcctccgccaagcggaaggagcccgagcccaagggctccaccaagaagaaggccaagaccggcgccgccggcaagttcaagcggggcaaggactacaaggacgacgacgacaaggactacaaggacgacgacgacaaggactacaaggacgacgacgacaaggccgccgccatgaccgacccccgggagaccgtgccccccggcaactccggcgaggagaccatcggcgaggccttcgcctggctgaaccggaccgtggaggccatcaaccgggaggccgtgaaccacctgccccgggagctgatcttccaggtgtggcagcggtcctggcggtactggcacgacgagcagggcatgtccgagtcctacaccaagtaccggtacctgtgcatcatccagaaggccgtgtacatgcacgtgcggaagggctgcacctgcctgggccggggccacggccccggcggctggcggcccggccccccccctccccccccacccggcctggtgggcggcggcggctccggcggcggcggctcccccaagaagaagcggaaggtgtag

SEQ ID NO: 1534 - RNA, 1641 nt, synthetic construct
  misc_feature 1..1641: note = Synthetic
  source 1..1641: mol_type = other RNA
atgggcatccacggcctggccaagctgatcgccgacgtggccccctccgccatccgggagaacgacatcaagtcctacttcggccggaaggtggccatcgacgcctccatgtccatctaccagttcctgatcgccgtgcggcagggcggcgacgtgctgcagaacgaggagggcgagaccacctcccacctgatgggcatgttctaccggaccatccggatgatggagaacggcatcaagcccgtgtacgtgttcgacggcaagcccccccagctgaagtccggcgagctggccaagcggtccgagcggcgggccgaggccgagaagcagctgcagcaggcccaggaggccggcatggaggaggaggtggagaagttcaccaagcggctggtgaaggtgaccaagcagcacaacgacgagtgcaagcacctgctgtccctgatgggcatcccctacctggacgccccctccgaggccgaggcctcctgcgccgccctggccaaggccggcaaggtgtacgccgccgccaccgaggacatggactgcctgaccttcggctcccccgtgctgatgcggcacctgaccgcctccgaggccaagaagctgcccatccaggagttccacctgtcccgggtgctgcaggagctgggcctgaaccaggagcagttcgtggacctgtgcatcctgctgggctccgactactgcgagtccatccggggcatcggccccaagcgggccgtggacctgatccagaagcacaagtccatcgaggagatcgtgcggcggctggacccctccaagtaccccgtgcccgagaactggctgcacaaggaggcccagcagctgttcctggagcccgaggtgctggaccccgagtccgtggagctgaagtggtccgagcccaacgaggaggagctggtgaagttcatgtgcggcgagaagcagttctccgaggagcggatccggtccggcgtgaagcggctgtccaagtcccggcagggctccacccagggccggctggacgacttcttcaaggtgaccggctccctgtcctccgccaagcggaaggagcccgagcccaagggccccgccaagaagaaggccaagaccggcggcgccggcaagttccggcggggcaagggcggcggcggctccggcggcggcggctcccccaagaagaagcggaaggtgggcggcggcggctccggcggcggcggctccgactacaaggacgacgacgacaaggactacaaggacgacgacgacaaggactacaaggacgacgacgacaaggccgccgccatgaccgacccccgggagaccgtgccccccggcaactccggcgaggagaccatcggcgaggccttcgcctggctgaaccggaccgtggaggccatcaaccgggaggccgtgaaccacctgccccgggagctgatcttccaggtgtggcagcggtcctggcggtactggcacgacgagcagggcatgtccgagtcctacaccaagtaccggtacctgtgcatcatccagaaggccgtgtacatgcacgtgcggaagggctgcacctgcctgggccggggccacggccccggcggctggcggcccggccccccccctccccccccacccggcctggtgtag

SEQ ID NO: 1535 - RNA, 1611 nt, synthetic construct
  misc_feature 1..1611: note = Synthetic
  source 1..1611: mol_type = other RNA
atgggcatccacggcctggccaagctgatcgccgacgtggccccctccgccatccgggagaacgacatcaagtcctacttcggccggaaggtggccatcgacgcctccatgtccatctaccagttcctgatcgccgtgcggcagggcggcgacgtgctgcagaacgaggagggcgagaccacctcccacctgatgggcatgttctaccggaccatccggatgatggagaacggcatcaagcccgtgtacgtgttcgacggcaagcccccccagctgaagtccggcgagctggccaagcggtccgagcggcgggccgaggccgagaagcagctgcagcaggcccaggaggccggcatggaggaggaggtggagaagttcaccaagcggctggtgaaggtgaccaagcagcacaacgacgagtgcaagcacctgctgtccctgatgggcatcccctacctggacgccccctccgaggccgaggcctcctgcgccgccctggccaaggccggcaaggtgtacgccgccgccaccgaggacatggactgcctgaccttcggctcccccgtgctgatgcggcacctgaccgcctccgaggccaagaagctgcccatccaggagttccacctgtcccgggtgctgcaggagctgggcctgaaccaggagcagttcgtggacctgtgcatcctgctgggctccgactactgcgagtccatccggggcatcggccccaagcgggccgtggacctgatccagaagcacaagtccatcgaggagatcgtgcggcggctggacccctccaagtaccccgtgcccgagaactggctgcacaaggaggcccagcagctgttcctggagcccgaggtgctggaccccgagtccgtggagctgaagtggtccgagcccaacgaggaggagctggtgaagttcatgtgcggcgagaagcagttctccgaggagcggatccggtccggcgtgaagcggctgtccaagtcccggcagggctccacccagggccggctggacgacttcttcaaggtgaccggctccctgtcctccgccaagcggaaggagcccgagcccaagggccccgccaagaagaaggccaagaccggcggcgccggcaagttccggcggggcaaggactacaaggacgacgacgacaaggactacaaggacgacgacgacaaggactacaaggacgacgacgacaaggccgccgccatgaccgacccccgggagaccgtgccccccggcaactccggcgaggagaccatcggcgaggccttcgcctggctgaaccggaccgtggaggccatcaaccgggaggccgtgaaccacctgccccgggagctgatcttccaggtgtggcagcggtcctggcggtactggcacgacgagcagggcatgtccgagtcctacaccaagtaccggtacctgtgcatcatccagaaggccgtgtacatgcacgtgcggaagggctgcacctgcctgggccggggccacggccccggcggctggcggcccggccccccccctccccccccacccggcctggtgggcggcggcggctccggcggcggcggctcccccaagaagaagcggaaggtgtag

SEQ ID NO: 1536 - RNA, 1644 nt, synthetic construct
  misc_feature 1..1644: note = Synthetic
  source 1..1644: mol_type = other RNA
atggactacaaggacgacgacgacaaggactacaaggacgacgacgacaaggactacaaggacgacgacgacaaggccgccgccatgaccgacccccgggagaccgtgccccccggcaactccggcgaggagaccatcggcgaggccttcgcctggctgaaccggaccgtggaggccatcaaccgggaggccgtgaaccacctgccccgggagctgatcttccaggtgtggcagcggtcctggcggtactggcacgacgagcagggcatgtccgagtcctacaccaagtaccggtacctgtgcatcatccagaaggccgtgtacatgcacgtgcggaagggctgcacctgcctgggccggggccacggccccggcggctggcggcccggccccccccctccccccccacccggcctggtgggcggcggcggctccggcggcggcggctcccccaagaagaagcggaaggtgggcggcggcggctccggcggcggcggctccatgggcatccagggcctggccaagctgatcgccgacgtggccccctccgccatccgggagaacgacatcaagtcctacttcggccggaaggtggccatcgacgcctccatgtccatctaccagttcctgatcgccgtgcggcagggcggcgacgtgctgcagaacgaggagggcgagaccacctcccacctgatgggcatgttctaccggaccatccggatgatggagaacggcatcaagcccgtgtacgtgttcgacggcaagcccccccagctgaagtccggcgagctggccaagcggtccgagcggcgggccgaggccgagaagcagctgcagcaggcccaggccgccggcgccgagcaggaggtggagaagttcaccaagcggctggtgaaggtgaccaagcagcacaacgacgagtgcaagcacctgctgtccctgatgggcatcccctacctggacgccccctccgaggccgaggcctcctgcgccgccctggtgaaggccggcaaggtgtacgccgccgccaccgaggacatggactgcctgaccttcggctcccccgtgctgatgcggcacctgaccgcctccgaggccaagaagctgcccatccaggagttccacctgtcccggatcctgcaggagctgggcctgaaccaggagcagttcgtggacctgtgcatcctgctgggctccgactactgcgagtccatccggggcatcggccccaagcgggccgtggacctgatccagaagcacaagtccatcgaggagatcgtgcggcggctggaccccaacaagtaccccgtgcccgagaactggctgcacaaggaggcccaccagctgttcctggagcccgaggtgctggaccccgagtccgtggagctgaagtggtccgagcccaacgaggaggagctgatcaagttcatgtgcggcgagaagcagttctccgaggagcggatccggtccggcgtgaagcggctgtccaagtcccggcagggctccacccagggccggctggacgacttcttcaaggtgaccggctccctgtcctccgccaagcggaaggagcccgagcccaagggctccaccaagaagaaggccaagaccggcgccgccggcaagttcaagcggggcaagtag

SEQ ID NO: 1537 - RNA, 1674 nt, synthetic construct
  misc_feature 1..1674: note = Synthetic
  source 1..1674: mol_type = other RNA
atggactacaaggacgacgacgacaaggactacaaggacgacgacgacaaggactacaaggacgacgacgacaaggccgccgccatgaccgacccccgggagaccgtgccccccggcaactccggcgaggagaccatcggcgaggccttcgcctggctgaaccggaccgtggaggccatcaaccgggaggccgtgaaccacctgccccgggagctgatcttccaggtgtggcagcggtcctggcggtactggcacgacgagcagggcatgtccgagtcctacaccaagtaccggtacctgtgcatcatccagaaggccgtgtacatgcacgtgcggaagggctgcacctgcctgggccggggccacggccccggcggctggcggcccggccccccccctccccccccacccggcctggtgtccggctccgagacccccggcacctccgagtccgccacccccgagtccatgggcatccagggcctggccaagctgatcgccgacgtggccccctccgccatccgggagaacgacatcaagtcctacttcggccggaaggtggccatcgacgcctccatgtccatctaccagttcctgatcgccgtgcggcagggcggcgacgtgctgcagaacgaggagggcgagaccacctcccacctgatgggcatgttctaccggaccatccggatgatggagaacggcatcaagcccgtgtacgtgttcgacggcaagcccccccagctgaagtccggcgagctggccaagcggtccgagcggcgggccgaggccgagaagcagctgcagcaggcccaggccgccggcgccgagcaggaggtggagaagttcaccaagcggctggtgaaggtgaccaagcagcacaacgacgagtgcaagcacctgctgtccctgatgggcatcccctacctggacgccccctccgaggccgaggcctcctgcgccgccctggtgaaggccggcaaggtgtacgccgccgccaccgaggacatggactgcctgaccttcggctcccccgtgctgatgcggcacctgaccgcctccgaggccaagaagctgcccatccaggagttccacctgtcccggatcctgcaggagctgggcctgaaccaggagcagttcgtggacctgtgcatcctgctgggctccgactactgcgagtccatccggggcatcggccccaagcgggccgtggacctgatccagaagcacaagtccatcgaggagatcgtgcggcggctggaccccaacaagtaccccgtgcccgagaactggctgcacaaggaggcccaccagctgttcctggagcccgaggtgctggaccccgagtccgtggagctgaagtggtccgagcccaacgaggaggagctgatcaagttcatgtgcggcgagaagcagttctccgaggagcggatccggtccggcgtgaagcggctgtccaagtcccggcagggctccacccagggccggctggacgacttcttcaaggtgaccggctccctgtcctccgccaagcggaaggagcccgagcccaagggctccaccaagaagaaggccaagaccggcgccgccggcaagttcaagcggggcaagtccggcggctccaagcggaccgccgacggctccgagttcgagcccaagaagaagcggaaggtgtag

SEQ ID NO: 1538 - RNA, 6966 nt, synthetic construct
  misc_feature 1..6966: note = Synthetic
  source 1..6966: mol_type = other RNA
atggactccaccaaggagaagtgcgactcctacaaggacgacctgctgctgcggatgggcctgaacgacaacaaggccggcatggagggcctggacaaggagaagatcaacaagatcatcatggaggccaccaagggctcccggttctacggcaacgagctgaagaaggagaagcaggtgaaccagcggatcgagaacatgatgcagcagaaggcccagatcacctcccagcagctgcggaaggcccagctgcaggtggaccggttcgccatggagctggagcagtcccggaacctgtccaacaccatcgtgcacatcgacatggacgccttctacgccgccgtggagatgcgggacaaccccgagctgaaggacaagcccatcgccgtgggctccatgtccatgctgtccacctccaactaccacgcccggcggttcggcgtgcgggccgccatgcccggcttcatcgccaagcggctgtgcccccagctgatcatcgtgccccccaacttcgacaagtaccgggccgtgtccaaggaggtgaaggagatcctggccgactacgaccccaacttcatggccatgtccctggacgaggcctacctgaacatcaccaagcacctggaggagcggcagaactggcccgaggacaagcggcggtacttcatcaagatgggctcctccgtggagaacgacaaccccggcaaggaggtgaacaagctgtccgagcacgagcggtccatctcccccctgctgttcgaggagtccccctccgacgtgcagccccccggcgaccccttccaggtgaacttcgaggagcagaacaacccccagatcctgcagaactccgtggtgttcggcacctccgcccaggaggtggtgaaggagatccggttccggatcgagcagaagaccaccctgaccgcctccgccggcatcgcccccaacaccatgctggccaaggtgtgctccgacaagaacaagcccaacggccagtaccagatcctgcccaaccggcaggccgtgatggacttcatcaaggacctgcccatccggaaggtgtccggcatcggcaaggtgaccgagaagatgctgaaggccctgggcatcatcacctgcaccgagctgtaccagcagcgggccctgctgtccctgctgttctccgagacctcctggcactacttcctgcacatctccctgggcctgggctccacccacctgacccgggacggcgagcggaagtccatgtccgtggagcggaccttctccgagatcaacaaggccgaggagcagtactccctgtgccaggagctgtgctccgagctggcccaggacctgcagaaggagcggctgaagggccggaccgtgaccatcaagctgaagaacgtgaacttcgaggtgaagacccgggcctccaccgtgtcctccgtggtgtccaccgccgaggagatcttcgccatcgccaaggagctgctgaagaccgagatcgacgccgacttcccccaccccctgcggctgcggctgatgggcgtgcggatctcctccttccccaacgaggaggaccggaagcaccagcagcggtccatcatcggcttcctgcaggccggcaaccaggccctgtccgccaccgagtgcaccctggagaagaccgacaaggacaagttcgtgaagcccctggagatgtcccacaagaagtccttcttcgacaagaagcggtccgagcggaagtggtcccaccaggacaccttcaagtgcgaggccgtgaacaagcagtccttccagacctcccagcccttccaggtgctgaagaagaagatgaacgagaacctggagatctccgagaactccgacgactgccagatcctgacctgccccgtgtgcttccgggcccagggctgcatctccctggaggccctgaacaagcacgtggacgagtgcctggacggcccctccatctccgagaacttcaagatgttctcctgctcccacgtgtccgccaccaaggtgaacaagaaggagaacgtgcccgcctcctccctgtgcgagaagcaggactacgaggcccaccccaagatcaaggagatctcctccgtggactgcatcgccctggtggacaccatcgacaactcctccaaggccgagtccatcgacgccctgtccaacaagcactccaaggaggagtgctcctccctgccctccaagtccttcaacatcgagcactgccaccagaactcctcctccaccgtgtccctggagaacgaggacgtgggctccttccggcaggagtaccggcagccctacctgtgcgaggtgaagaccggccaggccctggtgtgccccgtgtgcaacgtggagcagaagacctccgacctgaccctgttcaacgtgcacgtggacgtgtgcctgaacaagtccttcatccaggagctgcggaaggacaagttcaaccccgtgaaccagcccaaggagtcctcccggtccaccggctcctcctccggcgtgcagaaggccgtgacccggaccaagcggcccggcctgatgaccaagtactccacctccaagaagatcaagcccaacaaccccaagcacaccctggacatcttcttcaagtccggcggctcctccggcggctccaagcggaccgccgacggctccgagttcgagtcccccaagaagaagcggaaggtgtccggcggctcctccggcggctccgacaagaagtactccatcggcctggacatcggcaccaactccgtgggctgggccgtgatcaccgacgagtacaaggtgccctccaagaagttcaaggtgctgggcaacaccgaccggcactccatcaagaagaacctgatcggcgccctgctgttcgactccggcgagaccgccgaggccacccggctgaagcggaccgcccggcggcggtacacccggcggaagaaccggatctgctacctgcaggagatcttctccaacgagatggccaaggtggacgactccttcttccaccggctggaggagtccttcctggtggaggaggacaagaagcacgagcggcaccccatcttcggcaacatcgtggacgaggtggcctaccacgagaagtaccccaccatctaccacctgcggaagaagctggtggactccaccgacaaggccgacctgcggctgatctacctggccctggcccacatgatcaagttccggggccacttcctgatcgagggcgacctgaaccccgacaactccgacgtggacaagctgttcatccagctggtgcagacctacaaccagctgttcgaggagaaccccatcaacgcctccggcgtggacgccaaggccatcctgtccgcccggctgtccaagtcccggcggctggagaacctgatcgcccagctgcccggcgagaagaagaacggcctgttcggcaacctgatcgccctgtccctgggcctgacccccaacttcaagtccaacttcgacctggccgaggacgccaagctgcagctgtccaaggacacctacgacgacgacctggacaacctgctggcccagatcggcgaccagtacgccgacctgttcctggccgccaagaacctgtccgacgccatcctgctgtccgacatcctgcgggtgaacaccgagatcaccaaggcccccctgtccgcctccatgatcaagcggtacgacgagcaccaccaggacctgaccctgctgaaggccctggtgcggcagcagctgcccgagaagtacaaggagatcttcttcgaccagtccaagaacggctacgccggctacatcgacggcggcgcctcccaggaggagttctacaagttcatcaagcccatcctggagaagatggacggcaccgaggagctgctggtgaagctgaaccgggaggacctgctgcggaagcagcggaccttcgacaacggctccatcccccaccagatccacctgggcgagctgcacgccatcctgcggcggcaggaggacttctaccccttcctgaaggacaaccgggagaagatcgagaagatcctgaccttccggatcccctactacgtgggccccctggcccggggcaactcccggttcgcctggatgacccggaagtccgaggagaccatcaccccctggaacttcgaggaggtggtggacaagggcgcctccgcccagtccttcatcgagcggatgaccaacttcgacaagaacctgcccaacgagaaggtgctgcccaagcactccctgctgtacgagtacttcaccgtgtacaacgagctgaccaaggtgaagtacgtgaccgagggcatgcggaagcccgccttcctgtccggcgagcagaagaaggccatcgtggacctgctgttcaagaccaaccggaaggtgaccgtgaagcagctgaaggaggactacttcaagaagatcgagtgcttcgactccgtggagatctccggcgtggaggaccggttcaacgcctccctgggcacctaccacgacctgctgaagatcatcaaggacaaggacttcctggacaacgaggagaacgaggacatcctggaggacatcgtgctgaccctgaccctgttcgaggaccgggagatgatcgaggagcggctgaagacctacgcccacctgttcgacgacaaggtgatgaagcagctgaagcggcggcggtacaccggctggggccggctgtcccggaagctgatcaacggcatccgggacaagcagtccggcaagaccatcctggacttcctgaagtccgacggcttcgccaaccggaacttcatgcagctgatccacgacgactccctgaccttcaaggaggacatccagaaggcccaggtgtccggccagggcgactccctgcacgagcacatcgccaacctggccggctcccccgccatcaagaagggcatcctgcagaccgtgaaggtggtggacgagctggtgaaggtgatgggccggcacaagcccgagaacatcgtgatcgagatggcccgggagaaccagaccacccagaagggccagaagaactcccgggagcggatgaagcggatcgaggagggcatcaaggagctgggctcccagatcctgaaggagcaccccgtggagaacacccagctgcagaacgagaagctgtacctgtactacctgcagaacggccgggacatgtacgtggaccaggagctggacatcaaccggctgtccgactacgacgtggacgccatcgtgccccagtccttcctgaaggacgactccatcgacaacaaggtgctgacccggtccgacaagaaccggggcaagtccgacaacgtgccctccgaggaggtggtgaagaagatgaagaactactggcggcagctgctgaacgccaagctgatcacccagcggaagttcgacaacctgaccaaggccgagcggggcggcctgtccgagctggacaaggccggcttcatcaagcggcagctggtggagacccggcagatcaccaagcacgtggcccagatcctggactcccggatgaacaccaagtacgacgagaacgacaagctgatccgggaggtgaaggtgatcaccctgaagtccaagctggtgtccgacttccggaaggacttccagttctacaaggtgcgggagatcaacaactaccaccacgcccacgacgcctacctgaacgccgtggtgggcaccgccctgatcaagaagtaccccaagctggagtccgagttcgtgtacggcgactacaaggtgtacgacgtgcggaagatgatcgccaagtccgagcaggagatcggcaaggccaccgccaagtacttcttctactccaacatcatgaacttcttcaagaccgagatcaccctggccaacggcgagatccggaagcggcccctgatcgagaccaacggcgagaccggcgagatcgtgtgggacaagggccgggacttcgccaccgtgcggaaggtgctgtccatgccccaggtgaacatcgtgaagaagaccgaggtgcagaccggcggcttctccaaggagtccatcctgcccaagcggaactccgacaagctgatcgcccggaagaaggactgggaccccaagaagtacggcggcttcgactcccccaccgtggcctactccgtgctggtggtggccaaggtggagaagggcaagtccaagaagctgaagtccgtgaaggagctgctgggcatcaccatcatggagcggtcctccttcgagaagaaccccatcgacttcctggaggccaagggctacaaggaggtgaagaaggacctgatcatcaagctgcccaagtactccctgttcgagctggagaacggccggaagcggatgctggcctccgccggcgagctgcagaagggcaacgagctggccctgccctccaagtacgtgaacttcctgtacctggcctcccactacgagaagctgaagggctcccccgaggacaacgagcagaagcagctgttcgtggagcagcacaagcactacctggacgagatcatcgagcagatctccgagttctccaagcgggtgatcctggccgacgccaacctggacaaggtgctgtccgcctacaacaagcaccgggacaagcccatccgggagcaggccgagaacatcatccacctgttcaccctgaccaacctgggcgcccccgccgccttcaagtacttcgacaccaccatcgaccggaagcggtacacctccaccaaggaggtgctggacgccaccctgatccaccagtccatcaccggcctgtacgagacccggatcgacctgtcccagctgggcggcgactccggcggctccaagcggaccgccgacggctccgagttcgagtcccccaagaagaagcggaaggtggagatcgccgccctggagaaggagatcgccgccctggagaaggagaacgccgccctggagtgggagatcgccgccctggagaagtag

SEQ ID NO: 1539 - RNA, 1314 nt, synthetic construct
  misc_feature 1..1314: note = Synthetic
  source 1..1314: mol_type = other RNA
atgggcatccagggcctggccaagctgatcgccgacgtggccccctccgccatccgggagaacgacatcaagtcctacttcggccggaaggtggccatcgacgcctccatgtccatctaccagttcctgatcgccgtgcggcagggcggcgacgtgctgcagaacgaggagggcgagaccacctcccacctgatgggcatgttctaccggaccatccggatgatggagaacggcatcaagcccgtgtacgtgttcgacggcaagcccccccagctgaagtccggcgagctggccaagcggtccgagcggcgggccgaggccgagaagcagctgcagcaggcccaggccgccggcgccgagcaggaggtggagaagttcaccaagcggctggtgaaggtgaccaagcagcacaacgacgagtgcaagcacctgctgtccctgatgggcatcccctacctggacgccccctccgaggccgaggcctcctgcgccgccctggtgaaggccggcaaggtgtacgccgccgccaccgaggacatggactgcctgaccttcggctcccccgtgctgatgcggcacctgaccgcctccgaggccaagaagctgcccatccaggagttccacctgtcccggatcctgcaggagctgggcctgaaccaggagcagttcgtggacctgtgcatcctgctgggctccgactactgcgagtccatccggggcatcggccccaagcgggccgtggacctgatccagaagcacaagtccatcgaggagatcgtgcggcggctggaccccaacaagtaccccgtgcccgagaactggctgcacaaggaggcccaccagctgttcctggagcccgaggtgctggaccccgagtccgtggagctgaagtggtccgagcccaacgaggaggagctgatcaagttcatgtgcggcgagaagcagttctccgaggagcggatccggtccggcgtgaagcggctgtccaagtcccggcagggctccacccagggccggctggacgacttcttcaaggtgaccggctccctgtcctccgccaagcggaaggagcccgagcccaagggctccaccaagaagaaggccaagaccggcgccgccggcaagttcaagcggggcaagtccggcggctccaagcggaccgccgacggctccgagttcgagcccaagaagaagcggaaggtgtccgagtccgccacccccgagtccaagatcgccgccctgaaggagaagatcgccgccctgaaggagaagaacgccgccctgaagtggaagatcgccgccctgaaggagtag

SEQ ID NO: 1540 - RNA, 6966 nt, synthetic construct
  misc_feature 1..6966: note = Synthetic
  source 1..6966: mol_type = other RNA
atggactccaccaaggagaagtgcgactcctacaaggacgacctgctgctgcggatgggcctgaacgacaacaaggccggcatggagggcctggacaaggagaagatcaacaagatcatcatggaggccaccaagggctcccggttctacggcaacgagctgaagaaggagaagcaggtgaaccagcggatcgagaacatgatgcagcagaaggcccagatcacctcccagcagctgcggaaggcccagctgcaggtggaccggttcgccatggagctggagcagtcccggaacctgtccaacaccatcgtgcacatcgacatggacgccttctacgccgccgtggagatgcgggacaaccccgagctgaaggacaagcccatcgccgtgggctccatgtccatgctgtccacctccaactaccacgcccggcggttcggcgtgcgggccgccatgcccggcttcatcgccaagcggctgtgcccccagctgatcatcgtgccccccaacttcgacaagtaccgggccgtgtccaaggaggtgaaggagatcctggccgactacgaccccaacttcatggccatgtccctggacgaggcctacctgaacatcaccaagcacctggaggagcggcagaactggcccgaggacaagcggcggtacttcatcaagatgggctcctccgtggagaacgacaaccccggcaaggaggtgaacaagctgtccgagcacgagcggtccatctcccccctgctgttcgaggagtccccctccgacgtgcagccccccggcgaccccttccaggtgaacttcgaggagcagaacaacccccagatcctgcagaactccgtggtgttcggcacctccgcccaggaggtggtgaaggagatccggttccggatcgagcagaagaccaccctgaccgcctccgccggcatcgcccccaacaccatgctggccaaggtgtgctccgacaagaacaagcccaacggccagtaccagatcctgcccaaccggcaggccgtgatggacttcatcaaggacctgcccatccggaaggtgtccggcatcggcaaggtgaccgagaagatgctgaaggccctgggcatcatcacctgcaccgagctgtaccagcagcgggccctgctgtccctgctgttctccgagacctcctggcactacttcctgcacatctccctgggcctgggctccacccacctgacccgggacggcgagcggaagtccatgtccgtggagcggaccttctccgagatcaacaaggccgaggagcagtactccctgtgccaggagctgtgctccgagctggcccaggacctgcagaaggagcggctgaagggccggaccgtgaccatcaagctgaagaacgtgaacttcgaggtgaagacccgggcctccaccgtgtcctccgtggtgtccaccgccgaggagatcttcgccatcgccaaggagctgctgaagaccgagatcgacgccgacttcccccaccccctgcggctgcggctgatgggcgtgcggatctcctccttccccaacgaggaggaccggaagcaccagcagcggtccatcatcggcttcctgcaggccggcaaccaggccctgtccgccaccgagtgcaccctggagaagaccgacaaggacaagttcgtgaagcccctggagatgtcccacaagaagtccttcttcgacaagaagcggtccgagcggaagtggtcccaccaggacaccttcaagtgcgaggccgtgaacaagcagtccttccagacctcccagcccttccaggtgctgaagaagaagatgaacgagaacctggagatctccgagaactccgacgactgccagatcctgacctgccccgtgtgcttccgggcccagggctgcatctccctggaggccctgaacaagcacgtggacgagtgcctggacggcccctccatctccgagaacttcaagatgttctcctgctcccacgtgtccgccaccaaggtgaacaagaaggagaacgtgcccgcctcctccctgtgcgagaagcaggactacgaggcccaccccaagatcaaggagatctcctccgtggactgcatcgccctggtggacaccatcgacaactcctccaaggccgagtccatcgacgccctgtccaacaagcactccaaggaggagtgctcctccctgccctccaagtccttcaacatcgagcactgccaccagaactcctcctccaccgtgtccctggagaacgaggacgtgggctccttccggcaggagtaccggcagccctacctgtgcgaggtgaagaccggccaggccctggtgtgccccgtgtgcaacgtggagcagaagacctccgacctgaccctgttcaacgtgcacgtggacgtgtgcctgaacaagtccttcatccaggagctgcggaaggacaagttcaaccccgtgaaccagcccaaggagtcctcccggtccaccggctcctcctccggcgtgcagaaggccgtgacccggaccaagcggcccggcctgatgaccaagtactccacctccaagaagatcaagcccaacaaccccaagcacaccctggacatcttcttcaagtccggcggctcctccggcggctccaagcggaccgccgacggctccgagttcgagtcccccaagaagaagcggaaggtgtccggcggctcctccggcggctccgacaagaagtactccatcggcctggacatcggcaccaactccgtgggctgggccgtgatcaccgacgagtacaaggtgccctccaagaagttcaaggtgctgggcaacaccgaccggcactccatcaagaagaacctgatcggcgccctgctgttcgactccggcgagaccgccgaggccacccggctgaagcggaccgcccggcggcggtacacccggcggaagaaccggatctgctacctgcaggagatcttctccaacgagatggccaaggtggacgactccttcttccaccggctggaggagtccttcctggtggaggaggacaagaagcacgagcggcaccccatcttcggcaacatcgtggacgaggtggcctaccacgagaagtaccccaccatctaccacctgcggaagaagctggtggactccaccgacaaggccgacctgcggctgatctacctggccctggcccacatgatcaagttccggggccacttcctgatcgagggcgacctgaaccccgacaactccgacgtggacaagctgttcatccagctggtgcagacctacaaccagctgttcgaggagaaccccatcaacgcctccggcgtggacgccaaggccatcctgtccgcccggctgtccaagtcccggcggctggagaacctgatcgcccagctgcccggcgagaagaagaacggcctgttcggcaacctgatcgccctgtccctgggcctgacccccaacttcaagtccaacttcgacctggccgaggacgccaagctgcagctgtccaaggacacctacgacgacgacctggacaacctgctggcccagatcggcgaccagtacgccgacctgttcctggccgccaagaacctgtccgacgccatcctgctgtccgacatcctgcgggtgaacaccgagatcaccaaggcccccctgtccgcctccatgatcaagcggtacgacgagcaccaccaggacctgaccctgctgaaggccctggtgcggcagcagctgcccgagaagtacaaggagatcttcttcgaccagtccaagaacggctacgccggctacatcgacggcggcgcctcccaggaggagttctacaagttcatcaagcccatcctggagaagatggacggcaccgaggagctgctggtgaagctgaaccgggaggacctgctgcggaagcagcggaccttcgacaacggctccatcccccaccagatccacctgggcgagctgcacgccatcctgcggcggcaggaggacttctaccccttcctgaaggacaaccgggagaagatcgagaagatcctgaccttccggatcccctactacgtgggccccctggcccggggcaactcccggttcgcctggatgacccggaagtccgaggagaccatcaccccctggaacttcgaggaggtggtggacaagggcgcctccgcccagtccttcatcgagcggatgaccaacttcgacaagaacctgcccaacgagaaggtgctgcccaagcactccctgctgtacgagtacttcaccgtgtacaacgagctgaccaaggtgaagtacgtgaccgagggcatgcggaagcccgccttcctgtccggcgagcagaagaaggccatcgtggacctgctgttcaagaccaaccggaaggtgaccgtgaagcagctgaaggaggactacttcaagaagatcgagtgcttcgactccgtggagatctccggcgtggaggaccggttcaacgcctccctgggcacctaccacgacctgctgaagatcatcaaggacaaggacttcctggacaacgaggagaacgaggacatcctggaggacatcgtgctgaccctgaccctgttcgaggaccgggagatgatcgaggagcggctgaagacctacgcccacctgttcgacgacaaggtgatgaagcagctgaagcggcggcggtacaccggctggggccggctgtcccggaagctgatcaacggcatccgggacaagcagtccggcaagaccatcctggacttcctgaagtccgacggcttcgccaaccggaacttcatgcagctgatccacgacgactccctgaccttcaaggaggacatccagaaggcccaggtgtccggccagggcgactccctgcacgagcacatcgccaacctggccggctcccccgccatcaagaagggcatcctgcagaccgtgaaggtggtggacgagctggtgaaggtgatgggccggcacaagcccgagaacatcgtgatcgagatggcccgggagaaccagaccacccagaagggccagaagaactcccgggagcggatgaagcggatcgaggagggcatcaaggagctgggctcccagatcctgaaggagcaccccgtggagaacacccagctgcagaacgagaagctgtacctgtactacctgcagaacggccgggacatgtacgtggaccaggagctggacatcaaccggctgtccgactacgacgtggacgccatcgtgccccagtccttcctgaaggacgactccatcgacaacaaggtgctgacccggtccgacaagaaccggggcaagtccgacaacgtgccctccgaggaggtggtgaagaagatgaagaactactggcggcagctgctgaacgccaagctgatcacccagcggaagttcgacaacctgaccaaggccgagcggggcggcctgtccgagctggacaaggccggcttcatcaagcggcagctggtggagacccggcagatcaccaagcacgtggcccagatcctggactcccggatgaacaccaagtacgacgagaacgacaagctgatccgggaggtgaaggtgatcaccctgaagtccaagctggtgtccgacttccggaaggacttccagttctacaaggtgcgggagatcaacaactaccaccacgcccacgacgcctacctgaacgccgtggtgggcaccgccctgatcaagaagtaccccaagctggagtccgagttcgtgtacggcgactacaaggtgtacgacgtgcggaagatgatcgccaagtccgagcaggagatcggcaaggccaccgccaagtacttcttctactccaacatcatgaacttcttcaagaccgagatcaccctggccaacggcgagatccggaagcggcccctgatcgagaccaacggcgagaccggcgagatcgtgtgggacaagggccgggacttcgccaccgtgcggaaggtgctgtccatgccccaggtgaacatcgtgaagaagaccgaggtgcagaccggcggcttctccaaggagtccatcctgcccaagcggaactccgacaagctgatcgcccggaagaaggactgggaccccaagaagtacggcggcttcgactcccccaccgtggcctactccgtgctggtggtggccaaggtggagaagggcaagtccaagaagctgaagtccgtgaaggagctgctgggcatcaccatcatggagcggtcctccttcgagaagaaccccatcgacttcctggaggccaagggctacaaggaggtgaagaaggacctgatcatcaagctgcccaagtactccctgttcgagctggagaacggccggaagcggatgctggcctccgccggcgagctgcagaagggcaacgagctggccctgccctccaagtacgtgaacttcctgtacctggcctcccactacgagaagctgaagggctcccccgaggacaacgagcagaagcagctgttcgtggagcagcacaagcactacctggacgagatcatcgagcagatctccgagttctccaagcgggtgatcctggccgacgccaacctggacaaggtgctgtccgcctacaacaagcaccgggacaagcccatccgggagcaggccgagaacatcatccacctgttcaccctgaccaacctgggcgcccccgccgccttcaagtacttcgacaccaccatcgaccggaagcggtacacctccaccaaggaggtgctggacgccaccctgatccaccagtccatcaccggcctgtacgagacccggatcgacctgtcccagctgggcggcgactccggcggctccaagcggaccgccgacggctccgagttcgagtcccccaagaagaagcggaaggtgaagatcgccgccctgaaggagaagatcgccgccctgaaggagaagaacgccgccctgaagtggaagatcgccgccctgaaggagtag

SEQ ID NO: 1541 - RNA, 1314 nt, synthetic construct
  misc_feature 1..1314: note = Synthetic
  source 1..1314: mol_type = other RNA
atgggcatccagggcctggccaagctgatcgccgacgtggccccctccgccatccgggagaacgacatcaagtcctacttcggccggaaggtggccatcgacgcctccatgtccatctaccagttcctgatcgccgtgcggcagggcggcgacgtgctgcagaacgaggagggcgagaccacctcccacctgatgggcatgttctaccggaccatccggatgatggagaacggcatcaagcccgtgtacgtgttcgacggcaagcccccccagctgaagtccggcgagctggccaagcggtccgagcggcgggccgaggccgagaagcagctgcagcaggcccaggccgccggcgccgagcaggaggtggagaagttcaccaagcggctggtgaaggtgaccaagcagcacaacgacgagtgcaagcacctgctgtccctgatgggcatcccctacctggacgccccctccgaggccgaggcctcctgcgccgccctggtgaaggccggcaaggtgtacgccgccgccaccgaggacatggactgcctgaccttcggctcccccgtgctgatgcggcacctgaccgcctccgaggccaagaagctgcccatccaggagttccacctgtcccggatcctgcaggagctgggcctgaaccaggagcagttcgtggacctgtgcatcctgctgggctccgactactgcgagtccatccggggcatcggccccaagcgggccgtggacctgatccagaagcacaagtccatcgaggagatcgtgcggcggctggaccccaacaagtaccccgtgcccgagaactggctgcacaaggaggcccaccagctgttcctggagcccgaggtgctggaccccgagtccgtggagctgaagtggtccgagcccaacgaggaggagctgatcaagttcatgtgcggcgagaagcagttctccgaggagcggatccggtccggcgtgaagcggctgtccaagtcccggcagggctccacccagggccggctggacgacttcttcaaggtgaccggctccctgtcctccgccaagcggaaggagcccgagcccaagggctccaccaagaagaaggccaagaccggcgccgccggcaagttcaagcggggcaagtccggcggctccaagcggaccgccgacggctccgagttcgagcccaagaagaagcggaaggtgtccgagtccgccacccccgagtccgagatcgccgccctggagaaggagatcgccgccctggagaaggagaacgccgccctggagtgggagatcgccgccctggagaagtag

SEQ ID NO: 1542 - RNA, 6972 nt, synthetic construct
  misc_feature 1..6972: note = Synthetic
  source 1..6972: mol_type = other RNA
atggacaagaagtactccatcggcctggacatcggcaccaactccgtgggctgggccgtgatcaccgacgagtacaaggtgccctccaagaagttcaaggtgctgggcaacaccgaccggcactccatcaagaagaacctgatcggcgccctgctgttcgactccggcgagaccgccgaggccacccggctgaagcggaccgcccggcggcggtacacccggcggaagaaccggatctgctacctgcaggagatcttctccaacgagatggccaaggtggacgactccttcttccaccggctggaggagtccttcctggtggaggaggacaagaagcacgagcggcaccccatcttcggcaacatcgtggacgaggtggcctaccacgagaagtaccccaccatctaccacctgcggaagaagctggtggactccaccgacaaggccgacctgcggctgatctacctggccctggcccacatgatcaagttccggggccacttcctgatcgagggcgacctgaaccccgacaactccgacgtggacaagctgttcatccagctggtgcagacctacaaccagctgttcgaggagaaccccatcaacgcctccggcgtggacgccaaggccatcctgtccgcccggctgtccaagtcccggcggctggagaacctgatcgcccagctgcccggcgagaagaagaacggcctgttcggcaacctgatcgccctgtccctgggcctgacccccaacttcaagtccaacttcgacctggccgaggacgccaagctgcagctgtccaaggacacctacgacgacgacctggacaacctgctggcccagatcggcgaccagtacgccgacctgttcctggccgccaagaacctgtccgacgccatcctgctgtccgacatcctgcgggtgaacaccgagatcaccaaggcccccctgtccgcctccatgatcaagcggtacgacgagcaccaccaggacctgaccctgctgaaggccctggtgcggcagcagctgcccgagaagtacaaggagatcttcttcgaccagtccaagaacggctacgccggctacatcgacggcggcgcctcccaggaggagttctacaagttcatcaagcccatcctggagaagatggacggcaccgaggagctgctggtgaagctgaaccgggaggacctgctgcggaagcagcggaccttcgacaacggctccatcccccaccagatccacctgggcgagctgcacgccatcctgcggcggcaggaggacttctaccccttcctgaaggacaaccgggagaagatcgagaagatcctgaccttccggatcccctactacgtgggccccctggcccggggcaactcccggttcgcctggatgacccggaagtccgaggagaccatcaccccctggaacttcgaggaggtggtggacaagggcgcctccgcccagtccttcatcgagcggatgaccaacttcgacaagaacctgcccaacgagaaggtgctgcccaagcactccctgctgtacgagtacttcaccgtgtacaacgagctgaccaaggtgaagtacgtgaccgagggcatgcggaagcccgccttcctgtccggcgagcagaagaaggccatcgtggacctgctgttcaagaccaaccggaaggtgaccgtgaagcagctgaaggaggactacttcaagaagatcgagtgcttcgactccgtggagatctccggcgtggaggaccggttcaacgcctccctgggcacctaccacgacctgctgaagatcatcaaggacaaggacttcctggacaacgaggagaacgaggacatcctggaggacatcgtgctgaccctgaccctgttcgaggaccgggagatgatcgaggagcggctgaagacctacgcccacctgttcgacgacaaggtgatgaagcagctgaagcggcggcggtacaccggctggggccggctgtcccggaagctgatcaacggcatccgggacaagcagtccggcaagaccatcctggacttcctgaagtccgacggcttcgccaaccggaacttcatgcagctgatccacgacgactccctgaccttcaaggaggacatccagaaggcccaggtgtccggccagggcgactccctgcacgagcacatcgccaacctggccggctcccccgccatcaagaagggcatcctgcagaccgtgaaggtggtggacgagctggtgaaggtgatgggccggcacaagcccgagaacatcgtgatcgagatggcccgggagaaccagaccacccagaagggccagaagaactcccgggagcggatgaagcggatcgaggagggcatcaaggagctgggctcccagatcctgaaggagcaccccgtggagaacacccagctgcagaacgagaagctgtacctgtactacctgcagaacggccgggacatgtacgtggaccaggagctggacatcaaccggctgtccgactacgacgtggacgccatcgtgccccagtccttcctgaaggacgactccatcgacaacaaggtgctgacccggtccgacaagaaccggggcaagtccgacaacgtgccctccgaggaggtggtgaagaagatgaagaactactggcggcagctgctgaacgccaagctgatcacccagcggaagttcgacaacctgaccaaggccgagcggggcggcctgtccgagctggacaaggccggcttcatcaagcggcagctggtggagacccggcagatcaccaagcacgtggcccagatcctggactcccggatgaacaccaagtacgacgagaacgacaagctgatccgggaggtgaaggtgatcaccctgaagtccaagctggtgtccgacttccggaaggacttccagttctacaaggtgcgggagatcaacaactaccaccacgcccacgacgcctacctgaacgccgtggtgggcaccgccctgatcaagaagtaccccaagctggagtccgagttcgtgtacggcgactacaaggtgtacgacgtgcggaagatgatcgccaagtccgagcaggagatcggcaaggccaccgccaagtacttcttctactccaacatcatgaacttcttcaagaccgagatcaccctggccaacggcgagatccggaagcggcccctgatcgagaccaacggcgagaccggcgagatcgtgtgggacaagggccgggacttcgccaccgtgcggaaggtgctgtccatgccccaggtgaacatcgtgaagaagaccgaggtgcagaccggcggcttctccaaggagtccatcctgcccaagcggaactccgacaagctgatcgcccggaagaaggactgggaccccaagaagtacggcggcttcgactcccccaccgtggcctactccgtgctggtggtggccaaggtggagaagggcaagtccaagaagctgaagtccgtgaaggagctgctgggcatcaccatcatggagcggtcctccttcgagaagaaccccatcgacttcctggaggccaagggctacaaggaggtgaagaaggacctgatcatcaagctgcccaagtactccctgttcgagctggagaacggccggaagcggatgctggcctccgccggcgagctgcagaagggcaacgagctggccctgccctccaagtacgtgaacttcctgtacctggcctcccactacgagaagctgaagggctcccccgaggacaacgagcagaagcagctgttcgtggagcagcacaagcactacctggacgagatcatcgagcagatctccgagttctccaagcgggtgatcctggccgacgccaacctggacaaggtgctgtccgcctacaacaagcaccgggacaagcccatccgggagcaggccgagaacatcatccacctgttcaccctgaccaacctgggcgcccccgccgccttcaagtacttcgacaccaccatcgaccggaagcggtacacctccaccaaggaggtgctggacgccaccctgatccaccagtccatcaccggcctgtacgagacccggatcgacctgtcccagctgggcggcgacggcgcccccgagtccgccaccgagtccggcggcacctccaccgagtccgagggctccgccggcacctccaccgagtccgagggctccgccggctccgccggctccacctccggctcctcctccggcatgaagatcgccgtggtggacaaggccctgaacaacacccggtacgacaagcacttccagctgtacggcgaggaggtggacgtgttccacatgtgcaacgagaagctgtccggccggctgctgaagaagcacatcaccatcggcacccccgagaaccccttcgaccccaacgactacgacttcgtgatcctggtgggcgccgagcccttcctgtacttcgccggcaagaagggcatcggcgactacaccggcaagcgggtggagtacaacggctacgccaactggatcgcctccatctcccccgcccagctgcacttcaagcccgagatgaagcccgtgttcgacgccaccgtggagaacatccacgacatcatcaacggccgggagaagatcgccaaggccggcgactaccggcccatcaccgaccccgacgaggccgaggagtacatcaagatggtgtacaacatggtgatcggccccgtggccttcgcctccgccacctccgccctgtactgccgggacggctacctgctgggcgtgtccatctcccaccaggagtaccagggcgtgtacatcgactccgactgcctgaccgaggtggccgtgtactacctgcagaagatcctggactccgagaaccacaccatcgtgttccacaacctgaagttcgacatgcacttctacaagtaccacctgggcctgaccttcgacaaggcccacaaggagcggcggctgcacgacaccatgctgcagcactacgtgctggacgagcggcggggcacccacggcctgaagtccctggccatgaagtacaccgacatgggcgactacgacttcgagctggacaagttcaaggacgactactgcaaggcccacaagatcaagaaggaggacttcacctacgacctgatccccttcgacatcatgtggccctacgccgccaaggacaccgacgccaccatccggctgcacaacttcttcctgcccaagatcgagaagaacgagaagctgtgctccctgtactacgacgtgctgatgcccggctgcgtgttcctgcagcgggtggaggaccggggcgtgcccatctccatcgaccggctgaaggaggcccagtaccagctgacccacaacctgaacaaggcccgggagaagctgtacacctaccccgaggtgaagcagctggagcaggaccagaacgaggccttcaaccccaactccgtgaagcagctgcgggtgctgctgttcgactacgtgggcctgacccccaccggcaagctgaccgacaccggcgccgactccaccgacgccgaggccctgaacgagctggccacccagcaccccatcgccaagaccctgctggagatccggaagctgaccaagctgatctccacctacgtggagaagatcctgctgtccatcgacgccgacggctgcatccggaccggcttccacgagcacatgaccacctccggccggctgtcctcctccggcaagctgaacctgcagcagctgccccgggacgagtccatcatcaagggctgcgtggtggccccccccggctaccgggtgatcgcctgggacctgaccaccgccgaggtgtactacgccgccgtgctgtccggcgaccggaacatgcagcaggtgttcatcaacatgcggaacgagcccgacaagtaccccgacttccactccaacatcgcccacatggtgttcaagctgcagtgcgagccccgggacgtgaagaagctgttccccgccctgcggcaggccgccaaggccatcaccttcggcatcctgtacggctccggccccgccaaggtggcccactccgtgaacgaggccctgctggagcaggccgccaagaccggcgagcccttcgtggagtgcaccgtggccgacgccaaggagtacatcgagacctacttcggccagttcccccagctgaagcggtggatcgacaagtgccacgaccagatcaagaaccacggcttcatctactcccacttcggccggaagcggcggctgcacaacatccactccgaggaccggggcgtgcagggcgaggagatccggtccggcttcaacgccatcatccagtccgcctcctccgactccctgctgctgggcgccgtggacgccgacaacgagatcatctccctgggcctggagcaggagatgaagatcgtgatgctggtgcacgactccgtggtggccatcgtgcgggaggacctgatcgaccagtacaacgagatcctgatccggaacatccagaaggaccggggcatctccatccccggctgccccatcggcatcgactccgactccgaggccggcggctcccgggactactcctgcggcaagatgaagaagcagcacccctccatcgcctgcatcgacgacgacgagtacacccggtacgtgaagggcgtgctgctggacgccgagttcgagtacaagaagctggccgccatggacaaggagcaccccgaccactccaagtacaaggacgacaagttcatcgccgtgtgcaaggacctggacaacgtgaagcggatcctgggcgccggcggcggctccggcaagcggaccgccgacggctccggcggcggctcccccaagaagaagcggaaggtgtccgagtccgccacccccgagtccatcgccgccctggagaaggagatcgccgccctggagaaggagaacgccgccctggagtgggagatcgccgccctggagaagtag

SEQ ID NO: 1543 - RNA, 6975 nt, synthetic construct
  misc_feature 1..6975: note = Synthetic
  source 1..6975: mol_type = other RNA
atggacaagaagtactccatcggcctggacatcggcaccaactccgtgggctgggccgtgatcaccgacgagtacaaggtgccctccaagaagttcaaggtgctgggcaacaccgaccggcactccatcaagaagaacctgatcggcgccctgctgttcgactccggcgagaccgccgaggccacccggctgaagcggaccgcccggcggcggtacacccggcggaagaaccggatctgctacctgcaggagatcttctccaacgagatggccaaggtggacgactccttcttccaccggctggaggagtccttcctggtggaggaggacaagaagcacgagcggcaccccatcttcggcaacatcgtggacgaggtggcctaccacgagaagtaccccaccatctaccacctgcggaagaagctggtggactccaccgacaaggccgacctgcggctgatctacctggccctggcccacatgatcaagttccggggccacttcctgatcgagggcgacctgaaccccgacaactccgacgtggacaagctgttcatccagctggtgcagacctacaaccagctgttcgaggagaaccccatcaacgcctccggcgtggacgccaaggccatcctgtccgcccggctgtccaagtcccggcggctggagaacctgatcgcccagctgcccggcgagaagaagaacggcctgttcggcaacctgatcgccctgtccctgggcctgacccccaacttcaagtccaacttcgacctggccgaggacgccaagctgcagctgtccaaggacacctacgacgacgacctggacaacctgctggcccagatcggcgaccagtacgccgacctgttcctggccgccaagaacctgtccgacgccatcctgctgtccgacatcctgcgggtgaacaccgagatcaccaaggcccccctgtccgcctccatgatcaagcggtacgacgagcaccaccaggacctgaccctgctgaaggccctggtgcggcagcagctgcccgagaagtacaaggagatcttcttcgaccagtccaagaacggctacgccggctacatcgacggcggcgcctcccaggaggagttctacaagttcatcaagcccatcctggagaagatggacggcaccgaggagctgctggtgaagctgaaccgggaggacctgctgcggaagcagcggaccttcgacaacggctccatcccccaccagatccacctgggcgagctgcacgccatcctgcggcggcaggaggacttctaccccttcctgaaggacaaccgggagaagatcgagaagatcctgaccttccggatcccctactacgtgggccccctggcccggggcaactcccggttcgcctggatgacccggaagtccgaggagaccatcaccccctggaacttcgaggaggtggtggacaagggcgcctccgcccagtccttcatcgagcggatgaccaacttcgacaagaacctgcccaacgagaaggtgctgcccaagcactccctgctgtacgagtacttcaccgtgtacaacgagctgaccaaggtgaagtacgtgaccgagggcatgcggaagcccgccttcctgtccggcgagcagaagaaggccatcgtggacctgctgttcaagaccaaccggaaggtgaccgtgaagcagctgaaggaggactacttcaagaagatcgagtgcttcgactccgtggagatctccggcgtggaggaccggttcaacgcctccctgggcacctaccacgacctgctgaagatcatcaaggacaaggacttcctggacaacgaggagaacgaggacatcctggaggacatcgtgctgaccctgaccctgttcgaggaccgggagatgatcgaggagcggctgaagacctacgcccacctgttcgacgacaaggtgatgaagcagctgaagcggcggcggtacaccggctggggccggctgtcccggaagctgatcaacggcatccgggacaagcagtccggcaagaccatcctggacttcctgaagtccgacggcttcgccaaccggaacttcatgcagctgatccacgacgactccctgaccttcaaggaggacatccagaaggcccaggtgtccggccagggcgactccctgcacgagcacatcgccaacctggccggctcccccgccatcaagaagggcatcctgcagaccgtgaaggtggtggacgagctggtgaaggtgatgggccggcacaagcccgagaacatcgtgatcgagatggcccgggagaaccagaccacccagaagggccagaagaactcccgggagcggatgaagcggatcgaggagggcatcaaggagctgggctcccagatcctgaaggagcaccccgtggagaacacccagctgcagaacgagaagctgtacctgtactacctgcagaacggccgggacatgtacgtggaccaggagctggacatcaaccggctgtccgactacgacgtggacgccatcgtgccccagtccttcctgaaggacgactccatcgacaacaaggtgctgacccggtccgacaagaaccggggcaagtccgacaacgtgccctccgaggaggtggtgaagaagatgaagaactactggcggcagctgctgaacgccaagctgatcacccagcggaagttcgacaacctgaccaaggccgagcggggcggcctgtccgagctggacaaggccggcttcatcaagcggcagctggtggagacccggcagatcaccaagcacgtggcccagatcctggactcccggatgaacaccaagtacgacgagaacgacaagctgatccgggaggtgaaggtgatcaccctgaagtccaagctggtgtccgacttccggaaggacttccagttctacaaggtgcgggagatcaacaactaccaccacgcccacgacgcctacctgaacgccgtggtgggcaccgccctgatcaagaagtaccccaagctggagtccgagttcgtgtacggcgactacaaggtgtacgacgtgcggaagatgatcgccaagtccgagcaggagatcggcaaggccaccgccaagtacttcttctactccaacatcatgaacttcttcaagaccgagatcaccctggccaacggcgagatccggaagcggcccctgatcgagaccaacggcgagaccggcgagatcgtgtgggacaagggccgggacttcgccaccgtgcggaaggtgctgtccatgccccaggtgaacatcgtgaagaagaccgaggtgcagaccggcggcttctccaaggagtccatcctgcccaagcggaactccgacaagctgatcgcccggaagaaggactgggaccccaagaagtacggcggcttcgactcccccaccgtggcctactccgtgctggtggtggccaaggtggagaagggcaagtccaagaagctgaagtccgtgaaggagctgctgggcatcaccatcatggagcggtcctccttcgagaagaaccccatcgacttcctggaggccaagggctacaaggaggtgaagaaggacctgatcatcaagctgcccaagtactccctgttcgagctggagaacggccggaagcggatgctggcctccgccggcgagctgcagaagggcaacgagctggccctgccctccaagtacgtgaacttcctgtacctggcctcccactacgagaagctgaagggctcccccgaggacaacgagcagaagcagctgttcgtggagcagcacaagcactacctggacgagatcatcgagcagatctccgagttctccaagcgggtgatcctggccgacgccaacctggacaaggtgctgtccgcctacaacaagcaccgggacaagcccatccgggagcaggccgagaacatcatccacctgttcaccctgaccaacctgggcgcccccgccgccttcaagtacttcgacaccaccatcgaccggaagcggtacacctccaccaaggaggtgctggacgccaccctgatccaccagtccatcaccggcctgtacgagacccggatcgacctgtcccagctgggcggcgacggcgcccccgagtccgccaccgagtccggcggcacctccaccgagtccgagggctccgccggcacctccaccgagtccgagggctccgccggctccgccggctccacctccggctcctcctccggcatgaagatcgccgtggtggacaaggccctgaacaacacccggtacgacaagcacttccagctgtacggcgaggaggtggacgtgttccacatgtgcaacgagaagctgtccggccggctgctgaagaagcacatcaccatcggcacccccgagaaccccttcgaccccaacgactacgacttcgtgatcctggtgggcgccgagcccttcctgtacttcgccggcaagaagggcatcggcgactacaccggcaagcgggtggagtacaacggctacgccaactggatcgcctccatctcccccgcccagctgcacttcaagcccgagatgaagcccgtgttcgacgccaccgtggagaacatccacgacatcatcaacggccgggagaagatcgccaaggccggcgactaccggcccatcaccgaccccgacgaggccgaggagtacatcaagatggtgtacaacatggtgatcggccccgtggccttcgcctccgccacctccgccctgtactgccgggacggctacctgctgggcgtgtccatctcccaccaggagtaccagggcgtgtacatcgactccgactgcctgaccgaggtggccgtgtactacctgcagaagatcctggactccgagaaccacaccatcgtgttccacaacctgaagttcgacatgcacttctacaagtaccacctgggcctgaccttcgacaaggcccacaaggagcggcggctgcacgacaccatgctgcagcactacgtgctggacgagcggcggggcacccacggcctgaagtccctggccatgaagtacaccgacatgggcgactacgacttcgagctggacaagttcaaggacgactactgcaaggcccacaagatcaagaaggaggacttcacctacgacctgatccccttcgacatcatgtggccctacgccgccaaggacaccgacgccaccatccggctgcacaacttcttcctgcccaagatcgagaagaacgagaagctgtgctccctgtactacgacgtgctgatgcccggctgcgtgttcctgcagcgggtggaggaccggggcgtgcccatctccatcgaccggctgaaggaggcccagtaccagctgacccacaacctgaacaaggcccgggagaagctgtacacctaccccgaggtgaagcagctggagcaggaccagaacgaggccttcaaccccaactccgtgaagcagctgcgggtgctgctgttcgactacgtgggcctgacccccaccggcaagctgaccgacaccggcgccgactccaccgacgccgaggccctgaacgagctggccacccagcaccccatcgccaagaccctgctggagatccggaagctgaccaagctgatctccacctacgtggagaagatcctgctgtccatcgacgccgacggctgcatccggaccggcttccacgagcacatgaccacctccggccggctgtcctcctccggcaagctgaacctgcagcagctgccccgggacgagtccatcatcaagggctgcgtggtggccccccccggctaccgggtgatcgcctgggacctgaccaccgccgaggtgtactacgccgccgtgctgtccggcgaccggaacatgcagcaggtgttcatcaacatgcggaacgagcccgacaagtaccccgacttccactccaacatcgcccacatggtgttcaagctgcagtgcgagccccgggacgtgaagaagctgttccccgccctgcggcaggccgccaaggccatcaccttcggcatcctgtacggctccggccccgccaaggtggcccactccgtgaacgaggccctgctggagcaggccgccaagaccggcgagcccttcgtggagtgcaccgtggccgacgccaaggagtacatcgagacctacttcggccagttcccccagctgaagcggtggatcgacaagtgccacgaccagatcaagaaccacggcttcatctactcccacttcggccggaagcggcggctgcacaacatccactccgaggaccggggcgtgcagggcgaggagatccggtccggcttcaacgccatcatccagtccgcctcctccgactccctgctgctgggcgccgtggacgccgacaacgagatcatctccctgggcctggagcaggagatgaagatcgtgatgctggtgcacgactccgtggtggccatcgtgcgggaggacctgatcgaccagtacaacgagatcctgatccggaacatccagaaggaccggggcatctccatccccggctgccccatcggcatcgactccgactccgaggccggcggctcccgggactactcctgcggcaagatgaagaagcagcacccctccatcgcctgcatcgacgacgacgagtacacccggtacgtgaagggcgtgctgctggacgccgagttcgagtacaagaagctggccgccatggacaaggagcaccccgaccactccaagtacaaggacgacaagttcatcgccgtgtgcaaggacctggacaacgtgaagcggatcctgggcgccggcggcggctccggcaagcggaccgccgacggctccggcggcggctcccccaagaagaagcggaaggtgtccgagtccgccacccccgagtccaagatcgccgccctgaaggagaagatcgccgccctgaaggagaagaacgccgccctgaagtggaagatcgccgccctgaaggagtag

SEQ ID NO: 1544 - RNA, 1020 nt, synthetic construct
  misc_feature 1..1020: note = Synthetic
  source 1..1020: mol_type = other RNA
atggccatgcagatgcagctggaggccaacgccgacacctccgtggaggaggagtccttcggcccccagcccatctcccggctggagcagtgcggcatcaacgccaacgacgtgaagaagctggaggaggccggcttccacaccgtggaggccgtggcctacgcccccaagaaggagctgatcaacatcaagggcatctccgaggccaaggccgacaagatcctggccgaggccgccaagctggtgcccatgggcttcaccaccgccaccgagttccaccagcggcggtccgagatcatccagatcaccaccggctccaaggagctggacaagctgctgcagggcggcatcgagaccggctccatcaccgagatgttcggcgagttccggaccggcaagacccagatctgccacaccctggccgtgacctgccagctgcccatcgaccggggcggcggcgagggcaaggccatgtacatcgacaccgagggcaccttccggcccgagcggctgctggccgtggccgagcggtacggcctgtccggctccgacgtgctggacaacgtggcctacgcccgggccttcaacaccgaccaccagacccagctgctgtaccaggcctccgccatgatggtggagtcccggtacgccctgctgatcgtggactccgccaccgccctgtaccggaccgactactccggccggggcgagctgtccgcccggcagatgcacctggcccggttcctgcggatgctgctgcggctggccgacgagttcggcgtggccgtggtgatcaccaaccaggtggtggcccaggtggacggcgccgccatgttcgccgccgaccccaagaagcccatcggcggcaacatcatcgcccacgcctccaccacccggctgtacctgcggaagggccggggcgagacccggatctgcaagatctacgactccccctgcctgcccgaggccgaggccatgttcgccatcaacgccgacggcgtgggcgacgccaaggactga

SEQ ID NO: 1545 - RNA, 1257 nt, synthetic construct
  misc_feature 1..1257: note = Synthetic
  source 1..1257: mol_type = other RNA
atgagcggcaccgaggaggccatcctgggcggccgggacagccaccccgccgccggcggcggcagcgtgctgtgcttcggccagtgccagtacaccgccgaggagtaccaggccatccagaaggccctgcggcagcggctgggccccgagtacatcagcagccggatggccggcggcggccagaaggtgtgctacatcgagggccaccgggtgatcaacctggccaacgagatgttcggctacaacggctgggcccacagcatcacccagcagaacgtggacttcgtggacctgaacaacggcaagttctacgtgggcgtgtgcgccttcgtgcgggtgcagctgaaggacggcagctaccacgaggacgtgggctacggcgtgagcgagggcctgaagagcaaggccctgagcctggagaaggcccggaaggaggccgtgaccgacggcctgaagcgggccctgcggagcttcggcaacgccctgggcaactgcatcctggacaaggactacctgcggagcctgaacaagctgccccggcagctgcccctggaggtggacctgaccaaggccaagcggcaggacctggagcccagcgtggaggaggcccggtacaacagctgccggcccaacatggccctgggccacccccagctgcagcaggtgaccagccccagccggcccagccacgccgtgatccccgccgaccaggactgcagcagccggagcctgagcagcagcgccgtggagagcgaggccacccaccagcggaagctgcggcagaagcagctgcagcagcagttccgggagcggatggagaagcagcaggtgcgggtgagcacccccagcgccgagaagagcgaggccgccccccccgccccccccgtgacccacagcacccccgtgaccgtgagcgagcccctgctggagaaggacttcctggccggcgtgacccaggagctgatcaagaccctggaggacaacagcgagaagtgggccgtgacccccgacgccggcgacggcgtggtgaagcccagcagccgggccgaccccgcccagaccagcgacaccctggccctgaacaaccagatggtgacccagaaccggaccccccacagcgtgtgccaccagaagccccaggccaagagcggcagctgggacctgcagacctacagcgccgaccagcggaccaccggcaactgggagagccaccggaagagccaggacatgaagaagcggaagtacgaccccagctga

SEQ ID NO: 1546 - DNA, 192 bp, synthetic construct
  misc_feature 1..192: note = Synthetic
  source 1..192: mol_type = other DNA
atggccaccgtgaagttcaagtacaagggcgaggagaaggaggtggacatctccaagatcaagaaggtgtggcgggtgggcaagatgatctccttcacctacgacgagggcggcggcaagaccggccggggcgccgtgtccgagaaggacgcccccaaggagctgctgcagatgctggagaagcagaagaag

SEQ ID NO: 1547 - protein, 64 aa, synthetic construct
  REGION 1..64: note = Synthetic
MATVKFKYKGEEKEVDISKIKKVWRVGKMISFTYDEGGGKTGRGAVSEKDAPKELLQMLEKQKK

SEQ ID NO: 1548 - RNA, 2822 nt, synthetic construct
  misc_feature 1..2822: note = Synthetic
  source 1..2822: mol_type = other RNA
gggaagctcagaataaacgctcaactttggccggatctgccaccatgtccttcgtggccggcgtgatccggcggctggacgagaccgtggtgaaccggatcgccgccggcgaggtgatccagcggcccgccaacgccatcaaggagatgatcgagaactgcctggacgccaagtccacctccatccaggtgatcgtgaaggagggcggcctgaagctgatccagatccaggacaacggcaccggcatccggaaggaggacctggacatcgtgtgcgagcggttcaccacctccaagctgcagtccttcgaggacctggcctccatctccacctacggcttccggggcgaggccctggcctccatctcccacgtggcccacgtgaccatcaccaccaagaccgccgacggcaagtgcgcctaccgggcctcctactccgacggcaagctgaaggccccccccaagccctgcgccggcaaccagggcacccagatcaccgtggaggacctgttctacaacatcgccacccggcggaaggccctgaagaacccctccgaggagtacggcaagatcctggaggtggtgggccggtactccgtgcacaacgccggcatctccttctccgtgaagaagcagggcgagaccgtggccgacgtgcggaccctgcccaacgcctccaccgtggacaacatccggtccatcttcggcaacgccgtgtcccgggagctgatcgagatcggctgcgaggacaagaccctggccttcaagatgaacggctacatctccaacgccaactactccgtgaagaagtgcatcttcctgctgttcatcaaccaccggctggtggagtccacctccctgcggaaggccatcgagaccgtgtacgccgcctacctgcccaagaacacccaccccttcctgtacctgtccctggagatctccccccagaacgtggacgtgaacgtgcaccccaccaagcacgaggtgcacttcctgcacgaggagtccatcctggagcgggtgcagcagcacatcgagtccaagctgctgggctccaactcctcccggatgtacttcacccagaccctgctgcccggcctggccggcccctccggcgagatggtgaagtccaccacctccctgacctcctcctccacctccggctcctccgacaaggtgtacgcccaccagatggtgcggaccgactcccgggagcagaagctggacgccttcctgcagcccctgtccaagcccctgtcctcccagccccaggccatcgtgaccgaggacaagaccgacatctcctccggccgggcccggcagcaggacgaggagatgctggagctgcccgcccccgccgaggtggccgccaagaaccagtccctggagggcgacaccaccaagggcacctccgagatgtccgagaagcggggccccacctcctccaacccccggaagcggcaccgggaggactccgacgtggagatggtggaggacgactcccggaaggagatgaccgccgcctgcaccccccggcggcggatcatcaacctgacctccgtgctgtccctgcaggaggagatcaacgagcagggccacgaggtgctgcgggagatgctgcacaaccactccttcgtgggctgcgtgaacccccagtgggccctggcccagcaccagaccaagctgtacctgctgaacaccaccaagctgtccgaggagctgttctaccagatcctgatctacgacttcgccaacttcggcgtgctgcggctgtccgagcccgcccccctgttcgacctggccatgctggccctggactcccccgagtccggctggaccgaggaggacggccccaaggagggcctggccgagtacatcgtggagttcctgaagaagaaggccgagatgctggccgactacttctccctggagatcgacgaggagggcaacctgatcggcctgcccctgctgatcgacaactacgtgccccccctggagggcctgcccatcttcatcctgcggctggccaccgaggtgaactgggacgaggagaaggagtgcttcgagtccctgtccaaggagtgcgccatgttctactccatccggaagcagtacatctccgaggagtccaccctgtccggccagcagtccgaggtgcccggctccatccccaactcctggaagtggaccgtggagcacatcgtgtacaaggccctgcggtcccacatcctgccccccaagcacttcaccgaggacggcaacatcctgcagctggccaacctgcccgacctgtacaaggtgttctagctagcaccagcctcaagaacacccgaatggagtctctaagctacataataccaacttacactttacaaaatgttgtcccccaaaatgtagccattcgtatctgctcctaataaaaagaaagtttcttcacattctctcgagaaaaaaaaaaaatggaaaaaaaaaaaacggaaaaaaaaaaaaggtaaaaaaaaaaaatataaaaaaaaaaaacataaaaaaaaaaaacgaaaaaaaaaaaacgtaaaaaaaaaaaactcaaaaaaaaaaaagataaaaaaaaaaaacctaaaaaaaaaaaatgtaaaaaaaaaaaagggaaaaaaaaaaaacgcaaaaaaaaaaaacacaaaaaaaaaaaatgcaaaaaaaaaaaatcgaaaaaaaaaaaatctaaaaaaaaaaaacgaaaaaaaaaaaacccaaaaaaaaaaaagacaaaaaaaaaaaatagaaaaaaaaaaaagttaaaaaaaaaaaactgaaaaaaaaaaaatttaaaaaaaaaaaatctag

SEQ ID NO: 1549 - RNA, 1628 nt, synthetic construct
  misc_feature 1..1628: note = Synthetic
  source 1..1628: mol_type = other RNA
gggaagctcagaataaacgctcaactttggccggatctgccaccatgtccttcgtggccggcgtgatccggcggctggacgagaccgtggtgaaccggatcgccgccggcgaggtgatccagcggcccgccaacgccatcaaggagatgatcgagaactgcctggacgccaagtccacctccatccaggtgatcgtgaaggagggcggcctgaagctgatccagatccaggacaacggcaccggcatccggaaggaggacctggacatcgtgtgcgagcggttcaccacctccaagctgcagtccttcgaggacctggcctccatctccacctacggcttccggggcgaggccctggcctccatctcccacgtggcccacgtgaccatcaccaccaagaccgccgacggcaagtgcgcctaccgggcctcctactccgacggcaagctgaaggccccccccaagccctgcgccggcaaccagggcacccagatcaccgtggaggacctgttctacaacatcgccacccggcggaaggccctgaagaacccctccgaggagtacggcaagatcctggaggtggtgggccggtactccgtgcacaacgccggcatctccttctccgtgaagaagcagggcgagaccgtggccgacgtgcggaccctgcccaacgcctccaccgtggacaacatccggtccatcttcggcaacgccgtgtcccgggagctgatcgagatcggctgcgaggacaagaccctggccttcaagatgaacggctacatctccaacgccaactactccgtgaagaagtgcatcttcctgctgttcatcaaccaccggctggtggagtccacctccctgcggaaggccatcgagaccgtgtacgccgcctacctgcccaagaacacccaccccttcctgtacctgtccctggagatctccccccagaacgtggacgtgaacgtgcaccccaccaagcacgaggtgcacttcctgcacgaggagtccatcctggagcgggtgcagcagcacatcgagtccaagctgctgggctccaagcggaccgccgacggctccgagttcgagtcccccaagaagaagcggaaggtgtagctagcaccagcctcaagaacacccgaatggagtctctaagctacataataccaacttacactttacaaaatgttgtcccccaaaatgtagccattcgtatctgctcctaataaaaagaaagtttcttcacattctctcgagaaaaaaaaaaaatggaaaaaaaaaaaacggaaaaaaaaaaaaggtaaaaaaaaaaaatataaaaaaaaaaaacataaaaaaaaaaaacgaaaaaaaaaaaacgtaaaaaaaaaaaactcaaaaaaaaaaaagataaaaaaaaaaaacctaaaaaaaaaaaatgtaaaaaaaaaaaagggaaaaaaaaaaaacgcaaaaaaaaaaaacacaaaaaaaaaaaatgcaaaaaaaaaaaatcgaaaaaaaaaaaatctaaaaaaaaaaaacgaaaaaaaaaaaacccaaaaaaaaaaaagacaaaaaaaaaaaatagaaaaaaaaaaaagttaaaaaaaaaaaactgaaaaaaaaaaaatttaaaaaaaaaaaatctag

SEQ ID NO: 1550 - protein, 380 aa, synthetic construct; identical to SEQ ID NO: 1467
  REGION 1..380: note = Synthetic

SEQ ID NO: 1551 - protein, 401 aa, synthetic construct; identical to SEQ ID NO: 1239
  REGION 1..401: note = Synthetic

SEQ ID NO: 1552 - protein, 401 aa, synthetic construct
  REGION 1..401: note = Synthetic
MGIHGLAKLIADVAPSAIRENDIKSYFGRKVAIDASMSIYQFLIAVRQGGDVLQNEEGETTSHLMGMFYRTIRMMENGIKPVYVFDGKPPQLKSGELAKRSERRAEAEKQLQQAQEAGMEEEVEKFTKRLVKVTKQHNDECKHLLSLMGIPYLDAPSEAEASCAALAKAGKVYAAATEDMDCLTFGSPVLMRHLTASEAKKLPIQEFHLSRVLQELGLNQEQFVDLCILLGSDYCESIRGIGPKRAVDLIQKHKSIEEIVRRLDPSKYPVPENWLHKEAQQLFLEPEVLDPESVELKWSEPNEEELVKFMCGEKQFSEERIRSGVKRLSKSRQGSTQGRLDDFFKVTGSLSSAKRKEPEPKGPAKKKAKTGGAGKFRRGKSGGSKRTADGSEFEPKKKRKV

SEQ ID NO: 1553 - protein, 401 aa, synthetic construct; identical to SEQ ID NO: 1514
  REGION 1..401: note = Synthetic

SEQ ID NO: 1554 - protein, 401 aa, synthetic construct
  REGION 1..401: note = Synthetic
MGIKGLAQVLSEHAPASVKHNDIKNYFGRKVAIDASMSLYQFLIQVRSQDGQQLMNEQGETTSHLMGMFYRTLRIVDNGIKPCFVFDGKPPTLKSGELAKRVARHQKAREDQEETKEVGTAEMVDRFAKRTVKVTRQHNDEAKRLLELMGIPFVNAPCEAEAQCAALARSGKVYAAASEDMDTLCFQAPVLLRHLTFSEQRKEPISEYNIEKALNGLDMSVEQFVDLCILLGCDYCEPIRGVGPARAVELIRQYGTLDRFVKEADRSKYPIPEDWPYEDARRLFLDAEVLPGEEIELKWKSPDADGIIQFLVKEKGFNEDRVKLGINRLEKASKTIPQGRLDSFFKPVPSSPKKPVDTKSKGSAKRKRDSNKGGESKKKRSGGSKRTADGSEFEPKKKRKV

SEQ ID NO: 1555 - protein, 401 aa, synthetic construct; identical to SEQ ID NO: 1485
  REGION 1..401: note = Synthetic

SEQ ID NO: 1556 - protein, 546 aa, synthetic construct
  REGION 1..546: note = Synthetic
MGIQGLAKLIADVAPSAIRENDIKSYFGRKVAIDASMSIYQFLIAVRQGGDVLQNEEGETTSHLMGMFYRTIRMMENGIKPVYVFDGKPPQLKSGELAKRSERRAEAEKQLQQAQAAGAEQEVEKFTKRLVKVTKQHNDECKHLLSLMGIPYLDAPSEAEASCAALVKAGKVYAAATEDMDCLTFGSPVLMRHLTASEAKKLPIQEFHLSRILQELGLNQEQFVDLCILLGSDYCESIRGIGPKRAVDLIQKHKSIEEIVRRLDPNKYPVPENWLHKEAHQLFLEPEVLDPESVELKWSEPNEEELIKFMCGEKQFSEERIRSGVKRLSKSRQGSTQGRLDDFFKVTGSLSSAKRKEPEPKGSTKKKAKTGAAGKFKRGKGGGGSGGGGSPKKKRKVGGGGSGGGGSDYKDDDDKDYKDDDDKDYKDDDDKAAAMTDPRETVPPGNSGEETIGEAFAWLNRTVEAINREAVNHLPRELIFQVWQRSWRYWHDEQGMSESYTKYRYLCIIQKAVYMHVRKGCTCLGRGHGPGGWRPGPPPPPPPGLV

SEQ ID NO: 1557 - protein, 536 aa, synthetic construct
  REGION 1..536: note = Synthetic
MGIQGLAKLIADVAPSAIRENDIKSYFGRKVAIDASMSIYQFLIAVRQGGDVLQNEEGETTSHLMGMFYRTIRMMENGIKPVYVFDGKPPQLKSGELAKRSERRAEAEKQLQQAQAAGAEQEVEKFTKRLVKVTKQHNDECKHLLSLMGIPYLDAPSEAEASCAALVKAGKVYAAATEDMDCLTFGSPVLMRHLTASEAKKLPIQEFHLSRILQELGLNQEQFVDLCILLGSDYCESIRGIGPKRAVDLIQKHKSIEEIVRRLDPNKYPVPENWLHKEAHQLFLEPEVLDPESVELKWSEPNEEELIKFMCGEKQFSEERIRSGVKRLSKSRQGSTQGRLDDFFKVTGSLSSAKRKEPEPKGSTKKKAKTGAAGKFKRGKDYKDDDDKDYKDDDDKDYKDDDDKAAAMTDPRETVPPGNSGEETIGEAFAWLNRTVEAINREAVNHLPRELIFQVWQRSWRYWHDEQGMSESYTKYRYLCIIQKAVYMHVRKGCTCLGRGHGPGGWRPGPPPPPPPGLVGGGGSGGGGSPKKKRKV

SEQ ID NO: 1558 - protein, 546 aa, synthetic construct
  REGION 1..546: note = Synthetic
MGIQGLAKLIADVAPSAIRENDIKSYFGRKVAIDASMSIYQFLIAVRQGGDVLQNEEGETTSHLMGMFYRTIRMMENGIKPVYVFDGKPPQLKSGELAKRSERRAEAEKQLQQAQAAGAEQEVEKFTKRLVKVTKQHNDECKHLLSLMGIPYLDAPSEAEASCAALVKAGKVYAAATEDMDCLTFGSPVLMRHLTASEAKKLPIQEFHLSRILQELGLNQEQFVDLCILLGSDYCESIRGIGPKRAVDLIQKHKSIEEIVRRLDPSKYPVPENWLHKEAHQLFLKPEVLDPESVELKWSEPNEEELVKFMCGEKQFSEERIRSGVKRLSKSRQGSTQGRLDDFFKVTGSLSSAKRKEPEPKGSTKKKAKTGAAGKFKRGKGGGGSGGGGSPKKKRKVGGGGSGGGGSDYKDDDDKDYKDDDDKDYKDDDDKAAAMTDPRETVPPGNSGEETIGEAFAWLNRTVEAINREAVNHLPRELIFQVWQRSWRYWHDEQGMSESYTKYRYLCIIQKAVYMHVRKGCTCLGRGHGPGGWRPGPPPPPPPGLV

SEQ ID NO: 1559 - protein, 536 aa, synthetic construct
  REGION 1..536: note = Synthetic
MGIQGLAKLIADVAPSAIRENDIKSYFGRKVAIDASMSIYQFLIAVRQGGDVLQNEEGETTSHLMGMFYRTIRMMENGIKPVYVFDGKPPQLKSGELAKRSERRAEAEKQLQQAQAAGAEQEVEKFTKRLVKVTKQHNDECKHLLSLMGIPYLDAPSEAEASCAALVKAGKVYAAATEDMDCLTFGSPVLMRHLTASEAKKLPIQEFHLSRILQELGLNQEQFVDLCILLGSDYCESIRGIGPKRAVDLIQKHKSIEEIVRRLDPSKYPVPENWLHKEAHQLFLKPEVLDPESVELKWSEPNEEELVKFMCGEKQFSEERIRSGVKRLSKSRQGSTQGRLDDFFKVTGSLSSAKRKEPEPKGSTKKKAKTGAAGKFKRGKDYKDDDDKDYKDDDDKDYKDDDDKAAAMTDPRETVPPGNSGEETIGEAFAWLNRTVEAINREAVNHLPRELIFQVWQRSWRYWHDEQGMSESYTKYRYLCIIQKAVYMHVRKGCTCLGRGHGPGGWRPGPPPPPPPGLVGGGGSGGGGSPKKKRKV

SEQ ID NO: 1560 - protein, 546 aa, synthetic construct
  REGION 1..546: note = Synthetic
MGIHGLAKLIADVAPSAIRENDIKSYFGRKVAIDASMSIYQFLIAVRQGGDVLQNEEGETTSHLMGMFYRTIRMMENGIKPVYVFDGKPPQLKSGELAKRSERRAEAEKQLQQAQEAGMEEEVEKFTKRLVKVTKQHNDECKHLLSLMGIPYLDAPSEAEASCAALAKAGKVYAAATEDMDCLTFGSPVLMRHLTASEAKKLPIQEFHLSRVLQELGLNQEQFVDLCILLGSDYCESIRGIGPKRAVDLIQKHKSIEEIVRRLDPSKYPVPENWLHKEAQQLFLEPEVLDPESVELKWSEPNEEELVKFMCGEKQFSEERIRSGVKRLSKSRQGSTQGRLDDFFKVTGSLSSAKRKEPEPKGPAKKKAKTGGAGKFRRGKGGGGSGGGGSPKKKRKVGGGGSGGGGSDYKDDDDKDYKDDDDKDYKDDDDKAAAMTDPRETVPPGNSGEETIGEAFAWLNRTVEAINREAVNHLPRELIFQVWQRSWRYWHDEQGMSESYTKYRYLCIIQKAVYMHVRKGCTCLGRGHGPGGWRPGPPPPPPPGLV

SEQ ID NO: 1561 - protein, 536 aa, synthetic construct
  REGION 1..536: note = Synthetic
MGIHGLAKLIADVAPSAIRENDIKSYFGRKVAIDASMSIYQFLIAVRQGGDVLQNEEGETTSHLMGMFYRTIRMMENGIKPVYVFDGKPPQLKSGELAKRSERRAEAEKQLQQAQEAGMEEEVEKFTKRLVKVTKQHNDECKHLLSLMGIPYLDAPSEAEASCAALAKAGKVYAAATEDMDCLTFGSPVLMRHLTASEAKKLPIQEFHLSRVLQELGLNQEQFVDLCILLGSDYCESIRGIGPKRAVDLIQKHKSIEEIVRRLDPSKYPVPENWLHKEAQQLFLEPEVLDPESVELKWSEPNEEELVKFMCGEKQFSEERIRSGVKRLSKSRQGSTQGRLDDFFKVTGSLSSAKRKEPEPKGPAKKKAKTGGAGKFRRGKDYKDDDDKDYKDDDDKDYKDDDDKAAAMTDPRETVPPGNSGEETIGEAFAWLNRTVEAINREAVNHLPRELIFQVWQRSWRYWHDEQGMSESYTKYRYLCIIQKAVYMHVRKGCTCLGRGHGPGGWRPGPPPPPPPGLVGGGGSGGGGSPKKKRKV

SEQ ID NO: 1562 - protein, 547 aa, synthetic construct
  REGION 1..547: note = Synthetic
MDYKDDDDKDYKDDDDKDYKDDDDKAAAMTDPRETVPPGNSGEETIGEAFAWLNRTVEAINREAVNHLPRELIFQVWQRSWRYWHDEQGMSESYTKYRYLCIIQKAVYMHVRKGCTCLGRGHGPGGWRPGPPPPPPPGLVGGGGSGGGGSPKKKRKVGGGGSGGGGSMGIQGLAKLIADVAPSAIRENDIKSYFGRKVAIDASMSIYQFLIAVRQGGDVLQNEEGETTSHLMGMFYRTIRMMENGIKPVYVFDGKPPQLKSGELAKRSERRAEAEKQLQQAQAAGAEQEVEKFTKRLVKVTKQHNDECKHLLSLMGIPYLDAPSEAEASCAALVKAGKVYAAATEDMDCLTFGSPVLMRHLTASEAKKLPIQEFHLSRILQELGLNQEQFVDLCILLGSDYCESIRGIGPKRAVDLIQKHKSIEEIVRRLDPNKYPVPENWLHKEAHQLFLEPEVLDPESVELKWSEPNEEELIKFMCGEKQFSEERIRSGVKRLSKSRQGSTQGRLDDFFKVTGSLSSAKRKEPEPKGSTKKKAKTGAAGKFKRGK

SEQ ID NO: 1563 - protein, 557 aa, synthetic construct
  REGION 1..557: note = Synthetic
MDYKDDDDKDYKDDDDKDYKDDDDKAAAMTDPRETVPPGNSGEETIGEAFAWLNRTVEAINREAVNHLPRELIFQVWQRSWRYWHDEQGMSESYTKYRYLCIIQKAVYMHVRKGCTCLGRGHGPGGWRPGPPPPPPPGLVSGSETPGTSESATPESMGIQGLAKLIADVAPSAIRENDIKSYFGRKVAIDASMSIYQFLIAVRQGGDVLQNEEGETTSHLMGMFYRTIRMMENGIKPVYVFDGKPPQLKSGELAKRSERRAEAEKQLQQAQAAGAEQEVEKFTKRLVKVTKQHNDECKHLLSLMGIPYLDAPSEAEASCAALVKAGKVYAAATEDMDCLTFGSPVLMRHLTASEAKKLPIQEFHLSRILQELGLNQEQFVDLCILLGSDYCESIRGIGPKRAVDLIQKHKSIEEIVRRLDPNKYPVPENWLHKEAHQLFLEPEVLDPESVELKWSEPNEEELIKFMCGEKQFSEERIRSGVKRLSKSRQGSTQGRLDDFFKVTGSLSSAKRKEPEPKGSTKKKAKTGAAGKFKRGKSGGSKRTADGSEFEPKKKRKV

SEQ ID NO: 1564 - protein, 2321 aa, synthetic construct
  REGION 1..2321: note = Synthetic
MDSTKEKCDSYKDDLLLRMGLNDNKAGMEGLDKEKINKIIMEATKGSRFYGNELKKEKQVNQRIENMMQQKAQITSQQLRKAQLQVDRFAMELEQSRNLSNTIVHIDMDAFYAAVEMRDNPELKDKPIAVGSMSMLSTSNYHARRFGVRAAMPGFIAKRLCPQLIIVPPNFDKYRAVSKEVKEILADYDPNFMAMSLDEAYLNITKHLEERQNWPEDKRRYFIKMGSSVENDNPGKEVNKLSEHERSISPLLFEESPSDVQPPGDPFQVNFEEQNNPQILQNSVVFGTSAQEVVKEIRFRIEQKTTLTASAGIAPNTMLAKVCSDKNKPNGQYQILPNRQAVMDFIKDLPIRKVSGIGKVTEKMLKALGIITCTELYQQRALLSLLFSETSWHYFLHISLGLGSTHLTRDGERKSMSVERTFSEINKAEEQYSLCQELCSELAQDLQKERLKGRTVTIKLKNVNFEVKTRASTVSSVVSTAEEIFAIAKELLKTEIDADFPHPLRLRLMGVRISSFPNEEDRKHQQRSIIGFLQAGNQALSATECTLEKTDKDKFVKPLEMSHKKSFFDKKRSERKWSHQDTFKCEAVNKQSFQTSQPFQVLKKKMNENLEISENSDDCQILTCPVCFRAQGCISLEALNKHVDECLDGPSISENFKMFSCSHVSATKVNKKENVPASSLCEKQDYEAHPKIKEISSVDCIALVDTIDNSSKAESIDALSNKHSKEECSSLPSKSFNIEHCHQNSSSTVSLENEDVGSFRQEYRQPYLCEVKTGQALVCPVCNVEQKTSDLTLFNVHVDVCLNKSFIQELRKDKFNPVNQPKESSRSTGSSSGVQKAVTRTKRPGLMTKYSTSKKIKPNNPKHTLDIFFKSGGSSGGSKRTADGSEFESPKKKRKVSGGSSGGSDKKYSIGLDIGTNSVGWAVITDEYKVPSKKFKVLGNTDRHSIKKNLIGALLFDSGETAEATRLKRTARRRYTRRKNRICYLQEIFSNEMAKVDDSFFHRLEESFLVEEDKKHERHPIFGNIVDEVAYHEKYPTIYHLRKKLVDSTDKADLRLIYLALAHMIKFRGHFLIEGDLNPDNSDVDKLFIQLVQTYNQLFEENPINASGVDAKAILSARLSKSRRLENLIAQLPGEKKNGLFGNLIALSLGLTPNFKSNFDLAEDAKLQLSKDTYDDDLDNLLAQIGDQYADLFLAAKNLSDAILLSDILRVNTEITKAPLSASMIKRYDEHHQDLTLLKALVRQQLPEKYKEIFFDQSKNGYAGYIDGGASQEEFYKFIKPILEKMDGTEELLVKLNREDLLRKQRTFDNGSIPHQIHLGELHAILRRQEDFYPFLKDNREKIEKILTFRIPYYVGPLARGNSRFAWMTRKSEETITPWNFEEVVDKGASAQSFIERMTNFDKNLPNEKVLPKHSLLYEYFTVYNELTKVKYVTEGMRKPAFLSGEQKKAIVDLLFKTNRKVTVKQLKEDYFKKIECFDSVEISGVEDRFNASLGTYHDLLKIIKDKDFLDNEENEDILEDIVLTLTLFEDREMIEERLKTYAHLFDDKVMKQLKRRRYTGWGRLSRKLINGIRDKQSGKTILDFLKSDGFANRNFMQLIHDDSLTFKEDIQKAQVSGQGDSLHEHIANLAGSPAIKKGILQTVKVVDELVKVMGRHKPENIVIEMARENQTTQKGQKNSRERMKRIEEGIKELGSQILKEHPVENTQLQNEKLYLYYLQNGRDMYVDQELDINRLSDYDVDAIVPQSFLKDDSIDNKVLTRSDKNRGKSDNVPSEEVVKKMKNYWRQLLNAKLITQRKFDNLTKAERGGLSELDKAGFIKRQLVETRQITKHVAQILDSRMNTKYDENDKLIREVKVITLKSKLVSDFRKDFQFYKVREINNYHHAHDAYLNAVVGTALIKKYPKLESEFVYGDYKVYDVRKMIAKSEQEIGKATAKYFFYSNIMNFFKTEITLANGEIRKRPLIETNGETGEIVWDKGRDFATVRKVLSMPQVNIVKKTEVQTGGFSKESILPKRNSDKLIARKKDWDPKKYGGFDSPTVAYSVLVVAKVEKGKSKKLKSVKELLGITIMERSSFEKNPIDFLEAKGYKEVKKDLIIKLPKYSLFELENGRKRMLASAGELQKGNELALPSKYVNFLYLASHYEKLKGSPEDNEQKQLFVEQHKHYLDEIIEQISEFSKRVILADANLDKVLSAYNKHRDKPIREQAENIIHLFTLTNLGAPAAFKYFDTTIDRKRYTSTKEVLDATLIHQSITGLYETRIDLSQLGGDSGGSKRTADGSEFESPKKKRKVEIAALEKEIAALEKENAALEWEIAALEK

SEQ ID NO: 1565 - protein, 437 aa, synthetic construct
  REGION 1..437: note = Synthetic
MGIQGLAKLIADVAPSAIRENDIKSYFGRKVAIDASMSIYQFLIAVRQGGDVLQNEEGETTSHLMGMFYRTIRMMENGIKPVYVFDGKPPQLKSGELAKRSERRAEAEKQLQQAQAAGAEQEVEKFTKRLVKVTKQHNDECKHLLSLMGIPYLDAPSEAEASCAALVKAGKVYAAATEDMDCLTFGSPVLMRHLTASEAKKLPIQEFHLSRILQELGLNQEQFVDLCILLGSDYCESIRGIGPKRAVDLIQKHKSIEEIVRRLDPNKYPVPENWLHKEAHQLFLEPEVLDPESVELKWSEPNEEELIKFMCGEKQFSEERIRSGVKRLSKSRQGSTQGRLDDFFKVTGSLSSAKRKEPEPKGSTKKKAKTGAAGKFKRGKSGGSKRTADGSEFEPKKKRKVSESATPESKIAALKEKIAALKEKNAALKWKIAALKE

SEQ ID NO: 1566 - protein, 2321 aa, synthetic construct
  REGION 1..2321: note = Synthetic
MDSTKEKCDSYKDDLLLRMGLNDNKAGMEGLDKEKINKIIMEATKGSRFYGNELKKEKQVNQRIENMMQQKAQITSQQLRKAQLQVDRFAMELEQSRNLSNTIVHIDMDAFYAAVEMRDNPELKDKPIAVGSMSMLSTSNYHARRFGVRAAMPGFIAKRLCPQLIIVPPNFDKYRAVSKEVKEILADYDPNFMAMSLDEAYLNITKHLEERQNWPEDKRRYFIKMGSSVENDNPGKEVNKLSEHERSISPLLFEESPSDVQPPGDPFQVNFEEQNNPQILQNSVVFGTSAQEVVKEIRFRIEQKTTLTASAGIAPNTMLAKVCSDKNKPNGQYQILPNRQAVMDFIKDLPIRKVSGIGKVTEKMLKALGIITCTELYQQRALLSLLFSETSWHYFLHISLGLGSTHLTRDGERKSMSVERTFSEINKAEEQYSLCQELCSELAQDLQKERLKGRTVTIKLKNVNFEVKTRASTVSSVVSTAEEIFAIAKELLKTEIDADFPHPLRLRLMGVRISSFPNEEDRKHQQRSIIGFLQAGNQALSATECTLEKTDKDKFVKPLEMSHKKSFFDKKRSERKWSHQDTFKCEAVNKQSFQTSQPFQVLKKKMNENLEISENSDDCQILTCPVCFRAQGCISLEALNKHVDECLDGPSISENFKMFSCSHVSATKVNKKENVPASSLCEKQDYEAHPKIKEISSVDCIALVDTIDNSSKAESIDALSNKHSKEECSSLPSKSFNIEHCHQNSSSTVSLENEDVGSFRQEYRQPYLCEVKTGQALVCPVCNVEQKTSDLTLFNVHVDVCLNKSFIQELRKDKFNPVNQPKESSRSTGSSSGVQKAVTRTKRPGLMTKYSTSKKIKPNNPKHTLDIFFKSGGSSGGSKRTADGSEFESPKKKRKVSGGSSGGSDKKYSIGLDIGTNSVGWAVITDEYKVPSKKFKVLGNTDRHSIKKNLIGALLFDSGETAEATRLKRTARRRYTRRKNRICYLQEIFSNEMAKVDDSFFHRLEESFLVEEDKKHERHPIFGNIVDEVAYHEKYPTIYHLRKKLVDSTDKADLRLIYLALAHMIKFRGHFLIEGDLNPDNSDVDKLFIQLVQTYNQLFEENPINASGVDAKAILSARLSKSRRLENLIAQLPGEKKNGLFGNLIALSLGLTPNFKSNFDLAEDAKLQLSKDTYDDDLDNLLAQIGDQYADLFLAAKNLSDAILLSDILRVNTEITKAPLSASMIKRYDEHHQDLTLLKALVRQQLPEKYKEIFFDQSKNGYAGYIDGGASQEEFYKFIKPILEKMDGTEELLVKLNREDLLRKQRTFDNGSIPHQIHLGELHAILRRQEDFYPFLKDNREKIEKILTFRIPYYVGPLARGNSRFAWMTRKSEETITPWNFEEVVDKGASAQSFIERMTNFDKNLPNEKVLPKHSLLYEYFTVYNELTKVKYVTEGMRKPAFLSGEQKKAIVDLLFKTNRKVTVKQLKEDYFKKIECFDSVEISGVEDRFNASLGTYHDLLKIIKDKDFLDNEENEDILEDIVLTLTLFEDREMIEERLKTYAHLFDDKVMKQLKRRRYTGWGRLSRKLINGIRDKQSGKTILDFLKSDGFANRNFMQLIHDDSLTFKEDIQKAQVSGQGDSLHEHIANLAGSPAIKKGILQTVKVVDELVKVMGRHKPENIVIEMARENQTTQKGQKNSRERMKRIEEGIKELGSQILKEHPVENTQLQNEKLYLYYLQNGRDMYVDQELDINRLSDYDVDAIVPQSFLKDDSIDNKVLTRSDKNRGKSDNVPSEEVVKKMKNYWRQLLNAKLITQRKFDNLTKAERGGLSELDKAGFIKRQLVETRQITKHVAQILDSRMNTKYDENDKLIREVKVITLKSKLVSDFRKDFQFYKVREINNYHHAHDAYLNAVVGTALIKKYPKLESEFVYGDYKVYDVRKMIAKSEQEIGKATAKYFFYSNIMNFFKTEITLANGEIRKRPLIETNGETGEIVWDKGRDFATVRKVLSMPQVNIVKKTEVQTGGFSKESILPKRNSDKLIARKKDWDPKKYGGFDSPTVAYSVLVVAKVEKGKSKKLKSVKELLGITIMERSSFEKNPIDFLEAKGYKEVKKDLIIKLPKYSLFELENGRKRMLASAGELQKGNELALPSKYVNFLYLASHYEKLKGSPEDNEQKQLFVEQHKHYLDEIIEQISEFSKRVILADANLDKVLSAYNKHRDKPIREQAENIIHLFTLTNLGAPAAFKYFDTTIDRKRYTSTKEVLDATLIHQSITGLYETRIDLSQLGGDSGGSKRTADGSEFESPKKKRKVKIAALKEKIAALKEKNAALKWKIAALKE

SEQ ID NO: 1567 - protein, 437 aa, synthetic construct
  REGION 1..437: note = Synthetic
MGIQGLAKLIADVAPSAIRENDIKSYFGRKVAIDASMSIYQFLIAVRQGGDVLQNEEGETTSHLMGMFYRTIRMMENGIKPVYVFDGKPPQLKSGELAKRSERRAEAEKQLQQAQAAGAEQEVEKFTKRLVKVTKQHNDECKHLLSLMGIPYLDAPSEAEASCAALVKAGKVYAAATEDMDCLTFGSPVLMRHLTASEAKKLPIQEFHLSRILQELGLNQEQFVDLCILLGSDYCESIRGIGPKRAVDLIQKHKSIEEIVRRLDPNKYPVPENWLHKEAHQLFLEPEVLDPESVELKWSEPNEEELIKFMCGEKQFSEERIRSGVKRLSKSRQGSTQGRLDDFFKVTGSLSSAKRKEPEPKGSTKKKAKTGAAGKFKRGKSGGSKRTADGSEFEPKKKRKVSESATPESEIAALEKEIAALEKENAALEWEIAALEK

SEQ ID NO: 1568 - protein, 2323 aa, synthetic construct
  REGION 1..2323: note = Synthetic
MDKKYSIGLDIGTNSVGWAVITDEYKVPSKKFKVLGNTDRHSIKKNLIGALLFDSGETAEATRLKRTARRRYTRRKNRICYLQEIFSNEMAKVDDSFFHRLEESFLVEEDKKHERHPIFGNIVDEVAYHEKYPTIYHLRKKLVDSTDKADLRLIYLALAHMIKFRGHFLIEGDLNPDNSDVDKLFIQLVQTYNQLFEENPINASGVDAKAILSARLSKSRRLENLIAQLPGEKKNGLFGNLIALSLGLTPNFKSNFDLAEDAKLQLSKDTYDDDLDNLLAQIGDQYADLFLAAKNLSDAILLSDILRVNTEITKAPLSASMIKRYDEHHQDLTLLKALVRQQLPEKYKEIFFDQSKNGYAGYIDGGASQEEFYKFIKPILEKMDGTEELLVKLNREDLLRKQRTFDNGSIPHQIHLGELHAILRRQEDFYPFLKDNREKIEKILTFRIPYYVGPLARGNSRFAWMTRKSEETITPWNFEEVVDKGASAQSFIERMTNFDKNLPNEKVLPKHSLLYEYFTVYNELTKVKYVTEGMRKPAFLSGEQKKAIVDLLFKTNRKVTVKQLKEDYFKKIECFDSVEISGVEDRFNASLGTYHDLLKIIKDKDFLDNEENEDILEDIVLTLTLFEDREMIEERLKTYAHLFDDKVMKQLKRRRYTGWGRLSRKLINGIRDKQSGKTILDFLKSDGFANRNFMQLIHDDSLTFKEDIQKAQVSGQGDSLHEHIANLAGSPAIKKGILQTVKVVDELVKVMGRHKPENIVIEMARENQTTQKGQKNSRERMKRIEEGIKELGSQILKEHPVENTQLQNEKLYLYYLQNGRDMYVDQELDINRLSDYDVDAIVPQSFLKDDSIDNKVLTRSDKNRGKSDNVPSEEVVKKMKNYWRQLLNAKLITQRKFDNLTKAERGGLSELDKAGFIKRQLVETRQITKHVAQILDSRMNTKYDENDKLIREVKVITLKSKLVSDFRKDFQFYKVREINNYHHAHDAYLNAVVGTALIKKYPKLESEFVYGDYKVYDVRKMIAKSEQEIGKATAKYFFYSNIMNFFKTEITLANGEIRKRPLIETNGETGEIVWDKGRDFATVRKVLSMPQVNIVKKTEVQTGGFSKESILPKRNSDKLIARKKDWDPKKYGGFDSPTVAYSVLVVAKVEKGKSKKLKSVKELLGITIMERSSFEKNPIDFLEAKGYKEVKKDLIIKLPKYSLFELENGRKRMLASAGELQKGNELALPSKYVNFLYLASHYEKLKGSPEDNEQKQLFVEQHKHYLDEIIEQISEFSKRVILADANLDKVLSAYNKHRDKPIREQAENIIHLFTLTNLGAPAAFKYFDTTIDRKRYTSTKEVLDATLIHQSITGLYETRIDLSQLGGDGAPESATESGGTSTESEGSAGTSTESEGSAGSAGSTSGSSSGMKIAVVDKALNNTRYDKHFQLYGEEVDVFHMCNEKLSGRLLKKHITIGTPENPFDPNDYDFVILVGAEPFLYFAGKKGIGDYTGKRVEYNGYANWIASISPAQLHFKPEMKPVFDATVENIHDIINGREKIAKAGDYRPITDPDEAEEYIKMVYNMVIGPVAFASATSALYCRDGYLLGVSISHQEYQGVYIDSDCLTEVAVYYLQKILDSENHTIVFHNLKFDMHFYKYHLGLTFDKAHKERRLHDTMLQHYVLDERRGTHGLKSLAMKYTDMGDYDFELDKFKDDYCKAHKIKKEDFTYDLIPFDIMWPYAAKDTDATIRLHNFFLPKIEKNEKLCSLYYDVLMPGCVFLQRVEDRGVPISIDRLKEAQYQLTHNLNKAREKLYTYPEVKQLEQDQNEAFNPNSVKQLRVLLFDYVGLTPTGKLTDTGADSTDAEALNELATQHPIAKTLLEIRKLTKLISTYVEKILLSIDADGCIRTGFHEHMTTSGRLSSSGKLNLQQLPRDESIIKGCVVAPPGYRVIAWDLTTAEVYYAAVLSGDRNMQQVFINMRNEPDKYPDFHSNIAHMVFKLQCEPRDVKKLFPALRQAAKAITFGILYGSGPAKVAHSVNEALLEQAAKTGEPFVECTVADAKEYIETYFGQFPQLKRWIDKCHDQIKNHGFIYSHFGRKRRLHNIHSEDRGVQGEEIRSGFNAIIQSASSDSLLLGAVDADNEIISLGLEQEMKIVMLVHDSVVAIVREDLIDQYNEILIRNIQKDRGISIPGCPIGIDSDSEAGGSRDYSCGKMKKQHPSIACIDDDEYTRYVKGVLLDAEFEYKKLAAMDKEHPDHSKYKDDKFIAVCKDLDNVKRILGAGGGSGKRTADGSGGGSPKKKRKVSESATPESIAALEKEIAALEKENAALEWEIAALEK

SEQ ID NO: 1569 - protein, 2324 aa, synthetic construct
  REGION 1..2324: note = Synthetic
MDKKYSIGLDIGTNSVGWAVITDEYKVPSKKFKVLGNTDRHSIKKNLIGALLFDSGETAEATRLKRTARRRYTRRKNRICYLQEIFSNEMAKVDDSFFHRLEESFLVEEDKKHERHPIFGNIVDEVAYHEKYPTIYHLRKKLVDSTDKADLRLIYLALAHMIKFRGHFLIEGDLNPDNSDVDKLFIQLVQTYNQLFEENPINASGVDAKAILSARLSKSRRLENLIAQLPGEKKNGLFGNLIALSLGLTPNFKSNFDLAEDAKLQLSKDTYDDDLDNLLAQIGDQYADLFLAAKNLSDAILLSDILRVNTEITKAPLSASMIKRYDEHHQDLTLLKALVRQQLPEKYKEIFFDQSKNGYAGYIDGGASQEEFYKFIKPILEKMDGTEELLVKLNREDLLRKQRTFDNGSIPHQIHLGELHAILRRQEDFYPFLKDNREKIEKILTFRIPYYVGPLARGNSRFAWMTRKSEETITPWNFEEVVDKGASAQSFIERMTNFDKNLPNEKVLPKHSLLYEYFTVYNELTKVKYVTEGMRKPAFLSGEQKKAIVDLLFKTNRKVTVKQLKEDYFKKIECFDSVEISGVEDRFNASLGTYHDLLKIIKDKDFLDNEENEDILEDIVLTLTLFEDREMIEERLKTYAHLFDDKVMKQLKRRRYTGWGRLSRKLINGIRDKQSGKTILDFLKSDGFANRNFMQLIHDDSLTFKEDIQKAQVSGQGDSLHEHIANLAGSPAIKKGILQTVKVVDELVKVMGRHKPENIVIEMARENQTTQKGQKNSRERMKRIEEGIKELGSQILKEHPVENTQLQNEKLYLYYLQNGRDMYVDQELDINRLSDYDVDAIVPQSFLKDDSIDNKVLTRSDKNRGKSDNVPSEEVVKKMKNYWRQLLNAKLITQRKFDNLTKAERGGLSELDKAGFIKRQLVETRQITKHVAQILDSRMNTKYDENDKLIREVKVITLKSKLVSDFRKDFQFYKVREINNYHHAHDAYLNAVVGTALIKKYPKLESEFVYGDYKVYDVRKMIAKSEQEIGKATAKYFFYSNIMNFFKTEITLANGEIRKRPLIETNGETGEIVWDKGRDFATVRKVLSMPQVNIVKKTEVQTGGFSKESILPKRNSDKLIARKKDWDPKKYGGFDSPTVAYSVLVVAKVEKGKSKKLKSVKELLGITIMERSSFEKNPIDFLEAKGYKEVKKDLIIKLPKYSLFELENGRKRMLASAGELQKGNELALPSKYVNFLYLASHYEKLKGSPEDNEQKQLFVEQHKHYLDEIIEQISEFSKRVILADANLDKVLSAYNKHRDKPIREQAENIIHLFTLTNLGAPAAFKYFDTTIDRKRYTSTKEVLDATLIHQSITGLYETRIDLSQLGGDGAPESATESGGTSTESEGSAGTSTESEGSAGSAGSTSGSSSGMKIAVVDKALNNTRYDKHFQLYGEEVDVFHMCNEKLSGRLLKKHITIGTPENPFDPNDYDFVILVGAEPFLYFAGKKGIGDYTGKRVEYNGYANWIASISPAQLHFKPEMKPVFDATVENIHDIINGREKIAKAGDYRPITDPDEAEEYIKMVYNMVIGPVAFASATSALYCRDGYLLGVSISHQEYQGVYIDSDCLTEVAVYYLQKILDSENHTIVFHNLKFDMHFYKYHLGLTFDKAHKERRLHDTMLQHYVLDERRGTHGLKSLAMKYTDMGDYDFELDKFKDDYCKAHKIKKEDFTYDLIPFDIMWPYAAKDTDATIRLHNFFLPKIEKNEKLCSLYYDVLMPGCVFLQRVEDRGVPISIDRLKEAQYQLTHNLNKAREKLYTYPEVKQLEQDQNEAFNPNSVKQLRVLLFDYVGLTPTGKLTDTGADSTDAEALNELATQHPIAKTLLEIRKLTKLISTYVEKILLSIDADGCIRTGFHEHMTTSGRLSSSGKLNLQQLPRDESIIKGCVVAPPGYRVIAWDLTTAEVYYAAVLSGDRNMQQVFINMRNEPDKYPDFHSNIAHMVFKLQCEPRDVKKLFPALRQAAKAITFGILYGSGPAKVAHSVNEALLEQAAKTGEPFVECTVADAKEYIETYFGQFPQLKRWIDKCHDQIKNHGFIYSHFGRKRRLHNIHSEDRGVQGEEIRSGFNAIIQSASSDSLLLGAVDADNEIISLGLEQEMKIVMLVHDSVVAIVREDLIDQYNEILIRNIQKDRGISIPGCPIGIDSDSEAGGSRDYSCGKMKKQHPSIACIDDDEYTRYVKGVLLDAEFEYKKLAAMDKEHPDHSKYKDDKFIAVCKDLDNVKRILGAGGGSGKRTADGSGGGSPKKKRKVSESATPESKIAALKEKIAALKEKNAALKWKIAALKE

SEQ ID NO: 1570 - protein, 339 aa, synthetic construct
  REGION 1..339: note = Synthetic
MAMQMQLEANADTSVEEESFGPQPISRLEQCGINANDVKKLEEAGFHTVEAVAYAPKKELINIKGISEAKADKILAEAAKLVPMGFTTATEFHQRRSEIIQITTGSKELDKLLQGGIETGSITEMFGEFRTGKTQICHTLAVTCQLPIDRGGGEGKAMYIDTEGTFRPERLLAVAERYGLSGSDVLDNVAYARAFNTDHQTQLLYQASAMMVESRYALLIVDSATALYRTDYSGRGELSARQMHLARFLRMLLRLADEFGVAVVITNQVVAQVDGAAMFAADPKKPIGGNIIAHASTTRLYLRKGRGETRICKIYDSPCLPEAEAMFAINADGVGDAKD

SEQ ID NO: 1571 - protein, 418 aa, synthetic construct
  REGION 1..418: note = Synthetic
MSGTEEAILGGRDSHPAAGGGSVLCFGQCQYTAEEYQAIQKALRQRLGPEYISSRMAGGGQKVCYIEGHRVINLANEMFGYNGWAHSITQQNVDFVDLNNGKFYVGVCAFVRVQLKDGSYHEDVGYGVSEGLKSKALSLEKARKEAVTDGLKRALRSFGNALGNCILDKDYLRSLNKLPRQLPLEVDLTKAKRQDLEPSVEEARYNSCRPNMALGHPQLQQVTSPSRPSHAVIPADQDCSSRSLSSSAVESEATHQRKLRQKQLQQQFRERMEKQQVRVSTPSAEKSEAAPPAPPVTHSTPVTVSEPLLEKDFLAGVTQELIKTLEDNSEKWAVTPDAGDGVVKPSSRADPAQTSDTLALNNQMVTQNRTPHSVCHQKPQAKSGSWDLQTYSADQRTTGNWESHRKSQDMKKRKYDPS

SEQ ID NO: 1572 - protein, 753 aa, synthetic construct
  REGION 1..753: note = Synthetic
MSFVAGVIRRLDETVVNRIAAGEVIQRPANAIKEMIENCLDAKSTSIQVIVKEGGLKLIQIQDNGTGIRKEDLDIVCERFTTSKLQSFEDLASISTYGFRGEALASISHVAHVTITTKTADGKCAYRASYSDGKLKAPPKPCAGNQGTQITVEDLFYNIATRRKALKNPSEEYGKILEVVGRYSVHNAGISFSVKKQGETVADVRTLPNASTVDNIRSIFGNAVSRELIEIGCEDKTLAFKMNGYISNANYSVKKCIFLLFINHRLVESTSLRKAIETVYAAYLPKNTHPFLYLSLEISPQNVDVNVHPTKHEVHFLHEESILERVQQHIESKLLGSNSSRMYFTQTLLPGLAGPSGEMVKSTTSLTSSSTSGSSDKVYAHQMVRTDSREQKLDAFLQPLSKPLSSQPQAIVTEDKTDISSGRARQQDEEMLELPAPAEVAAKNQSLEGDTTKGTSEMSEKRGPTSSNPRKRHREDSDVEMVEDDSRKEMTAACTPRRRIINLTSVLSLQEEINEQGHEVLREMLHNHSFVGCVNPQWALAQHQTKLYLLNTTKLSEELFYQILIYDFANFGVLRLSEPAPLFDLAMLALDSPESGWTEEDGPKEGLAEYIVEFLKKKAEMLADYFSLEIDEEGNLIGLPLLIDNYVPPLEGLPIFILRLATEVNWDEEKECFESLSKECAMFYSIRKQYISEESTLSGQQSEVPGSIPNSWKWTVEHIVYKALRSHILPPKHFTEDGNILQLANLPDLYKVF

SEQ ID NO: 1573 - protein, 355 aa, synthetic construct
  REGION 1..355: note = Synthetic
MSFVAGVIRRLDETVVNRIAAGEVIQRPANAIKEMIENCLDAKSTSIQVIVKEGGLKLIQIQDNGTGIRKEDLDIVCERFTTSKLQSFEDLASISTYGFRGEALASISHVAHVTITTKTADGKCAYRASYSDGKLKAPPKPCAGNQGTQITVEDLFYNIATRRKALKNPSEEYGKILEVVGRYSVHNAGISFSVKKQGETVADVRTLPNASTVDNIRSIFGNAVSRELIEIGCEDKTLAFKMNGYISNANYSVKKCIFLLFINHRLVESTSLRKAIETVYAAYLPKNTHPFLYLSLEISPQNVDVNVHPTKHEVHFLHEESILERVQQHIESKLLGSKRTADGSEFESPKKKRKV

SEQ ID NO: 1574 - RNA, 1916 nt, synthetic construct
  misc_feature 1..1916: note = Synthetic
  source 1..1916: mol_type = other RNA
gggaagctcagaataaacgctcaactttggccggatctggcgcgccaccatggatgcggtggaagcggatggagcggcggccccccctgacccccctgcggcggtcccggacccagtcctccggcggcggcctgaccatctgcccccggtgcgccctgaagctgcccaaggccacccggatctccgagcggccctgggcctccacctggcagctgaaccagcacatccaggtgtccaagaccaagaaggccaccgcctacctgaaggccccccgggagtggggccagtgcacccaccaggaccccgactggtccaagcggctgggccggggcgccttcggcatcatcgtgcccatctccgaggacctgtgcgtgaagcagttcgactcccggcgggagttcttctacgaggccatcgccaacgacctgatgcaggccacccgggagcggtaccccatgcactccggcggctcccggctgctgggcttcgtgcagccctgcatcccctgccggtccatcgtgtacccccggatgaagtgcaacctgctgcagctggactggtcccaggtgaacctgtccgtgatggccgccgagttcaccggcctgatggccgccgtgtccttcctgaaccggtactgcggcatggtgcactgcgacgtgtcccccgacaacatcctggccaccggcgacctgacccccatgaaccccggccggctggtgctgaccgacttcggctccgtggccctgcactccggctccaagtggaccaacctggtggtgacctccaacctgggcttcaagcagcactgctacgacttccgggtgccccccaagctgatctgcaagcacctgtacaagccctcctgcgtgctgttccagtgctacctgtcctccctgggcaagatgcacgcccaggtgctggaccagccctaccccatctcccccaacatgggcctgaccatcgacatgtcctccctgggctacaccctgctgacctgcctggagctgtacctggacctgcccctgaacaaccccctgaagttcctgggctccgccacccgggacggccggcccgagcccatgtactacctgggcttcatgatcccccgggtggtgatgacccagatcctgtccgccgtgtggaccatgaccctggacctgggcctggactgcaccggcaaggcccaggccatccccatgcggcaggagcaccagctggccttccagaagcagtgctacctgtacaaggccaaccagaaggccgagtccctggccaactgctccgacaagctgaactgccccatgctgaagtccctggtgcggaagctgctggagcgggacttcttcaaccacggcggccacccccacacccggggcctggtgttctgataaggtaccacgcgtgctagccaccagcctcaagaacacccgaatggagtctctaagctacataataccaacttacactttacaaaatgttgtcccccaaaatgtagccattcgtatctgctcctaataaaaagaaagtttcttcacattctctcgagaaaaaaaaaaaatggaaaaaaaaaaaacggaaaaaaaaaaaggtaaaaaaaaaaaatataaaaaaaaaaacataaaaaaaaaaaacgaaaaaaaaaaaacgtaaaaaaaaaaaactcaaaaaaaaaaagataaaaaaaaaaaacctaaaaaaaaaaaatgtaaaaaaaaaaaagggaaaaaaaaaaacgcaaaaaaaaaaaacacaaaaaaaaaaaatgcaaaaaaaaaaaatcgaaaaaaaaaaaatctaaaaaaaaaaaacgaaaaaaaaaaaacccaaaaaaaaaaaagacaaaaaaaaaaaatagaaaaaaaaaaagttaaaaaaaaaaaactgaaaaaaaaaaaatttaaaaaaaaaaaatctag

SEQ ID NO: 1575 - DNA, 1338 bp, synthetic construct
  misc_feature 1..1338: note = Synthetic
  source 1..1338: mol_type = other DNA
atgcggtggaagcggatggagcggcggccccccctgacccccctgcggcggtcccggacccagtcctccggcggcggcctgaccatctgcccccggtgcgccctgaagctgcccaaggccacccggatctccgagcggccctgggcctccacctggcagctgaaccagcacatccaggtgtccaagaccaagaaggccaccgcctacctgaaggccccccgggagtggggccagtgcacccaccaggaccccgactggtccaagcggctgggccggggcgccttcggcatcatcgtgcccatctccgaggacctgtgcgtgaagcagttcgactcccggcgggagttcttctacgaggccatcgccaacgacctgatgcaggccacccgggagcggtaccccatgcactccggcggctcccggctgctgggcttcgtgcagccctgcatcccctgccggtccatcgtgtacccccggatgaagtgcaacctgctgcagctggactggtcccaggtgaacctgtccgtgatggccgccgagttcaccggcctgatggccgccgtgtccttcctgaaccggtactgcggcatggtgcactgcgacgtgtcccccgacaacatcctggccaccggcgacctgacccccatgaaccccggccggctggtgctgaccgacttcggctccgtggccctgcactccggctccaagtggaccaacctggtggtgacctccaacctgggcttcaagcagcactgctacgacttccgggtgccccccaagctgatctgcaagcacctgtacaagccctcctgcgtgctgttccagtgctacctgtcctccctgggcaagatgcacgcccaggtgctggaccagccctaccccatctcccccaacatgggcctgaccatcgacatgtcctccctgggctacaccctgctgacctgcctggagctgtacctggacctgcccctgaacaaccccctgaagttcctgggctccgccacccgggacggccggcccgagcccatgtactacctgggcttcatgatcccccgggtggtgatgacccagatcctgtccgccgtgtggaccatgaccctggacctgggcctggactgcaccggcaaggcccaggccatccccatgcggcaggagcaccagctggccttccagaagcagtgctacctgtacaaggccaaccagaaggccgagtccctggccaactgctccgacaagctgaactgccccatgctgaagtccctggtgcggaagctgctggagcgggacttcttcaaccacggcggccacccccacacccggggcctggtgttctgataa

SEQ ID NO: 1576 - protein, 444 aa, synthetic construct
  REGION 1..444: note = Synthetic
MRWKRMERRPPLTPLRRSRTQSSGGGLTICPRCALKLPKATRISERPWASTWQLNQHIQVSKTKKATAYLKAPREWGQCTHQDPDWSKRLGRGAFGIIVPISEDLCVKQFDSRREFFYEAIANDLMQATRERYPMHSGGSRLLGFVQPCIPCRSIVYPRMKCNLLQLDWSQVNLSVMAAEFTGLMAAVSFLNRYCGMVHCDVSPDNILATGDLTPMNPGRLVLTDFGSVALHSGSKWTNLVVTSNLGFKQHCYDFRVPPKLICKHLYKPSCVLFQCYLSSLGKMHAQVLDQPYPISPNMGLTIDMSSLGYTLLTCLELYLDLPLNNPLKFLGSATRDGRPEPMYYLGFMIPRVVMTQILSAVWTMTLDLGLDCTGKAQAIPMRQEHQLAFQKQCYLYKANQKAESLANCSDKLNCPMLKSLVRKLLERDFFNHGGHPHTRGLVF

SEQ ID NO: 1577 - DNA, 1713 bp, synthetic construct
  misc_feature 1..1713: note = Synthetic
  source 1..1713: mol_type = other DNA
atggactacaaggacgacgacgacaaggactacaaggacgacgacgacaaggactacaaggacgacgacgacaaggccgccgccatgaccgacccccgggagaccgtgccccccggcaactccggcgaggagaccatcggcgaggccttcgcctggctgaaccggaccgtggaggccatcaaccgggaggccgtgaaccacctgccccgggagctgatcttccaggtgtggcagcggtcctggcggtactggcacgacgagcagggcatgtccgagtcctacaccaagtaccggtacctgtgcatcatccagaaggccgtgtacatgcacgtgcggaagggctgcacctgcctgggccggggccacggccccggcggctggcggcccggccccccccctccccccccacccggcctggtgggcagcggcgccaccaatttcagcctgctgaaacaggccggcgacgtggaagagaatcctggacctatgggcatccagggcctggccaagctgatcgccgacgtggccccctccgccatccgggagaacgacatcaagtcctacttcggccggaaggtggccatcgacgcctccatgtccatctaccagttcctgatcgccgtgcggcagggcggcgacgtgctgcagaacgaggagggcgagaccacctcccacctgatgggcatgttctaccggaccatccggatgatggagaacggcatcaagcccgtgtacgtgttcgacggcaagcccccccagctgaagtccggcgagctggccaagcggtccgagcggcgggccgaggccgagaagcagctgcagcaggcccaggccgccggcgccgagcaggaggtggagaagttcaccaagcggctggtgaaggtgaccaagcagcacaacgacgagtgcaagcacctgctgtccctgatgggcatcccctacctggacgccccctccgaggccgaggcctcctgcgccgccctggtgaaggccggcaaggtgtacgccgccgccaccgaggacatggactgcctgaccttcggctcccccgtgctgatgcggcacctgaccgcctccgaggccaagaagctgcccatccaggagttccacctgtcccggatcctgcaggagctgggcctgaaccaggagcagttcgtggacctgtgcatcctgctgggctccgactactgcgagtccatccggggcatcggccccaagcgggccgtggacctgatccagaagcacaagtccatcgaggagatcgtgcggcggctggaccccaacaagtaccccgtgcccgagaactggctgcacaaggaggcccaccagctgttcctggagcccgaggtgctggaccccgagtccgtggagctgaagtggtccgagcccaacgaggaggagctgatcaagttcatgtgcggcgagaagcagttctccgaggagcggatccggtccggcgtgaagcggctgtccaagtcccggcagggctccacccagggccggctggacgacttcttcaaggtgaccggctccctgtcctccgccaagcggaaggagcccgagcccaagggctccaccaagaagaaggccaagaccggcgccgccggcaagttcaagcggggcaagaagatcgccgccctgaaggagaagatcgccgccctgaaggagaagaacgccgccctgaagtggaagatcgccgccctgaaggagtag

SEQ ID NO: 1578 - protein, 570 aa, synthetic construct
  REGION 1..570: note = Synthetic
MDYKDDDDKDYKDDDDKDYKDDDDKAAAMTDPRETVPPGNSGEETIGEAFAWLNRTVEAINREAVNHLPRELIFQVWQRSWRYWHDEQGMSESYTKYRYLCIIQKAVYMHVRKGCTCLGRGHGPGGWRPGPPPPPPPGLVGSGATNFSLLKQAGDVEENPGPMGIQGLAKLIADVAPSAIRENDIKSYFGRKVAIDASMSIYQFLIAVRQGGDVLQNEEGETTSHLMGMFYRTIRMMENGIKPVYVFDGKPPQLKSGELAKRSERRAEAEKQLQQAQAAGAEQEVEKFTKRLVKVTKQHNDECKHLLSLMGIPYLDAPSEAEASCAALVKAGKVYAAATEDMDCLTFGSPVLMRHLTASEAKKLPIQEFHLSRILQELGLNQEQFVDLCILLGSDYCESIRGIGPKRAVDLIQKHKSIEEIVRRLDPNKYPVPENWLHKEAHQLFLEPEVLDPESVELKWSEPNEEELIKFMCGEKQFSEERIRSGVKRLSKSRQGSTQGRLDDFFKVTGSLSSAKRKEPEPKGSTKKKAKTGAAGKFKRGKKIAALKEKIAALKEKNAALKWKIAALKE

SEQ ID NO: 1579 - DNA, 1641 bp, synthetic construct
  misc_feature 1..1641: note = Synthetic
  source 1..1641: mol_type = other DNA
atggccgccgccatgaccgacccccgggagaccgtgccccccggcaactccggcgaggagaccatcggcgaggccttcgcctggctgaaccggaccgtggaggccatcaaccgggaggccgtgaaccacctgccccgggagctgatcttccaggtgtggcagcggtcctggcggtactggcacgacgagcagggcatgtccgagtcctacaccaagtaccggtacctgtgcatcatccagaaggccgtgtacatgcacgtgcggaagggctgcacctgcctgggccggggccacggccccggcggctggcggcccggccccccccctccccccccacccggcctggtgggcagcggcgccaccaatttcagcctgctgaaacaggccggcgacgtggaagagaatcctggacctatgggcatccagggcctggccaagctgatcgccgacgtggccccctccgccatccgggagaacgacatcaagtcctacttcggccggaaggtggccatcgacgcctccatgtccatctaccagttcctgatcgccgtgcggcagggcggcgacgtgctgcagaacgaggagggcgagaccacctcccacctgatgggcatgttctaccggaccatccggatgatggagaacggcatcaagcccgtgtacgtgttcgacggcaagcccccccagctgaagtccggcgagctggccaagcggtccgagcggcgggccgaggccgagaagcagctgcagcaggcccaggccgccggcgccgagcaggaggtggagaagttcaccaagcggctggtgaaggtgaccaagcagcacaacgacgagtgcaagcacctgctgtccctgatgggcatcccctacctggacgccccctccgaggccgaggcctcctgcgccgccctggtgaaggccggcaaggtgtacgccgccgccaccgaggacatggactgcctgaccttcggctcccccgtgctgatgcggcacctgaccgcctccgaggccaagaagctgcccatccaggagttccacctgtcccggatcctgcaggagctgggcctgaaccaggagcagttcgtggacctgtgcatcctgctgggctccgactactgcgagtccatccggggcatcggccccaagcgggccgtggacctgatccagaagcacaagtccatcgaggagatcgtgcggcggctggaccccaacaagtaccccgtgcccgagaactggctgcacaaggaggcccaccagctgttcctggagcccgaggtgctggaccccgagtccgtggagctgaagtggtccgagcccaacgaggaggagctgatcaagttcatgtgcggcgagaagcagttctccgaggagcggatccggtccggcgtgaagcggctgtccaagtcccggcagggctccacccagggccggctggacgacttcttcaaggtgaccggctccctgtcctccgccaagcggaaggagcccgagcccaagggctccaccaagaagaaggccaagaccggcgccgccggcaagttcaagcggggcaagaagatcgccgccctgaaggagaagatcgccgccctgaaggagaagaacgccgccctgaagtggaagatcgccgccctgaaggagtag

SEQ ID NO: 1580 - protein, 546 aa, synthetic construct
  REGION 1..546: note = Synthetic
MAAAMTDPRETVPPGNSGEETIGEAFAWLNRTVEAINREAVNHLPRELIFQVWQRSWRYWHDEQGMSESYTKYRYLCIIQKAVYMHVRKGCTCLGRGHGPGGWRPGPPPPPPPGLVGSGATNFSLLKQAGDVEENPGPMGIQGLAKLIADVAPSAIRENDIKSYFGRKVAIDASMSIYQFLIAVRQGGDVLQNEEGETTSHLMGMFYRTIRMMENGIKPVYVFDGKPPQLKSGELAKRSERRAEAEKQLQQAQAAGAEQEVEKFTKRLVKVTKQHNDECKHLLSLMGIPYLDAPSEAEASCAALVKAGKVYAAATEDMDCLTFGSPVLMRHLTASEAKKLPIQEFHLSRILQELGLNQEQFVDLCILLGSDYCESIRGIGPKRAVDLIQKHKSIEEIVRRLDPNKYPVPENWLHKEAHQLFLEPEVLDPESVELKWSEPNEEELIKFMCGEKQFSEERIRSGVKRLSKSRQGSTQGRLDDFFKVTGSLSSAKRKEPEPKGSTKKKAKTGAAGKFKRGKKIAALKEKIAALKEKNAALKWKIAALKE

SEQ ID NO: 1581 - DNA, 1710 bp, synthetic construct
  misc_feature 1..1710: note = Synthetic
  source 1..1710: mol_type = other DNA
atgggcatccagggcctggccaagctgatcgccgacgtggccccctccgccatccgggagaacgacatcaagtcctacttcggccggaaggtggccatcgacgcctccatgtccatctaccagttcctgatcgccgtgcggcagggcggcgacgtgctgcagaacgaggagggcgagaccacctcccacctgatgggcatgttctaccggaccatccggatgatggagaacggcatcaagcccgtgtacgtgttcgacggcaagcccccccagctgaagtccggcgagctggccaagcggtccgagcggcgggccgaggccgagaagcagctgcagcaggcccaggccgccggcgccgagcaggaggtggagaagttcaccaagcggctggtgaaggtgaccaagcagcacaacgacgagtgcaagcacctgctgtccctgatgggcatcccctacctggacgccccctccgaggccgaggcctcctgcgccgccctggtgaaggccggcaaggtgtacgccgccgccaccgaggacatggactgcctgaccttcggctcccccgtgctgatgcggcacctgaccgcctccgaggccaagaagctgcccatccaggagttccacctgtcccggatcctgcaggagctgggcctgaaccaggagcagttcgtggacctgtgcatcctgctgggctccgactactgcgagtccatccggggcatcggccccaagcgggccgtggacctgatccagaagcacaagtccatcgaggagatcgtgcggcggctggaccccaacaagtaccccgtgcccgagaactggctgcacaaggaggcccaccagctgttcctggagcccgaggtgctggaccccgagtccgtggagctgaagtggtccgagcccaacgaggaggagctgatcaagttcatgtgcggcgagaagcagttctccgaggagcggatccggtccggcgtgaagcggctgtccaagtcccggcagggctccacccagggccggctggacgacttcttcaaggtgaccggctccctgtcctccgccaagcggaaggagcccgagcccaagggctccaccaagaagaaggccaagaccggcgccgccggcaagttcaagcggggcaagaagatcgccgccctgaaggagaagatcgccgccctgaaggagaagaacgccgccctgaagtggaagatcgccgccctgaaggagggcagcggcgccaccaatttcagcctgctgaaacaggccggcgacgtggaagagaatcctggacctgactacaaggacgacgacgacaaggactacaaggacgacgacgacaaggactacaaggacgacgacgacaaggccgccgccatgaccgacccccgggagaccgtgccccccggcaactccggcgaggagaccatcggcgaggccttcgcctggctgaaccggaccgtggaggccatcaaccgggaggccgtgaaccacctgccccgggagctgatcttccaggtgtggcagcggtcctggcggtactggcacgacgagcagggcatgtccgagtcctacaccaagtaccggtacctgtgcatcatccagaaggccgtgtacatgcacgtgcggaagggctgcacctgcctgggccggggccacggccccggcggctggcggcccggccccccccctccccccccacccggcctggtgtag

SEQ ID NO: 1582 - protein, 569 aa, synthetic construct
  REGION 1..569: note = Synthetic
MGIQGLAKLIADVAPSAIRENDIKSYFGRKVAIDASMSIYQFLIAVRQGGDVLQNEEGETTSHLMGMFYRTIRMMENGIKPVYVFDGKPPQLKSGELAKRSERRAEAEKQLQQAQAAGAEQEVEKFTKRLVKVTKQHNDECKHLLSLMGIPYLDAPSEAEASCAALVKAGKVYAAATEDMDCLTFGSPVLMRHLTASEAKKLPIQEFHLSRILQELGLNQEQFVDLCILLGSDYCESIRGIGPKRAVDLIQKHKSIEEIVRRLDPNKYPVPENWLHKEAHQLFLEPEVLDPESVELKWSEPNEEELIKFMCGEKQFSEERIRSGVKRLSKSRQGSTQGRLDDFFKVTGSLSSAKRKEPEPKGSTKKKAKTGAAGKFKRGKKIAALKEKIAALKEKNAALKWKIAALKEGSGATNFSLLKQAGDVEENPGPDYKDDDDKDYKDDDDKDYKDDDDKAAAMTDPRETVPPGNSGEETIGEAFAWLNRTVEAINREAVNHLPRELIFQVWQRSWRYWHDEQGMSESYTKYRYLCIIQKAVYMHVRKGCTCLGRGHGPGGWRPGPPPPPPPGLV

SEQ ID NO: 1583 - DNA, 1638 bp, synthetic construct
  misc_feature 1..1638: note = Synthetic
  source 1..1638: mol_type = other DNA
atgggcatccagggcctggccaagctgatcgccgacgtggccccctccgccatccgggagaacgacatcaagtcctacttcggccggaaggtggccatcgacgcctccatgtccatctaccagttcctgatcgccgtgcggcagggcggcgacgtgctgcagaacgaggagggcgagaccacctcccacctgatgggcatgttctaccggaccatccggatgatggagaacggcatcaagcccgtgtacgtgttcgacggcaagcccccccagctgaagtccggcgagctggccaagcggtccgagcggcgggccgaggccgagaagcagctgcagcaggcccaggccgccggcgccgagcaggaggtggagaagttcaccaagcggctggtgaaggtgaccaagcagcacaacgacgagtgcaagcacctgctgtccctgatgggcatcccctacctggacgccccctccgaggccgaggcctcctgcgccgccctggtgaaggccggcaaggtgtacgccgccgccaccgaggacatggactgcctgaccttcggctcccccgtgctgatgcggcacctgaccgcctccgaggccaagaagctgcccatccaggagttccacctgtcccggatcctgcaggagctgggcctgaaccaggagcagttcgtggacctgtgcatcctgctgggctccgactactgcgagtccatccggggcatcggccccaagcgggccgtggacctgatccagaagcacaagtccatcgaggagatcgtgcggcggctggaccccaacaagtaccccgtgcccgagaactggctgcacaaggaggcccaccagctgttcctggagcccgaggtgctggaccccgagtccgtggagctgaagtggtccgagcccaacgaggaggagctgatcaagttcatgtgcggcgagaagcagttctccgaggagcggatccggtccggcgtgaagcggctgtccaagtcccggcagggctccacccagggccggctggacgacttcttcaaggtgaccggctccctgtcctccgccaagcggaaggagcccgagcccaagggctccaccaagaagaaggccaagaccggcgccgccggcaagttcaagcggggcaagaagatcgccgccctgaaggagaagatcgccgccctgaaggagaagaacgccgccctgaagtggaagatcgccgccctgaaggagggcagcggcgccaccaatttcagcctgctgaaacaggccggcgacgtggaagagaatcctggacctgccgccgccatgaccgacccccgggagaccgtgccccccggcaactccggcgaggagaccatcggcgaggccttcgcctggctgaaccggaccgtggaggccatcaaccgggaggccgtgaaccacctgccccgggagctgatcttccaggtgtggcagcggtcctggcggtactggcacgacgagcagggcatgtccgagtcctacaccaagtaccggtacctgtgcatcatccagaaggccgtgtacatgcacgtgcggaagggctgcacctgcctgggccggggccacggccccggcggctggcggcccggccccccccctccccccccacccggcctggtgtag

SEQ ID NO: 1584 - protein, 545 aa, synthetic construct
  REGION 1..545: note = Synthetic
MGIQGLAKLIADVAPSAIRENDIKSYFGRKVAIDASMSIYQFLIAVRQGGDVLQNEEGETTSHLMGMFYRTIRMMENGIKPVYVFDGKPPQLKSGELAKRSERRAEAEKQLQQAQAAGAEQEVEKFTKRLVKVTKQHNDECKHLLSLMGIPYLDAPSEAEASCAALVKAGKVYAAATEDMDCLTFGSPVLMRHLTASEAKKLPIQEFHLSRILQELGLNQEQFVDLCILLGSDYCESIRGIGPKRAVDLIQKHKSIEEIVRRLDPNKYPVPENWLHKEAHQLFLEPEVLDPESVELKWSEPNEEELIKFMCGEKQFSEERIRSGVKRLSKSRQGSTQGRLDDFFKVTGSLSSAKRKEPEPKGSTKKKAKTGAAGKFKRGKKIAALKEKIAALKEKNAALKWKIAALKEGSGATNFSLLKQAGDVEENPGPAAAMTDPRETVPPGNSGEETIGEAFAWLNRTVEAINREAVNHLPRELIFQVWQRSWRYWHDEQGMSESYTKYRYLCIIQKAVYMHVRKGCTCLGRGHGPGGWRPGPPPPPPPGLV

SEQ ID NO: 1585 - RNA, 983 nt, synthetic construct
  misc_feature 1..983: note = Synthetic
  source 1..983: mol_type = other RNA
gggaagctcagaataaacgctcaactttggccggatctgccaccatggactacaaggacgacgacgacaaggactacaaggacgacgacgacaaggactacaaggacgacgacgacaaggccgccgccatgtccgacccccgggagcggatcccccccggcaactccggcgaggagaccatcgaggaggccttcgagtggctgaaccggaccgtggagggcatcaaccgggccgccgtgaaccacctgccccgggagctgatcttccaggtgtggcagcggtcctgggagtactggcacgacgagatgggcatgtccgagtcctacaccaagtaccggtacctgtgcctgatccagaaggccctgttcatgcactgcaagaagggctgccggtgcctgggcgagggccacggcgccggcggctggcggaccggccccccccctccccccccacccggcctggcctagctagcaccagcctcaagaacacccgaatggagtctctaagctacataataccaacttacactttacaaaatgttgtcccccaaaatgtagccattcgtatctgctcctaataaaaagaaagtttcttcacattctctcgagaaaaaaaaaaaatggaaaaaaaaaaaacggaaaaaaaaaaaaggtaaaaaaaaaaaatataaaaaaaaaaaacataaaaaaaaaaaacgaaaaaaaaaaaacgtaaaaaaaaaaaactcaaaaaaaaaaaagataaaaaaaaaaaacctaaaaaaaaaaaatgtaaaaaaaaaaaagggaaaaaaaaaaaacgcaaaaaaaaaaaacacaaaaaaaaaaaatgcaaaaaaaaaaaatcgaaaaaaaaaaaatctaaaaaaaaaaaacgaaaaaaaaaaaacccaaaaaaaaaaaagacaaaaaaaaaaaatagaaaaaaaaaaaagttaaaaaaaaaaaactgaaaaaaaaaaaatttaaaaaaaaaaaatctag

SEQ ID NO: 1586-1587 - skipped (2 entries)

SEQ ID NO: 1588 - DNA, 81 bp, synthetic construct
  misc_feature 1..81: note = Synthetic
  source 1..81: mol_type = other DNA
atcgccgccctggagaaggagatcgccgccctggagaaggagaacgccgccctggagtgggagatcgccgccctggagaag

SEQ ID NO: 1589 - protein, 27 aa, synthetic construct
  REGION 1..27: note = Synthetic
IAALEKEIAALEKENAALEWEIAALEK

SEQ ID NO: 1590 - protein, 28 aa, synthetic construct
  REGION 1..28: note = Synthetic
EVSALEKEVSALEKENSALEWEVSALEK

SEQ ID NO: 1591 - protein, 28 aa, synthetic construct
  REGION 1..28: note = Synthetic
KVSALKEKVSALKEKNSALKWKVSALKE

SEQ ID NO: 1592 - DNA, 84 bp, synthetic construct
  misc_feature 1..84: note = Synthetic
  source 1..84: mol_type = other DNA
gagatcgccgccctggagaaggagatcgccgccctggagaaggagaacgccgccctggagtgggagatcgccgccctggagaag

SEQ ID NO: 1593 - protein, 28 aa, synthetic construct
  REGION 1..28: note = Synthetic
EIAALEKEIAALEKENAALEWEIAALEK

SEQ ID NO: 1594 - DNA, 84 bp, synthetic construct
  misc_feature 1..84: note = Synthetic
  source 1..84: mol_type = other DNA
aagatcgccgccctgaaggagaagatcgccgccctgaaggagaagaacgccgccctgaagtggaagatcgccgccctgaaggag

SEQ ID NO: 1595 - protein, 28 aa, synthetic construct
  REGION 1..28: note = Synthetic
KIAALKEKIAALKEKNAALKWKIAALKE

SEQ ID NO: 1596 - protein, 14 aa, synthetic construct
  REGION 1..14: note = Synthetic
SGGSKRTADGSEFE

SEQ ID NO: 1597 - protein, 16 aa, synthetic construct
  REGION 1..16: note = Synthetic
GGGSGKRTADGSGGGS

SEQ ID NO: 1598 - protein, 38 aa, synthetic construct
  REGION 1..38: note = Synthetic
GAPESATESGGTSTESEGSAGTSTESEGSAGSAGSTSG

SEQ ID NO: 1599 - protein, 42 aa, synthetic construct
  REGION 1..42: note = Synthetic
GAPESATESGGTSTESEGSAGTSTESEGSAGSAGSTSGSSSG

SEQ ID NO: 1600 - protein, 49 aa, synthetic construct
  REGION 1..49: note = Synthetic
GAPESATESGGTSTESEGSAGPKKKRKVTSTESEGSAGSAGSTSGSSSG

SEQ ID NO: 1601 - protein, 16 aa, synthetic construct
  REGION 1..16: note = Synthetic
SGSETPGTSESATPES

SEQ ID NO: 1602 - protein, 12 aa, synthetic construct
  REGION 1..12: note = Synthetic
SGSETPGTSESA

SEQ ID NO: 1603 - protein, 21 aa, synthetic construct
  REGION 1..21: note = Synthetic
SGSETPGTSESATPEGGSGGS

SEQ ID NO: 1604 - skipped

SEQ ID NO: 1605 - protein, 5 aa, synthetic construct
  REGION 1..5: note = Synthetic
GGGGS

SEQ ID NO: 1606 - protein, 5 aa, synthetic construct
  REGION 1..5: note = Synthetic
EAAAK

SEQ ID NO: 1607 - protein, 5 aa, synthetic construct
  REGION 1..5: note = Synthetic
SEGSA

SEQ ID NO: 1608 - protein, 9 aa, synthetic construct
  REGION 1..9: note = Synthetic
SEGSAGTST

SEQ ID NO: 1609 - protein, 10 aa, synthetic construct
  REGION 1..10: note = Synthetic
GGGGSGGGGS

SEQ ID NO: 1610 - protein, 10 aa, synthetic construct
  REGION 1..10: note = Synthetic
GGGGSEAAAK

SEQ ID NO: 1611 - protein, 10 aa, synthetic construct
  REGION 1..10: note = Synthetic
EAAAKGGGGS

SEQ ID NO: 1612 - protein, 10 aa, synthetic construct
  REGION 1..10: note = Synthetic
EAAAKEAAAK

SEQ ID NO: 1613 - protein, 15 aa, synthetic construct
  REGION 1..15: note = Synthetic
SEGSAGTSTESEGSA

SEQ ID NO: 1614 - protein, 15 aa, synthetic construct
  REGION 1..15: note = Synthetic
GGGGSGGGGSGGGGS

SEQ ID NO: 1615 - protein, 15 aa, synthetic construct
  REGION 1..15: note = Synthetic
GGGGSGGGGSEAAAK

SEQ ID NO: 1616 - protein, 15 aa, synthetic construct
  REGION 1..15: note = Synthetic
GGGGSEAAAKGGGGS

SEQ ID NO: 1617 - protein, 15 aa, synthetic construct
  REGION 1..15: note = Synthetic
EAAAKGGGGSEAAAK

SEQ ID NO: 1618 - protein, 15 aa, synthetic construct
  REGION 1..15: note = Synthetic
EAAAKEAAAKGGGGS

SEQ ID NO: 1619 - protein, 20 aa, synthetic construct
  REGION 1..20: note = Synthetic
SEGSAGTSTESEGSAGTSTE

SEQ ID NO: 1620 - protein, 20 aa, synthetic construct
  REGION 1..20: note = Synthetic
GGGGSGGGGSGGGGSEAAAK

SEQ ID NO: 1621 - protein, 20 aa, synthetic construct
  REGION 1..20: note = Synthetic
GGGGSGGGGSEAAAKGGGGS

SEQ ID NO: 1622 - protein, 20 aa, synthetic construct
  REGION 1..20: note = Synthetic
GGGGSEAAAKGGGGSEAAAK

SEQ ID NO: 1623 - protein, 20 aa, synthetic construct
  REGION 1..20: note = Synthetic
GGGGSEAAAKEAAAKGGGGS

SEQ ID NO: 1624 - protein, 20 aa, synthetic construct
  REGION 1..20: note = Synthetic
GGGGSEAAAKEAAAKEAAAK

SEQ ID NO: 1625 - protein, 20 aa, synthetic construct
  REGION 1..20: note = Synthetic
EAAAKGGGGSGGGGSGGGGS

SEQ ID NO: 1626 - protein, 20 aa, synthetic construct
  REGION 1..20: note = Synthetic
EAAAKGGGGSGGGGSEAAAK

SEQ ID NO: 1627 - protein, 20 aa, synthetic construct
  REGION 1..20: note = Synthetic
EAAAKGGGGSEAAAKGGGGS

SEQ ID NO: 1628 - protein, 20 aa, synthetic construct
  REGION 1..20: note = Synthetic
EAAAKGGGGSEAAAKEAAAK

SEQ ID NO: 1629 - protein, 20 aa, synthetic construct
  REGION 1..20: note = Synthetic
EAAAKEAAAKGGGGSGGGGS

SEQ ID NO: 1630 - protein, 20 aa, synthetic construct
  REGION 1..20: note = Synthetic
EAAAKEAAAKGGGGSEAAAK

SEQ ID NO: 1631 - protein, 20 aa, synthetic construct
  REGION 1..20: note = Synthetic
EAAAKEAAAKEAAAKGGGGS

SEQ ID NO: 1632 - protein, 25 aa, synthetic construct
  REGION 1..25: note = Synthetic
SEGSAGTSTESEGSAGTSTESEGSA

SEQ ID NO: 1633 - protein, 25 aa, synthetic construct
  REGION 1..25: note = Synthetic
GGGGSGGGGSGGGGSGGGGSGGGGS

SEQ ID NO: 1634 - protein, 25 aa, synthetic construct
  REGION 1..25: note = Synthetic
GGGGSGGGGSGGGGSGGGGSEAAAK

SEQ ID NO: 1635 - protein, 25 aa, synthetic construct
  REGION 1..25: note = Synthetic
GGGGSGGGGSGGGGSEAAAKGGGGS

SEQ ID NO: 1636 - protein, 25 aa, synthetic construct
  REGION 1..25: note = Synthetic
GGGGSGGGGSGGGGSEAAAKEAAAK

SEQ ID NO: 1637 - protein, 25 aa, synthetic construct
  REGION 1..25: note = Synthetic
GGGGSGGGGSEAAAKGGGGSGGGGS

SEQ ID NO: 1638 - protein, 25 aa, synthetic construct
  REGION 1..25: note = Synthetic
GGGGSGGGGSEAAAKGGGGSEAAAK

SEQ ID NO: 1639 - protein, 25 aa, synthetic construct
  REGION 1..25: note = Synthetic
GGGGSGGGGSEAAAKEAAAKGGGGS

SEQ ID NO: 1640 - protein, 25 aa, synthetic construct
  REGION 1..25: note = Synthetic
GGGGSGGGGSEAAAKEAAAKEAAAK

SEQ ID NO: 1641 - protein, 25 aa, synthetic construct
  REGION 1..25: note = Synthetic
GGGGSEAAAKGGGGSGGGGSGGGGS

SEQ ID NO: 1642 - protein, 25 aa, synthetic construct
  REGION 1..25: note = Synthetic
GGGGSEAAAKGGGGSGGGGSEAAAK

SEQ ID NO: 1643 - protein, 25 aa, synthetic construct
  REGION 1..25: note = Synthetic
GGGGSEAAAKGGGGSEAAAKGGGGS

SEQ ID NO: 1644 - protein, 25 aa, synthetic construct
  REGION 1..25: note = Synthetic
GGGGSEAAAKGGGGSEAAAKEAAAK

SEQ ID NO: 1645 - protein, 25 aa, synthetic construct
  REGION 1..25: note = Synthetic
GGGGSEAAAKEAAAKGGGGSGGGGS

SEQ ID NO: 1646 - protein, 25 aa, synthetic construct
  REGION 1..25: note = Synthetic
GGGGSEAAAKEAAAKEAAAKGGGGS

SEQ ID NO: 1647 - protein, 25 aa, synthetic construct
  REGION 1..25: note = Synthetic
GGGGSEAAAKEAAAKEAAAKEAAAK

SEQ ID NO: 1648 - protein, 25 aa, synthetic construct
  REGION 1..25: note = Synthetic
EAAAKGGGGSGGGGSGGGGSGGGGS

SEQ ID NO: 1649 - protein, 25 aa, synthetic construct
  REGION 1..25: note = Synthetic
EAAAKGGGGSGGGGSGGGGSEAAAK

SEQ ID NO: 1650 - protein, 25 aa, synthetic construct
  REGION 1..25: note = Synthetic
EAAAKGGGGSGGGGSEAAAKGGGGS

SEQ ID NO: 1651 - protein, 25 aa, synthetic construct
  REGION 1..25: note = Synthetic
EAAAKGGGGSGGGGSEAAAKEAAAK

SEQ ID NO: 1652 - protein, 25 aa, synthetic construct
  REGION 1..25: note = Synthetic
EAAAKGGGGSEAAAKGGGGSGGGGS

SEQ ID NO: 1653 - protein, 25 aa, synthetic construct
  REGION 1..25: note = Synthetic
EAAAKGGGGSEAAAKGGGGSEAAAK

SEQ ID NO: 1654 - protein, 25 aa, synthetic construct
  REGION 1..25: note = Synthetic
EAAAKGGGGSEAAAKEAAAKGGGGS

SEQ ID NO: 1655 - protein, 25 aa, synthetic construct
  REGION 1..25: note = Synthetic
EAAAKGGGGSEAAAKEAAAKEAAAK

SEQ ID NO: 1656 - protein, 25 aa, synthetic construct
  REGION 1..25: note = Synthetic
EAAAKEAAAKGGGGSEAAAKGGGGS

SEQ ID NO: 1657 - protein, 25 aa, synthetic construct
  REGION 1..25: note = Synthetic
EAAAKEAAAKGGGGSEAAAKEAAAK

SEQ ID NO: 1658 - protein, 25 aa, synthetic construct
  REGION 1..25: note = Synthetic
EAAAKEAAAKEAAAKGGGGSEAAAK

SEQ ID NO: 1659 - protein, 25 aa, synthetic construct
  REGION 1..25: note = Synthetic
EAAAKEAAAKEAAAKEAAAKGGGGS

SEQ ID NO: 1660 - protein, 25 aa, synthetic construct
  REGION 1..25: note = Synthetic
EAAAKEAAAKEAAAKEAAAKEAAAK

SEQ ID NO: 1661 - protein, 16 aa, synthetic construct
  REGION 1..16: note = Synthetic
GTKDSTKDIPETPSKD

SEQ ID NO: 1662 - protein, 16 aa, synthetic construct
  REGION 1..16: note = Synthetic
GRDVRQPEVKEEKPES

SEQ ID NO: 1663 - protein, 16 aa, synthetic construct
  REGION 1..16: note = Synthetic
EGKSSGSGSESKSTAG

SEQ ID NO: 1664 - protein, 16 aa, synthetic construct
  REGION 1..16: note = Synthetic
TPGSPAGSPTSTEEGT

SEQ ID NO: 1665 - protein, 16 aa, synthetic construct
  REGION 1..16: note = Synthetic
GSEPATSGSETPGTST

SEQ ID NO: 1666 - protein, 7 aa, synthetic construct
  REGION 1..7: note = Synthetic
KKKRKVE

SEQ ID NO: 1667 - protein, 7 aa, synthetic construct
  REGION 1..7: note = Synthetic
KKKRKVE

SEQ ID NO: 1668 - protein, 19 aa, synthetic construct
  REGION 1..19: note = Synthetic
KRTADGSEFESPKKKRKVE

SEQ ID NO: 1669 - protein, 8 aa, synthetic construct
  REGION 1..8: note = Synthetic
AAKKKKLD

SEQ ID NO: 1670 - DNA, 21 bp, synthetic construct
  misc_feature 1..21: note = Synthetic
  source 1..21: mol_type = other DNA
cccaagaagaagaggaaagtc

SEQ ID NO: 1671 - protein, 6 aa, synthetic construct
  REGION 1..6: note = Synthetic
KKKRKV

SEQ ID NO: 1672 - DNA, 233 bp, synthetic construct
  misc_feature 1..233: note = Synthetic
  source 1..233: mol_type = other DNA
tttcccatgattccttcatatttgcatatacgatacaaggctgttagagagataattggaattaatttgactgtaaacacaaagatattagtacaaaatacgtgacgtagaaagtaataatttcttgggtagtttgcagttttaaaattatgttttaaaatggactatcatatgcttaccgtaacttgaaagtatttcgatttcttggctttatatatcttgtggaaaggacg

SEQ ID NO: 1673 - DNA, 588 bp, synthetic construct
  misc_feature 1..588: note = Synthetic
  source 1..588: mol_type = other DNA
atagtaatcaattacggggtcattagttcatagcccatatatggagttccgcgttacataacttacggtaaatggcccgcctggctgaccgcccaacgacccccgcccattgacgtcaataatgacgtatgttcccatagtaacgccaatagggactttccattgacgtcaatgggtggagtatttacggtaaactgcccacttggcagtacatcaagtgtatcatatgccaagtccgccccctattgacgtcaatgacggtaaatggcccgcctggcattatgcccagtacatgaccttacgggactttcctacttggcagtacatctacgtattagtcatcgctattaccatggtgatgcggttttggcagtacaccaatgggcgtggatagcggtttgactcacggggatttccaagtctccaccccattgacgtcaatgggagtttgttttggcaccaaaatcaacgggactttccaaaatgtcgtaacaactgcgatcgcccgccccgttgacgcaaatgggcggtaggcgtgtacggtgggaggtctatataagcagagctcgtttagtgaaccgtcagatc

SEQ ID NO: 1674 - DNA, 50 bp, synthetic construct
  misc_feature 1..50: note = Synthetic
  source 1..50: mol_type = other DNA
acatttgcttctgacacaactgtgttcactagcaacctcaaacagacacc

SEQ ID NO: 1675 - DNA, 66 bp, synthetic construct
  misc_feature 1..66: note = Synthetic
  source 1..66: mol_type = other DNA
cataaaccctggcgcgctcgcggcccggcactcttctggtccccacagactcagagagaacccacc

SEQ ID NO: 1676 - DNA, 29 bp, synthetic construct
  misc_feature 1..29: note = Synthetic
  source 1..29: mol_type = other DNA
aagctcagaataaacgctcaactttggcc

SEQ ID NO: 1677 - DNA, 27 bp, synthetic construct
  misc_feature 1..27: note = Synthetic
  source 1..27: mol_type = other DNA
cagggtcctgtggacagctcaccagct

SEQ ID NO: 1678 - DNA, 61 bp, synthetic construct
  misc_feature 1..61: note = Synthetic
  source 1..61: mol_type = other DNA
tcccgcagtcggcgtccagcggctctgcttgttcgtgtgtgtgtcgttgcaggccttattc

SEQ ID NO: 1679 - DNA, 42 bp, synthetic construct
  misc_feature 1..42: note = Synthetic
  source 1..42: mol_type = other DNA
cagatcgcctggagacgccatccacgctgttttgacctccat

SEQ ID NO: 1680 - DNA, 42 bp, synthetic construct
  misc_feature 1..42: note = Synthetic
  source 1..42: mol_type = other DNA
agaagacaccgggaccgatccagcctccgcggccgggaacgg

SEQ ID NO: 1681 - DNA, 42 bp, synthetic construct
  misc_feature 1..42: note = Synthetic
  source 1..42: mol_type = other DNA
tgcattggaacgcggattccccgtgccaagagtgactcaccg

SEQ ID NO: 1682 - DNA, 132 bp, synthetic construct
  misc_feature 1..132: note = Synthetic
  source 1..132: mol_type = other DNA
gctcgctttcttgctgtccaatttctattaaaggttcctttgttccctaagtccaactactaaactgggggatattatgaagggccttgagcatctggattctgcctaataaaaaacatttattttcattgc

SEQ ID NO: 1683 - DNA, 110 bp, synthetic construct
  misc_feature 1..110: note = Synthetic
  source 1..110: mol_type = other DNA
gctggagcctcggtggccatgcttcttgccccttgggcctccccccagcccctcctccccttcctgcacccgtacccccgtggtctttgaataaagtctgagtgggcggc

SEQ ID NO: 1684 - DNA, 130 bp, synthetic construct
  misc_feature 1..130: note = Synthetic
  source 1..130: mol_type = other DNA
accagcctcaagaacacccgaatggagtctctaagctacataataccaacttacactttacaaaatgttgtcccccaaaatgtagccattcgtatctgctcctaataaaaagaaagtttcttcacattct

SEQ ID NO: 1685 - DNA, 102 bp, synthetic construct
  misc_feature 1..102: note = Synthetic
  source 1..102: mol_type = other DNA
ttgccagccatctgttgtttgcccctcccccgtgccttccttgaccctggaaggtgccactcccactgtcctttcctaataaaatgaggaaattgcatcgca

SEQ ID NO: 1686 - DNA, 93 bp, synthetic construct
  misc_feature 1..93: note = Synthetic
  source 1..93: mol_type = other DNA
gctgccttctgcggggcttgccttctggccatgcccttcttctctcccttgcacctgtacctcttggtctttgaataaagcctgagtaggaag

SEQ ID NO: 1687 - DNA, 278 bp, synthetic construct
  misc_feature 1..278: note = Synthetic
  source 1..278: mol_type = other DNA
ctggtactgcatgcacgcaatgctagctgcccctttcccgtcctgggtaccccgagtctcccccgacctcgggtcccaggtatgctcccacctccacctgccccactcaccacctctgctagttccagacacctcccaagcacgcagcaatgcagctcaaaacgcttagcctagccacacccccacgggaaacagcagtgattaacctttagcaataaacgaaagtttaactaagctatactaaccccagggttggtcaatttcgtgccagccacacc

SEQ ID NO: 1688 - DNA, 278 bp, synthetic construct
  misc_feature 1..278: note = Synthetic
  source 1..278: mol_type = other DNA
caagcacgcagcaatgcagctcaaaacgcttagcctagccacacccccacgggaaacagcagtgattaacctttagcaataaacgaaagtttaactaagctatactaaccccagggttggtcaatttcgtgccagccacaccctggtactgcatgcacgcaatgctagctgcccctttcccgtcctgggtaccccgagtctcccccgacctcgggtcccaggtatgctcccacctccacctgccccactcaccacctctgctagttccagacacctcc

SEQ ID NO: 1689 - DNA, 260 bp, synthetic construct
  misc_feature 1..260: note = Synthetic
  source 1..260: mol_type = other DNA
accagcctcaagaacacccgaatggagtctctaagctacataataccaacttacactttacaaaatgttgtcccccaaaatgtagccattcgtatctgctcctaataaaaagaaagtttcttcacattctaccagcctcaagaacacccgaatggagtctctaagctacataataccaacttacactttacaaaatgttgtcccccaaaatgtagccattcgtatctgctcctaataaaaagaaagtttcttcacattct

SEQ ID NO: 1690 - RNA, 10 nt, synthetic construct
  misc_feature 1..10: note = Synthetic
  source 1..10: mol_type = other RNA
gccrccatgg

SEQ ID NO: 1691 - RNA, 13 nt, synthetic construct
  misc_feature 1..13: note = Synthetic
  source 1..13: mol_type = other RNA
gccgccrccatgg

SEQ ID NO: 1692 - DNA, 105 bp, synthetic construct
  misc_feature 1..105: note = Synthetic
  source 1..105: mol_type = other DNA
aaaaaaaaaaaaaaaaaaaaaaaaaaaaaagcgaaaaaaaaaaaaaaaaaaaaaaaaaaaaaaccgaaaaaaaaaaaaaaaaaaaaaaaaaaaaaaaaaaaaaaa

SEQ ID NO: 1693 - DNA, 365 bp, synthetic construct
  misc_feature 1..365: note = Synthetic
  source 1..365: mol_type = other DNA
aaaaaaaaaaaatggaaaaaaaaaaaacggaaaaaaaaaaaggtaaaaaaaaaaaatataaaaaaaaaaacataaaaaaaaaaaacgaaaaaaaaaaaacgtaaaaaaaaaaaactcaaaaaaaaaaagataaaaaaaaaaaacctaaaaaaaaaaaatgtaaaaaaaaaaaagggaaaaaaaaaaacgcaaaaaaaaaaaacacaaaaaaaaaaaatgcaaaaaaaaaaaatcgaaaaaaaaaaaatctaaaaaaaaaaaacgaaaaaaaaaaaacccaaaaaaaaaaaagacaaaaaaaaaaaatagaaaaaaaaaaagttaaaaaaaaaaaactgaaaaaaaaaaaatttaaaaaaaaaaaa

SEQ ID NO: 1694 - protein, 9 aa, synthetic construct
  REGION 1..9: note = Synthetic
LAAKRSRTT

SEQ ID NO: 1695 - protein, 9 aa, synthetic construct
  REGION 1..9: note = Synthetic
QAAKRSRTT

SEQ ID NO: 1696 - protein, 9 aa, synthetic construct
  REGION 1..9: note = Synthetic
APAKRERTT

SEQ ID NO: 1697 - protein, 9 aa, synthetic construct
  REGION 1..9: note = Synthetic
QAAKRPRTT

SEQ ID NO: 1698 - protein, 9 aa, synthetic construct
  REGION 1..9: note = Synthetic
RAAKRPRTT

SEQ ID NO: 1699 - protein, 11 aa, synthetic construct
  REGION 1..11: note = Synthetic
AAAKRSWSMAA

SEQ ID NO: 1700 - protein, 11 aa, synthetic construct
  REGION 1..11: note = Synthetic
AAAKRVWSMAF

SEQ ID NO: 1701 - protein, 11 aa, synthetic construct
  REGION 1..11: note = Synthetic
AAAKRSWSMAF

SEQ ID NO: 1702 - protein, 10 aa, synthetic construct
  REGION 1..10: note = Synthetic
AAAKRKYFAA

SEQ ID NO: 1703 - protein, 10 aa, synthetic construct
  REGION 1..10: note = Synthetic
RAAKRKAFAA

SEQ ID NO: 1704 - protein, 10 aa, synthetic construct
  REGION 1..10: note = Synthetic
RAAKRKYFAV

SEQ ID NO: 1705 - protein, 6 aa, synthetic construct
  REGION 1..6: note = Synthetic
KKKRRV

SEQ ID NO: 1706 - protein, 16 aa, synthetic construct
  REGION 1..16: note = Synthetic
KRPAATKKAGQAKKKK

SEQ ID NO: 1707 - DNA, 21 bp, synthetic construct
  misc_feature 1..21: note = Synthetic
  source 1..21: mol_type = other DNA
ccgaagaagaagagaaaggtc

SEQ ID NO: 1708 - DNA, 27 bp, synthetic construct
  misc_feature 1..27: note = Synthetic
  source 1..27: mol_type = other DNA
ctggcagcaaagagaagcagaacaaca

SEQ ID NO: 1709 - DNA, 27 bp, synthetic construct
  misc_feature 1..27: note = Synthetic
  source 1..27: mol_type = other DNA
caggcagcaaagagaagcagaacaaca

SEQ ID NO: 1710 - DNA, 30 bp, synthetic construct
  misc_feature 1..30: note = Synthetic
  source 1..30: mol_type = other DNA
ccggcaccggcaaagagagaaagaacaaca

SEQ ID NO: 1711 - DNA, 27 bp, synthetic construct
  misc_feature 1..27: note = Synthetic
  source 1..27: mol_type = other DNA
caggcagcaaagagaccgagaacaaca

SEQ ID NO: 1712 - DNA, 27 bp, synthetic construct
  misc_feature 1..27: note = Synthetic
  source 1..27: mol_type = other DNA
agagcagcaaagagaccgagaacaaca

SEQ ID NO: 1713 - DNA, 33 bp, synthetic construct
  misc_feature 1..33: note = Synthetic
  source 1..33: mol_type = other DNA
gcagcagcaaagagaagctggagcatggcagca

SEQ ID NO: 1714 - DNA, 33 bp, synthetic construct
  misc_feature 1..33: note = Synthetic
  source 1..33: mol_type = other DNA
gcagcagcaaagagagtctggagcatggcattc

SEQ ID NO: 1715 - DNA, 33 bp, synthetic construct
  misc_feature 1..33: note = Synthetic
  source 1..33: mol_type = other DNA
gcagcagcaaagagaagctggagcatggcattc

SEQ ID NO: 1716 - DNA, 30 bp, synthetic construct
  misc_feature 1..30: note = Synthetic
  source 1..30: mol_type = other DNA
gcagcagcaaagagaaagtacttcgcagca

SEQ ID NO: 1717 - DNA, 30 bp, synthetic construct
  misc_feature 1..30: note = Synthetic
  source 1..30: mol_type = other DNA
agagcagcaaagagaaaggcattcgcagca

SEQ ID NO: 1718 - DNA, 30 bp, synthetic construct
  misc_feature 1..30: note = Synthetic
  source 1..30: mol_type = other DNA
agagcagcaaagagaaagtacttcgcagtc

SEQ ID NO: 1719 - DNA, 21 bp, synthetic construct
  misc_feature 1..21: note = Synthetic
  source 1..21: mol_type = other DNA
ccgaagaagaagagaagagtc

SEQ ID NO: 1720 - DNA, 35 bp, synthetic construct
  misc_feature 1..35: note = Synthetic
  source 1..35: mol_type = other DNA
aagctcagaataaacgctcaactttggccggatct

SEQ ID NO: 1721 - DNA, 40 bp, synthetic construct
  misc_feature 1..40: note = Synthetic
  source 1..40: mol_type = other DNA
actcactatttgttttcgcgcccagttgcaaaaagtgtcg

SEQ ID NO: 1722 - DNA, 39 bp, synthetic construct
  misc_feature 1..39: note = Synthetic
  source 1..39: mol_type = other DNA
tgttcaaccagagtgaaaccactaacgggtcagagcccc

SEQ ID NO: 1723 - DNA, 50 bp, synthetic construct
  misc_feature 1..50: note = Synthetic
  source 1..50: mol_type = other DNA
aaaaaaaaaaaaccaaaaaaaaaaaacaaaaaaaaaaaataattgactaa

SEQ ID NO: 1724 - DNA, 10 bp, synthetic construct
  misc_feature 1..10: note = Synthetic
  source 1..10: mol_type = other DNA
gccaccatga

SEQ ID NO: 1725 - DNA, 10 bp, synthetic construct
  misc_feature 1..10: note = Synthetic
  source 1..10: mol_type = other DNA
gccaccatgg

SEQ ID NO: 1726 - DNA, 48 bp, synthetic construct
  misc_feature 1..48: note = Synthetic
  source 1..48: mol_type = other DNA
aagcggcccgccgccaccaagaaggccggccaggccaagaagaagaag

SEQ ID NO: 1727 - DNA, 27 bp, synthetic construct
  misc_feature 1..27: note = Synthetic
  source 1..27: mol_type = other DNA
cctgccgctaagagagtgaagctggac

SEQ ID NO: 1728 - protein, 8 aa, synthetic construct
  REGION 1..8: note = Synthetic
AAKRVKLD

SEQ ID NO: 1729 - DNA, 21 bp, synthetic construct
  misc_feature 1..21: note = Synthetic
  source 1..21: mol_type = other DNA
ccgaaaaagaagcggaaggtt

SEQ ID NO: 1730 - DNA, 48 bp, synthetic construct
  misc_feature 1..48: note = Synthetic
  source 1..48: mol_type = other DNA
ggcggaggctcaggcaagcggaccgctgacggctccggggggggctct

SEQ ID NO: 1731 - DNA, 42 bp, synthetic construct
  misc_feature 1..42: note = Synthetic
  source 1..42: mol_type = other DNA
tccggcggctccaagcggaccgccgacggctccgagttcgag

SEQ ID NO: 1732 - DNA, 147 bp, synthetic construct
  misc_feature 1..147: note = Synthetic
  source 1..147: mol_type = other DNA
ggcgcccccgagtccgccaccgagtccggcggcacctccaccgagtccgagggctccgccggccccaagaagaagcggaaggtgacctccaccgagtccgagggctccgccggctccgccggctccacctccggctcctcctccggc

SEQ ID NO: 1733 - DNA, 48 bp, synthetic construct
  misc_feature 1..48: note = Synthetic
  source 1..48: mol_type = other DNA
ggtaccaaggacagcaccaaagatatcccggaaaccccgagcaaggac

SEQ ID NO: 1734 - DNA, 123 bp, synthetic construct
  misc_feature 1..123: note = Synthetic
  source 1..123: mol_type = other DNA
ggcgcccccgagtccgccaccgagtccggcggcacctccaccgagtccgagggctccgccggcacctccaccgagtccgagggctccgccggctccgccggctccacctccggctcctcctcc

SEQ ID NO: 1735 - protein, 41 aa, synthetic construct
  REGION 1..41: note = Synthetic
GAPESATESGGTSTESEGSAGTSTESEGSAGSAGSTSGSSS

SEQ ID NO: 1736 - DNA, 15 bp, synthetic construct
  misc_feature 1..15: note = Synthetic
  source 1..15: mol_type = other DNA
gggggtgggggaagt

SEQ ID NO: 1737 - DNA, 12 bp, synthetic construct
  misc_feature 1..12: note = Synthetic
  source 1..12: mol_type = other DNA
tccggcggctcc

SEQ ID NO: 1738 - protein, 4 aa, synthetic construct
  REGION 1..4: note = Synthetic
SGGS

SEQ ID NO: 1739 - DNA, 48 bp, synthetic construct
  misc_feature 1..48: note = Synthetic
  source 1..48: mol_type = other DNA
tccggctccgagacccccggcacctccgagtccgccacccccgagtcc

SEQ ID NO: 1740 - DNA, 94 bp, synthetic construct
  misc_feature 1..94: note = Synthetic
  source 1..94: mol_type = other DNA
tgtcagcccagaaccccacacgagttttgccactgctaagctgtgaggcagtgcaggctgggacagccgacctccaggttgcgaaaaacctggt

SEQ ID NO: 1741 - DNA, 370 bp, synthetic construct
  misc_feature 1..370: note = Synthetic
  source 1..370: mol_type = other DNA
aaaaaaaaaaaatggaaaaaaaaaaaacggaaaaaaaaaaaaggtaaaaaaaaaaaatataaaaaaaaaaaacataaaaaaaaaaaacgaaaaaaaaaaaacgtaaaaaaaaaaaactcaaaaaaaaaaaagataaaaaaaaaaaacctaaaaaaaaaaaatgtaaaaaaaaaaaagggaaaaaaaaaaaacgcaaaaaaaaaaaacacaaaaaaaaaaaatgcaaaaaaaaaaaatcgaaaaaaaaaaaatctaaaaaaaaaaaacgaaaaaaaaaaaacccaaaaaaaaaaaagacaaaaaaaaaaaatagaaaaaaaaaaagttaaaaaaaaaaaactgaaaaaaaaaaaatttaaaaaaaaaaaat

SEQ ID NO: 1742 - DNA, 100 bp, synthetic construct
  misc_feature 1..100: note = Synthetic
  source 1..100: mol_type = other DNA
aaaaaaaaaaaaaaaaaaaaaaaaaaaaaaaaaaaaaaaaaaaaaaaaaaaaaaaaaaaaaaaaaaaaaaaaaaaaaaaaaaaaaaaaaaaaaaaaaaaa

SEQ ID NO: 1743 - DNA, 303 bp, synthetic construct
  misc_feature 1..303: note = Synthetic
  source 1..303: mol_type = other DNA
tgcctgtcctacgacaccgagatcctgaccgtggagtacggcttcctgcccatcggcaagatcgtggaggagcggatcgagtgcaccgtgtacaccgtggacaagaacggcttcgtgtacacccagcccatcgcccagtggcacaaccgcggcgagcaggaggtgttcgagtactgcctggaggacggctccatcatccgcgccaccaaggaccacaagttcatgaccaccgacggccagatgctgcccatcgacgagatcttcgagcgcggcctggacctgaagcaggtggacggcctgccc

SEQ ID NO: 1744 - protein, 101 aa, synthetic construct
  REGION 1..101: note = Synthetic
CLSYDTEILTVEYGFLPIGKIVEERIECTVYTVDKNGFVYTQPIAQWHNRGEQEVFEYCLEDGSIIRATKDHKFMTTDGQMLPIDEIFERGLDLKQVDGLP

SEQ ID NO: 1745 - DNA, 105 bp, synthetic construct
  misc_feature 1..105: note = Synthetic
  source 1..105: mol_type = other DNA
gtgaagatcatctcccgcaagtccctgggcacccagaacgtgtacgacatcggcgtggagaaggaccacaacttcctgctgaagaacggcctggtggcctccaac

SEQ ID NO: 1746 - protein, 35 aa, synthetic construct
  REGION 1..35: note = Synthetic
VKIISRKSLGTQNVYDIGVEKDHNFLLKNGLVASN

SEQ ID NO: 1747 - DNA, 72 bp, synthetic construct
  misc_feature 1..72: note = Synthetic
  source 1..72: mol_type = other DNA
gactacaaggacgacgacgacaaggactacaaggacgacgacgacaaggactacaaggacgacgacgacaag

SEQ ID NO: 1748 - protein, 24 aa, synthetic construct
  REGION 1..24: note = Synthetic
DYKDDDDKDYKDDDDKDYKDDDDK

SEQ ID NO: 1749 - DNA, 66 bp, synthetic construct
  misc_feature 1..66: note = Synthetic
  source 1..66: mol_type = other DNA
ggctccggcgccaccaacttctccctgctgaagcaggccggcgacgtggaggagaaccccggcccc

SEQ ID NO: 1750 - protein, 22 aa, synthetic construct
  REGION 1..22: note = Synthetic
GSGATNFSLLKQAGDVEENPGP

SEQ ID NO: 1751 - DNA, 63 bp, synthetic construct
  misc_feature 1..63: note = Synthetic
  source 1..63: mol_type = other DNA
ggctccggcgagggccggggctccctgctgacctgcggcgacgtggaggagaaccccggcccc

SEQ ID NO: 1752 - protein, 21 aa, synthetic construct
  REGION 1..21: note = Synthetic
GSGEGRGSLLTCGDVEENPGP

SEQ ID NO: 1753 - protein, 102 aa, synthetic construct
  REGION 1..102: note = Synthetic
CLSYETEILTVEYGLLPIGKIVEKRIECTVYSVDNNGNIYTQPVAQWHDRGEQEVFEYCLEDGSLIRATKDHKFMTVDGQMLPIDEIFERELDLMRVDNLPN

SEQ ID NO: 1754 - protein, 35 aa, synthetic construct
  REGION 1..35: note = Synthetic
IKIATRKYLGKQNVYDIGVERDHNFALKNGFIASN

SEQ ID NO: 1755 - protein, 100 aa, synthetic construct
  REGION 1..100: note = Synthetic
CISGDSLISLASTGKRVPIKDLLGEKDFEIWAINEQTMKLESAKVSRVFCTGKKLVYTLKTRLGRTIKATANHRFLTIDGWKRLDELSLKEHIALPRKLE

SEQ ID NO: 1756 - protein, 54 aa, synthetic construct
  REGION 1..54: note = Synthetic
SSSLQLAPEIEKLPQSDIYWDPIVSITETGVEEVFDLTVPGLRNFVANDIIVHN

SEQ ID NO: 1757 - protein, 133 aa, synthetic construct
  REGION 1..133: note = Synthetic
CLSYETEILTVEYGSLPIGKIVEKRIECTVYSVDNNGNIYTQPVAQWHDRGEQEVFEYCLEDGSLIRATKDHKFMTVDGQMLPIDEIFERELDLMRVDNLPNGSAGSAAGSGVKVIGRRSLGVQRIFDIGLRQ

SEQ ID NO: 1758 - protein, 14 aa, synthetic construct
  REGION 1..14: note = Synthetic
DHNFLLANGAIAAN

SEQ ID NO: 1759 - protein, 88 aa, synthetic construct
  REGION 1..88: note = Synthetic
CLDLKTQVQTPQGMKEISNIQVGDLVLSNTGYNEVLNVFPKSKKKSYKITLEDGKEIICSEEHLFPTQTGEMNISGGLKEGMCLYVKE

SEQ ID NO: 1760 - protein, 35 aa, synthetic construct
  REGION 1..35: note = Synthetic
LKKILKIEELDERELIDIEVSGNHLFYANDILTHN

SEQ ID NO: 1761 - protein, 89 aa, synthetic construct
  REGION 1..89: note = Synthetic
CLSLDTMVVTNGKAIEIRDVKVGDWLESECGPVQVTEVLPIIKQPVFEIVLKSGKKIRVSANHKFPTKDGLKTINSGLKVGDFLRSRAK

SEQ ID NO: 1762 - protein, 45 aa, synthetic construct
  REGION 1..45: note = Synthetic
MCEIFENEIDWDEIASIEYVGVEETIDINVTNDRLFFANGILTHN

SEQ ID NO: 1763 - protein, 105 aa, synthetic construct
  REGION 1..105: note = Synthetic
CLVGSSEIITRNYGKTTIKEVVEIFDNDKNIQVLAFNTHTDNIEWAPIKAAQLTRPNAELVELEIDTLHGVKTIRCTPDHPVYTKNRGYVRADELTDDDELVVAI

SEQ ID NO: 1764 - protein, 40 aa, synthetic construct
  REGION 1..40: note = Synthetic
MEAKTYIGKLKSRKIVSNEDTYDIQTSTHNFFANDILVHN

SEQ ID NO: 1765 - protein, 101 aa, synthetic construct
  REGION 1..101: note = Synthetic
CFVPGTLVNTENGLKKIEEIKVGDKVFSHTGKLQEVVDTLIFDRDEEIISINGIDCTKNHEFYVIDKENANRVNEDNIHLFARWVHAEELDMKKHLLIELE

SEQ ID NO: 1766 - protein, 40 aa, synthetic construct
  REGION 1..40: note = Synthetic
MKFKLKEITSIETKHYKGKVHDLTVNQDHSYNVRGTVVHN

SEQ ID NO: 1767 - protein, 93 aa, synthetic construct
  REGION 1..93: note = Synthetic
CLTGDSQVLTRNGLMSIDNPQIKGREVLSYNETLQQWEYKKVLRWLDRGEKQTLSIKTKNSTVRCTANHLIRTEQGWTRAENITPGMKILSPA

SEQ ID NO: 1768 - protein, 40 aa, synthetic construct
  REGION 1..40: note = Synthetic
QWHTNFEEVESVTKGQVEKVYDLEVEDNHNFVANGLLVHN

SEQ ID NO: 1769 - protein, 113 aa, synthetic construct
  REGION 1..113: note = Synthetic
CFSGDTLVALTDGRSVSFEQLVEEEKQGKQNFCYTIRHDGSIGVEKIINARKTKTNAKVIKVTLDNGESIICTPDHKFMLRDGSYKCAMDLTLDDSLMPLHRKISTTEDSGHA

SEQ ID NO: 1770 - protein, 44 aa, synthetic construct
  REGION 1..44: note = Synthetic
MEAVLNYNHRIVNIEAVSETIDVYDIEVPHTHNFALASGVFVHN

SEQ ID NO: 1771 - protein, 111 aa, synthetic construct
  REGION 1..111: note = Synthetic
QLALDTPIPTPDGWTTMGEIKAGDKVIDEKGRPCNVVAISEIDDTEQAYKINFRDGTSIVAGERHLWKVQVTNNGRREKLLTTGEMYQKQFKTKSKENRALFRIPIADAFI

SEQ ID NO: 1772 - protein, 40 aa, synthetic construct
  REGION 1..40: note = Synthetic
SHFHYIKSIEKTGKTKMRCIQVDSPSRLYLAGKSMIPTHN

SEQ ID NO: 1773 - protein, 106 aa, synthetic construct
  REGION 1..106: note = Synthetic
CLTGDAKIDVLIDNIPISQISLEEVVNLFNEGKEIYVLSYNIDTKEVEYKEISDAGLISESAEVLEIIDEETGQKIVCTPDHKVYTLNRGYVSAKDLKEDDELVFS

SEQ ID NO: 1774 - protein, 33 aa, synthetic construct
  REGION 1..33: note = Synthetic
GLKIIKRESKEPVFDITVKDNSNFFANNILVHN

SEQ ID NO: 1775 - protein, 127 aa, synthetic construct
  REGION 1..127: note = Synthetic
ALAYDEPIYLSDGNIINIGEFVDKFFKKYKNSIKKEDNGFGWIDIGNENIYIKSFNKLSLIIEDKRILRVWRKKYSGKLIKITTKNRREITLTHDHPVYISKTGEVLEINAEMVKVGDYIYIPKNNT

SEQ ID NO: 1776 - protein, 41 aa, synthetic construct
  REGION 1..41: note = Synthetic
INLDEVIKVETVDYNGHIYDLTVEDNHTYIAGKNEGFAVSN

SEQ ID NO: 1777 - protein, 12 aa, synthetic construct
  REGION 1..12: note = Synthetic
CLAGDTLITLAS

SEQ ID NO: 1778 - protein, 145 aa, synthetic construct
  REGION 1..145: note = Synthetic
MDGRRVPIRELVSQQNFSVWALNPQTYRLERARVSRAFCTGIKPVYRLTTRLGRSIRATANHRFLTPQGWKRVDELQPGDYLALPRRIPSHHHHHHPRVLASMAAQSDVYWDPIVSIEPDGVEEVFDLTVPGPHNFVANDIIAHN

SEQ ID NO: 1779 - protein, 146 aa, synthetic construct
  REGION 1..146: note = Synthetic
CLTYETEIMTVEYGPLPIGKIVEYRIECTVYTVDKNGYIYTQPIAQWHNRGMQEVYEYSLEDGTVIRATPEHKFMTEDGQMLPIDEIFERNLDLKCLGTLELEASGHHHHHHGGSGSVKIVSRKLAKTENVYDIGVTKDHNFVLAN

SEQ ID NO: 1780 - protein, 6 aa, synthetic construct
  REGION 1..6: note = Synthetic
GLIASN

SEQ ID NO: 1781 - protein, 120 aa, synthetic construct
  REGION 1..120: note = Synthetic
CLAGDTLITLADGRRVPIRELVSQQNFSVWALNPQTYRLERARVSRAFCTGIKPVYRLTTRLGRSIRATANHRFLTPQGWKRVDELQPGDYLALPRRIPTASTPTLTEAELALLGHLIGD

SEQ ID NO: 1782 - protein, 36 aa, synthetic construct
  REGION 1..36: note = Synthetic
WDPIVSIEPDGVEEVFDLTVPGPHNFVANDIIAHNS

SEQ ID NO: 1783 - protein, 215 aa, synthetic construct
  REGION 1..215: note = Synthetic
MGKGDPKKPRGKMSSYAFFVQTCREEHKKKHPDASVNFSEFSKKCSERWKTMSAKEKGKFEDMAKADKARYEREMKTYIPPKGETKKKFKDPNAPKRPPSAFFLFCSEYRPKIKGEHPGLSIGDVAKKLGEMWNNTAADDKQPYEKKAAKLKEKYEKDIAAYRAKGKPDAAKKGVVKAEKSKKKKEEEEDEEDEEDEEEEEDEEDEDEEEDDDDE

SEQ ID NO: 1784 - protein, 161 aa, synthetic construct
  REGION 1..161: note = Synthetic
GKGDPKKPRGKMSSYAFFVQTCREEHKKKHPDASVNFSEFSKKCSERWKTMSAKEKGKFEDMAKADKARYEREMKTYIPPKGETKKKFKDPNAPKRPPSAFFLFCSEYRPKIKGEHPGLSIGDVAKKLGEMWNNTAADDKQPYEKKAAKLKEKYEKDIAAY

SEQ ID NO: 1785 - protein, 78 aa, synthetic construct
  REGION 1..78: note = Synthetic
GKGDPKKPRGKMSSYAFFVQTCREEHKKKHPDASVNFSEFSKKCSERWKTMSAKEKGKFEDMAKADKARYEREMKTYI

SEQ ID NO: 1786 - protein, 74 aa, synthetic construct
  REGION 1..74: note = Synthetic
FKDPNAPKRPPSAFFLFCSEYRPKIKGEHPGLSIGDVAKKLGEMWNNTAADDKQPYEKKAAKLKEKYEKDIAAY

SEQ ID NO: 1787 - protein, 7 aa, synthetic construct
  REGION 1..7: note = Synthetic
EKSKKKK

SEQ ID NO: 1788 - protein, 30 aa, synthetic construct
  REGION 1..30: note = Synthetic
EEEEDEEDEEDEEEEEDEEDEDEEEDDDDE

SEQ ID NO: 1789 - protein, 184 aa, synthetic construct
  REGION 1..184: note = Synthetic
GKGDPKKPRGKMSSYAFFVQTCREEHKKKHPDASVNFSEFSKKCSERWKTMSAKEKGKFEDMAKADKARYEREMKTYIPPKGETKKKFKDPNAPKRPPSAFFLFCSEYRPKIKGEHPGLSIGDVAKKLGEMWNNTAADDKQPYEKKAAKLKEKYEKDIAAYRAKGKPDAAKKGVVKAEKSKKKK

SEQ ID NO: 1790 - protein, 83 aa, synthetic construct
  REGION 1..83: note = Synthetic
GKGDPKKPRGKMSSYAFFVQTCREEHKKKHPDASVNFSEFSKKCSERWKTMSAKEKGKFEDMAKADKARYEREMKTYIPPKGE

SEQ ID NO: 1791 - protein, 188 aa, synthetic construct
  REGION 1..188: note = Synthetic
GKGDPKKPRGKMSSYAFFVQTCREEHKKKHPDASVNFSEFSKKCSERWKTMSAKEKGKFEDMAKADKARYEREMKTYIPPKGETKKKGKGDPKKPRGKMSSYAFFVQTCREEHKKKHPDASVNFSEFSKKCSERWKTMSAKEKGKFEDMAKADKARYEREMKTYIRAKGKPDAAKKGVVKAEKSKKKK

SEQ ID NO: 1792 - protein, 180 aa, synthetic construct
  REGION 1..180: note = Synthetic
FKDPNAPKRPPSAFFLFCSEYRPKIKGEHPGLSIGDVAKKLGEMWNNTAADDKQPYEKKAAKLKEKYEKDIAAYPPKGETKKKFKDPNAPKRPPSAFFLFCSEYRPKIKGEHPGLSIGDVAKKLGEMWNNTAADDKQPYEKKAAKLKEKYEKDIAAYRAKGKPDAAKKGVVKAEKSKKKK

SEQ ID NO: 1793 - DNA, 642 bp, synthetic construct
  misc_feature 1..642: note = Synthetic
  source 1..642: mol_type = other DNA
ggcaagggcgaccccaagaagccccggggcaagatgtcctcctacgccttcttcgtgcagacctgccgggaggagcacaagaagaagcaccccgacgcctccgtgaacttctccgagttctccaagaagtgctccgagcggtggaagaccatgtccgccaaggagaagggcaagttcgaggacatggccaaggccgacaaggcccggtacgagcgggagatgaagacctacatcccccccaagggcgagaccaagaagaagttcaaggaccccaacgcccccaagcggcccccctccgccttcttcctgttctgctccgagtaccggcccaagatcaagggcgagcaccccggcctgtccatcggcgacgtggccaagaagctgggcgagatgtggaacaacaccgccgccgacgacaagcagccctacgagaagaaggccgccaagctgaaggagaagtacgagaaggacatcgccgcctaccgggccaagggcaagcccgacgccgccaagaagggcgtggtgaaggccgagaagtccaagaagaagaaggaggaggaggaggacgaggaggacgaggaggacgaggaggaggaggaggacgaggaggacgaggacgaggaggaggacgacgacgacgag

SEQ ID NO: 1794 - DNA, 483 bp, synthetic construct
  misc_feature 1..483: note = Synthetic
  source 1..483: mol_type = other DNA
ggcaagggcgaccccaagaagccccggggcaagatgtcctcctacgccttcttcgtgcagacctgccgggaggagcacaagaagaagcaccccgacgcctccgtgaacttctccgagttctccaagaagtgctccgagcggtggaagaccatgtccgccaaggagaagggcaagttcgaggacatggccaaggccgacaaggcccggtacgagcgggagatgaagacctacatcccccccaagggcgagaccaagaagaagttcaaggaccccaacgcccccaagcggcccccctccgccttcttcctgttctgctccgagtaccggcccaagatcaagggcgagcaccccggcctgtccatcggcgacgtggccaagaagctgggcgagatgtggaacaacaccgccgccgacgacaagcagccctacgagaagaaggccgccaagctgaaggagaagtacgagaaggacatcgccgcctac

SEQ ID NO: 1795 - DNA, 234 bp, synthetic construct
  misc_feature 1..234: note = Synthetic
  source 1..234: mol_type = other DNA
ggcaagggcgaccccaagaagccccggggcaagatgtcctcctacgccttcttcgtgcagacctgccgggaggagcacaagaagaagcaccccgacgcctccgtgaacttctccgagttctccaagaagtgctccgagcggtggaagaccatgtccgccaaggagaagggcaagttcgaggacatggccaaggccgacaaggcccggtacgagcgggagatgaagacctacatc

SEQ ID NO: 1796 - DNA, 234 bp, synthetic construct
  misc_feature 1..234: note = Synthetic
  source 1..234: mol_type = other DNA
ggtaagggcgaccccaagaagcctcggggcaagatgtccagttacgccttcttcgtgcagacctgtcgcgaggaacacaagaaaaagcacccggatgccagcgtgaacttctccgagtttagcaagaagtgcagcgagagatggaaaaccatgtctgctaaagagaagggcaagttcgaggacatggcgaaggctgacaaggccagatacgagcgcgagatgaaaacttacatc

SEQ ID NO: 1797 - DNA, 222 bp, synthetic construct
  misc_feature 1..222: note = Synthetic
  source 1..222: mol_type = other DNA
ttcaaggaccccaacgcccccaagcggcccccctccgccttcttcctgttctgctccgagtaccggcccaagatcaagggcgagcaccccggcctgtccatcggcgacgtggccaagaagctgggcgagatgtggaacaacaccgccgccgacgacaagcagccctacgagaagaaggccgccaagctgaaggagaagtacgagaaggacatcgccgcctac

SEQ ID NO: 1798 - DNA, 222 bp, synthetic construct
  misc_feature 1..222: note = Synthetic
  source 1..222: mol_type = other DNA
ttcaaggatcccaacgcccctaagcgcccgccatccgccttcttcctgttctgcagcgagtacagacccaagatcaagggcgaacaccctggcctgagcattggcgacgtggccaagaaactcggtgagatgtggaataacaccgctgccgacgacaagcagccttacgagaagaaggccgccaaactgaaagagaagtacgagaaggacatcgccgcttat

SEQ ID NO: 1799 - DNA, 552 bp, synthetic construct
  misc_feature 1..552: note = Synthetic
  source 1..552: mol_type = other DNA
ggcaagggcgaccccaagaagccccggggcaagatgtcctcctacgccttcttcgtgcagacctgccgggaggagcacaagaagaagcaccccgacgcctccgtgaacttctccgagttctccaagaagtgctccgagcggtggaagaccatgtccgccaaggagaagggcaagttcgaggacatggccaaggccgacaaggcccggtacgagcgggagatgaagacctacatcccccccaagggcgagaccaagaagaagttcaaggaccccaacgcccccaagcggcccccctccgccttcttcctgttctgctccgagtaccggcccaagatcaagggcgagcaccccggcctgtccatcggcgacgtggccaagaagctgggcgagatgtggaacaacaccgccgccgacgacaagcagccctacgagaagaaggccgccaagctgaaggagaagtacgagaaggacatcgccgcctaccgggccaagggcaagcccgacgccgccaagaagggcgtggtgaaggccgagaagtccaagaagaagaag

SEQ ID NO: 1800 - DNA, 249 bp, synthetic construct
  misc_feature 1..249: note = Synthetic
  source 1..249: mol_type = other DNA
ggcaagggcgaccccaagaagccccggggcaagatgtcctcctacgccttcttcgtgcagacctgccgggaggagcacaagaagaagcaccccgacgcctccgtgaacttctccgagttctccaagaagtgctccgagcggtggaagaccatgtccgccaaggagaagggcaagttcgaggacatggccaaggccgacaaggcccggtacgagcgggagatgaagacctacatcccccccaagggcgag

SEQ ID NO: 1801 - DNA, 564 bp, synthetic construct
  misc_feature 1..564: note = Synthetic
  source 1..564: mol_type = other DNA
ggcaagggcgaccccaagaagccccggggcaagatgtcctcctacgccttcttcgtgcagacctgccgggaggagcacaagaagaagcaccccgacgcctccgtgaacttctccgagttctccaagaagtgctccgagcggtggaagaccatgtccgccaaggagaagggcaagttcgaggacatggccaaggccgacaaggcccggtacgagcgggagatgaagacctacatcccccccaagggcgagaccaagaagaagggtaagggcgaccccaagaagcctcggggcaagatgtccagttacgccttcttcgtgcagacctgtcgcgaggaacacaagaaaaagcacccggatgccagcgtgaacttctccgagtttagcaagaagtgcagcgagagatggaaaaccatgtctgctaaagagaagggcaagttcgaggacatggcgaaggctgacaaggccagatacgagcgcgagatgaaaacttacatccgggccaagggcaagcccgacgccgccaagaagggcgtggtgaaggccgagaagtccaagaagaagaag

SEQ ID NO: 1802 - DNA, 540 bp, synthetic construct
  misc_feature 1..540: note = Synthetic
  source 1..540: mol_type = other DNA
ttcaaggaccccaacgcccccaagcggcccccctccgccttcttcctgttctgctccgagtaccggcccaagatcaagggcgagcaccccggcctgtccatcggcgacgtggccaagaagctgggcgagatgtggaacaacaccgccgccgacgacaagcagccctacgagaagaaggccgccaagctgaaggagaagtacgagaaggacatcgccgcctacccccccaagggcgagaccaagaagaagttcaaggatcccaacgcccctaagcgcccgccatccgccttcttcctgttctgcagcgagtacagacccaagatcaagggcgaacaccctggcctgagcattggcgacgtggccaagaaactcggtgagatgtggaataacaccgctgccgacgacaagcagccttacgagaagaaggccgccaaactgaaagagaagtacgagaaggacatcgccgcttatcgggccaagggcaagcccgacgccgccaagaagggcgtggtgaaggccgagaagtccaagaagaagaag

SEQ ID NO: 1803 - protein, 18 aa, synthetic construct
  REGION 1..18: note = Synthetic
GKPDAAKKGVVKAEKSKK

SEQ ID NO: 1804 - protein, 20 aa, synthetic construct
  REGION 1..20: note = Synthetic
GKPDAAKKGVVKAEKSKKKK

SEQ ID NO: 1805 - DNA, 48 bp, synthetic construct
  misc_feature 1..48: note = Synthetic
  source 1..48: mol_type = other DNA
aagcggccggctgcgaccaagaaggctggtcaggctaagaagaagaag

SEQ ID NO: 1806 - DNA, 27 bp, synthetic construct
  misc_feature 1..27: note = Synthetic
  source 1..27: mol_type = other DNA
cccgctgcgaagcgggtaaagcttgat

SEQ ID NO: 1807 - DNA, 21 bp, synthetic construct
  misc_feature 1..21: note = Synthetic
  source 1..21: mol_type = other DNA
cccaagaagaagcggaaggtg

SEQ ID NO: 1808 - DNA, 54 bp, synthetic construct
  misc_feature 1..54: note = Synthetic
  source 1..54: mol_type = other DNA
aagcggaccgccgacggctccgagttcgagtccccgaaaaagaagcggaaggtg

SEQ ID NO: 1809 - protein, 18 aa, synthetic construct
  REGION 1..18: note = Synthetic
KRTADGSEFESPKKKRKV

SEQ ID NO: 1810 - DNA, 54 bp, synthetic construct
  misc_feature 1..54: note = Synthetic
  source 1..54: mol_type = other DNA
aagaggactgcggatggttctgaattcgaatcacctaagaagaagcggaaggtc

SEQ ID NO: 1811 - DNA, 48 bp, synthetic construct
  misc_feature 1..48: note = Synthetic
  source 1..48: mol_type = other DNA
ggcgggggctccggcaagcgcaccgctgacggctccggggggggctct

SEQ ID NO: 1812 - DNA, 48 bp, synthetic construct
  misc_feature 1..48: note = Synthetic
  source 1..48: mol_type = other DNA
ggcggcggctccggcaagcggaccgccgacggctccggcggcggctcc

SEQ ID NO: 1813 - DNA, 147 bp, synthetic construct
  misc_feature 1..147: note = Synthetic
  source 1..147: mol_type = other DNA
ggcgcccccgagtctgcgacagagtcgggcgggacttccaccgagagtgaaggatcggccggccccaagaagaagcgcaaagtcacgtcgacggagtcggaggggtctgcggggtccgcggggagcacgtccggctcctcctcgggc

SEQ ID NO: 1814 - DNA, 126 bp, synthetic construct
  misc_feature 1..126: note = Synthetic
  source 1..126: mol_type = other DNA
ggcgcccccgagtccgccaccgagtccggcggcacctccaccgagtccgagggctccgccggcacctccaccgagtccgagggctccgccggctccgccggctccacctccggctcctcctcctcc

SEQ ID NO: 1815 - protein, 42 aa, synthetic construct
  REGION 1..42: note = Synthetic
GAPESATESGGTSTESEGSAGTSTESEGSAGSAGSTSGSSSS

SEQ ID NO: 1816 - DNA, 48 bp, synthetic construct
  misc_feature 1..48: note = Synthetic
  source 1..48: mol_type = other DNA
ggcaccaaggactccaccaaggacatccccgagaccccctccaaggac

SEQ ID NO: 1817-1822 - skipped (6 entries)

SEQ ID NO: 1823 - DNA, 1578 bp, synthetic construct
  misc_feature 1..1578: note = Synthetic
  source 1..1578: mol_type = other DNA
atggactccaccaaggagaagtgcgactcctacaaggacgacctgctgctgcggatgggcctgaacgacaacaaggccggcatggagggcctggacaaggagaagatcaacaagatcatcatggaggccaccaagggctcccggttctacggcaacgagctgaagaaggagaagcaggtgaaccagcggatcgagaacatgatgcagcagaaggcccagatcacctcccagcagctgcggaaggcccagctgcaggtggaccggttcgccatggagctggagcagtcccggaacctgtccaacaccatcgtgcacatcgacatggacgccttctacgccgccgtggagatgcgggacaaccccgagctgaaggacaagcccatcgccgtgggctccatgtccatgctgtccacctccaactaccacgcccggcggttcggcgtgcgggccgccatgcccggcttcatcgccaagcggctgtgcccccagctgatcatcgtgccccccaacttcgacaagtaccgggccgtgtccaaggaggtgaaggagatcctggccgactacgaccccaacttcatggccatgtccctggacgaggcctacctgaacatcaccaagcacctggaggagcggcagaactggcccgaggacaagcggcggtacttcatcaagatgggctcctccgtggagaacgacaaccccggcaaggaggtgaacaagctgtccgagcacgagcggtccatctcccccctgctgttcgaggagtccccctccgacgtgcagccccccggcgaccccttccaggtgaacttcgaggagcagaacaacccccagatcctgcagaactccgtggtgttcggcacctccgcccaggaggtggtgaaggagatccggttccggatcgagcagaagaccaccctgaccgcctccgccggcatcgcccccaacaccatgctggccaaggtgtgctccgacaagaacaagcccaacggccagtaccagatcctgcccaaccggcaggccgtgatggacttcatcaaggacctgcccatccggaaggtgtccggcatcggcaaggtgaccgagaagatgctgaaggccctgggcatcatcacctgcaccgagctgtaccagcagcgggccctgctgtccctgctgttctccgagacctcctggcactacttcctgcacatctccctgggcctgggctccacccacctgacccgggaccgggtgcggaagtccatgtccgtggagcggaccttccgggagatcaacaaggccgaggagcagtactccctgtgccaggagctgtgctccgagctggcccaggacctgcagaaggagcggctgaagggccggaccgtgaccatcaagctgaagaacgtgaacttcgaggtgaagacccgggcctccaccgtgtcctccgtggtgtccaccgccgaggagatcttcgccatcgccaaggagctgctgaagaccgagatcgacgccgacttcccccaccccctgcggctgcggctgatgggcgtgcggatctcctccttccccaacgaggaggaccggaagcaccagcag

SEQ ID NO: 1824 - protein, 526 aa, synthetic construct
  REGION 1..526: note = Synthetic
MDSTKEKCDSYKDDLLLRMGLNDNKAGMEGLDKEKINKIIMEATKGSRFYGNELKKEKQVNQRIENMMQQKAQITSQQLRKAQLQVDRFAMELEQSRNLSNTIVHIDMDAFYAAVEMRDNPELKDKPIAVGSMSMLSTSNYHARRFGVRAAMPGFIAKRLCPQLIIVPPNFDKYRAVSKEVKEILADYDPNFMAMSLDEAYLNITKHLEERQNWPEDKRRYFIKMGSSVENDNPGKEVNKLSEHERSISPLLFEESPSDVQPPGDPFQVNFEEQNNPQILQNSVVFGTSAQEVVKEIRFRIEQKTTLTASAGIAPNTMLAKVCSDKNKPNGQYQILPNRQAVMDFIKDLPIRKVSGIGKVTEKMLKALGIITCTELYQQRALLSLLFSETSWHYFLHISLGLGSTHLTRDRVRKSMSVERTFREINKAEEQYSLCQELCSELAQDLQKERLKGRTVTIKLKNVNFEVKTRASTVSSVVSTAEEIFAIAKELLKTEIDADFPHPLRLRLMGVRISSFPNEEDRKHQQ

SEQ ID NO: 1825 - protein, 16 aa, synthetic construct
  REGION 1..16: note = Synthetic
SGGSSGGSSGGSSGGS

SEQ ID NO: 1826 - protein, 15 aa, synthetic construct
  REGION 1..15: note = Synthetic
KKKRKVPAAKRVKLD

SEQ ID NO: 1827 - protein, 20 aa, synthetic construct
  REGION 1..20: note = Synthetic
MGKRTADGSEFESPKKKRKV

SEQ ID NO: 1828 - protein, 22 aa, synthetic construct
  REGION 1..22: note = Synthetic
SGGSKRTADGSEFESPKKKRKV

SEQ ID NO: 1829 - protein, 30 aa, synthetic construct
  REGION 1..30: note = Synthetic
SGGSKRTADGSEFESPKKKRKVSGGSSGGS

SEQ ID NO: 1830 - protein, 60 aa, synthetic construct
  REGION 1..60: note = Synthetic
SGGSSGGSSGSGAPESATESGGTSTESEGSAGPKKKRKVTSTESEGSAGSAGSTSGSSSG

SEQ ID NO: 1831 - DNA, 54 bp, synthetic construct
  misc_feature 1..54: note = Synthetic
  source 1..54: mol_type = other DNA
aagcggactgcggacgggtccgagttcgagtctccgaagaagaagcgcaaggtc

SEQ ID NO: 1832 - DNA, 33 bp, synthetic construct
  misc_feature 1..33: note = Synthetic
  source 1..33: mol_type = other DNA
gtgagcggctggcggctgttcaagaagattagc

SEQ ID NO: 1833 - protein, 11 aa, synthetic construct
  REGION 1..11: note = Synthetic
VSGWRLFKKIS

SEQ ID NO: 1834 - DNA, 33 bp, synthetic construct
  misc_feature 1..33: note = Synthetic
  source 1..33: mol_type = other DNA
gtgtccggctggcggctgttcaagaagatctcc

SEQ ID NO: 1835 - DNA, 57 bp, synthetic construct
  misc_feature 1..57: note = Synthetic
  source 1..57: mol_type = other DNA
tccgagtccgccacccccgagtccgtgtccggctggcggctgttcaagaagatctcc

SEQ ID NO: 1836 - protein, 19 aa, synthetic construct
  REGION 1..19: note = Synthetic
SESATPESVSGWRLFKKIS

SEQ ID NO: 1837-1899 - skipped (63 entries)

SEQ ID NO: 1900 - DNA, 2897 bp, synthetic construct
  misc_feature 1..2897: note = Synthetic
  source 1..2897: mol_type = other DNA
aggactcactatttgttttcgcgcccagttgcaaaaagtgtcgaagctcagaataaacgctcaactttggccggatctgccaccatgggcgtgaagatcatctcccgcaagtccctgggcacccagaacgtgtacgacatcggcgtggagaaggaccacaacttcctgctgaagaacggcctggtggcctccaactgcttcaactccggcggctccaagcggaccgccgacggctccgagttcgagtcccccaagaagaagcggaaggtgtccggcggctcctccggcggctccatggactccaccaaggagaagtgcgactcctacaaggacgacctgctgctgcggatgggcctgaacgacaacaaggccggcatggagggcctggacaaggagaagatcaacaagatcatcatggaggccaccaagggctcccggttctacggcaacgagctgaagaaggagaagcaggtgaaccagcggatcgagaacatgatgcagcagaaggcccagatcacctcccagcagctgcggaaggcccagctgcaggtggaccggttcgccatggagctggagcagtcccggaacctgtccaacaccatcgtgcacatcgacatggacgccttctacgccgccgtggagatgcgggacaaccccgagctgaaggacaagcccatcgccgtgggctccatgtccatgctgtccacctccaactaccacgcccggcggttcggcgtgcgggccgccatgcccggcttcatcgccaagcggctgtgcccccagctgatcatcgtgccccccaacttcgacaagtaccgggccgtgtccaaggaggtgaaggagatcctggccgactacgaccccaacttcatggccatgtccctggacgaggcctacctgaacatcaccaagcacctggaggagcggcagaactggcccgaggacaagcggcggtacttcatcaagatgggctcctccgtggagaacgacaaccccggcaaggaggtgaacaagctgtccgagcacgagcggtccatctcccccctgctgttcgaggagtccccctccgacgtgcagccccccggcgaccccttccaggtgaacttcgaggagcagaacaacccccagatcctgcagaactccgtggtgttcggcacctccgcccaggaggtggtgaaggagatccggttccggatcgagcagaagaccaccctgaccgcctccgccggcatcgcccccaacaccatgctggccaaggtgtgctccgacaagaacaagcccaacggccagtaccagatcctgcccaaccggcaggccgtgatggacttcatcaaggacctgcccatccggaaggtgtccggcatcggcaaggtgaccgagaagatgctgaaggccctgggcatcatcacctgcaccgagctgtaccagcagcgggccctgctgtccctgctgttctccgagacctcctggcactacttcctgcacatctccctgggcctgggctccacccacctgacccgggaccgggtgcggaagtccatgtccgtggagcggaccttctccgagatcaacaaggccgaggagcagtactccctgtgccaggagctgtgctccgagctggcccaggacctgcagaaggagcggctgaagggccggaccgtgaccatcaagctgaagaacgtgaacttcgaggtgaagacccgggcctccaccgtgtcctccgtggtgtccaccgccgaggagatcttcgccatcgccaaggagctgctgaagaccgagatcgacgccgacttcccccaccccctgcggctgcggctgatgggcgtgcggatctcctccttccccaacgaggaggaccggaagcaccagcagggcggcggctccggcaagcggaccgccgacggctccggcggcggctcccccaagaagaagcggaaggtgcccgccgccaagcgcgtgaagctggacggctccggcgagggccggggctccctgctgacctgcggcgacgtggaggagaaccccggccccatggccgccgccatgaccgacccccgggagaccgtgccccccggcaactccggcgaggagaccatcggcgaggccttcgcctggctgaaccggaccgtggaggccatcaaccgggaggccgtgaaccacctgccccgggagctgatcttccaggtgtggcagcggtcctggcggtactggcacgacgagcagggcatgtccgagtcctacaccaagtaccggtacctgtgcatcatccagaaggccgtgtacatgcacgtgcggaagggctgcacctgcctgggccggggccacggccccggcggctggcggcccggccccccccctccccccccacccggcctggtgtagctagcaccagcctcaagaacacccgaatggagtctctaagctacataataccaacttacactttacaaaatgttgtcccccaaaatgtagccattcgtatctgctcctaataaaaagaaagtttcttcacattctctcgagaaaaaaaaaaaatggaaaaaaaaaaaacggaaaaaaaaaaaaggtaaaaaaaaaaaatataaaaaaaaaaaacataaaaaaaaaaaacgaaaaaaaaaaaacgtaaaaaaaaaaaactcaaaaaaaaaaaagataaaaaaaaaaaacctaaaaaaaaaaaatgtaaaaaaaaaaaagggaaaaaaaaaaaacgcaaaaaaaaaaaacacaaaaaaaaaaaatgcaaaaaaaaaaaatcgaaaaaaaaaaaatctaaaaaaaaaaaacgaaaaaaaaaaaacccaaaaaaaaaaaagacaaaaaaaaaaaatagaaaaaaaaaaagttaaaaaaaaaaaactgaaaaaaaaaaaatttaaaaaaaaaaaatctag

SEQ ID NO: 1901 - DNA, 2298 bp, synthetic construct
  misc_feature 1..2298: note = Synthetic
  source 1..2298: mol_type = other DNA
atgggcgtgaagatcatctcccgcaagtccctgggcacccagaacgtgtacgacatcggcgtggagaaggaccacaacttcctgctgaagaacggcctggtggcctccaactgcttcaactccggcggctccaagcggaccgccgacggctccgagttcgagtcccccaagaagaagcggaaggtgtccggcggctcctccggcggctccatggactccaccaaggagaagtgcgactcctacaaggacgacctgctgctgcggatgggcctgaacgacaacaaggccggcatggagggcctggacaaggagaagatcaacaagatcatcatggaggccaccaagggctcccggttctacggcaacgagctgaagaaggagaagcaggtgaaccagcggatcgagaacatgatgcagcagaaggcccagatcacctcccagcagctgcggaaggcccagctgcaggtggaccggttcgccatggagctggagcagtcccggaacctgtccaacaccatcgtgcacatcgacatggacgccttctacgccgccgtggagatgcgggacaaccccgagctgaaggacaagcccatcgccgtgggctccatgtccatgctgtccacctccaactaccacgcccggcggttcggcgtgcgggccgccatgcccggcttcatcgccaagcggctgtgcccccagctgatcatcgtgccccccaacttcgacaagtaccgggccgtgtccaaggaggtgaaggagatcctggccgactacgaccccaacttcatggccatgtccctggacgaggcctacctgaacatcaccaagcacctggaggagcggcagaactggcccgaggacaagcggcggtacttcatcaagatgggctcctccgtggagaacgacaaccccggcaaggaggtgaacaagctgtccgagcacgagcggtccatctcccccctgctgttcgaggagtccccctccgacgtgcagccccccggcgaccccttccaggtgaacttcgaggagcagaacaacccccagatcctgcagaactccgtggtgttcggcacctccgcccaggaggtggtgaaggagatccggttccggatcgagcagaagaccaccctgaccgcctccgccggcatcgcccccaacaccatgctggccaaggtgtgctccgacaagaacaagcccaacggccagtaccagatcctgcccaaccggcaggccgtgatggacttcatcaaggacctgcccatccggaaggtgtccggcatcggcaaggtgaccgagaagatgctgaaggccctgggcatcatcacctgcaccgagctgtaccagcagcgggccctgctgtccctgctgttctccgagacctcctggcactacttcctgcacatctccctgggcctgggctccacccacctgacccgggaccgggtgcggaagtccatgtccgtggagcggaccttctccgagatcaacaaggccgaggagcagtactccctgtgccaggagctgtgctccgagctggcccaggacctgcagaaggagcggctgaagggccggaccgtgaccatcaagctgaagaacgtgaacttcgaggtgaagacccgggcctccaccgtgtcctccgtggtgtccaccgccgaggagatcttcgccatcgccaaggagctgctgaagaccgagatcgacgccgacttcccccaccccctgcggctgcggctgatgggcgtgcggatctcctccttccccaacgaggaggaccggaagcaccagcagggcggcggctccggcaagcggaccgccgacggctccggcggcggctcccccaagaagaagcggaaggtgcccgccgccaagcgcgtgaagctggacggctccggcgagggccggggctccctgctgacctgcggcgacgtggaggagaaccccggccccatggccgccgccatgaccgacccccgggagaccgtgccccccggcaactccggcgaggagaccatcggcgaggccttcgcctggctgaaccggaccgtggaggccatcaaccgggaggccgtgaaccacctgccccgggagctgatcttccaggtgtggcagcggtcctggcggtactggcacgacgagcagggcatgtccgagtcctacaccaagtaccggtacctgtgcatcatccagaaggccgtgtacatgcacgtgcggaagggctgcacctgcctgggccggggccacggccccggcggctggcggcccggccccccccctccccccccacccggcctggtgtag

SEQ ID NO: 1902 - protein, 765 aa, synthetic construct
  REGION 1..765: note = Synthetic
MGVKIISRKSLGTQNVYDIGVEKDHNFLLKNGLVASNCFNSGGSKRTADGSEFESPKKKRKVSGGSSGGSMDSTKEKCDSYKDDLLLRMGLNDNKAGMEGLDKEKINKIIMEATKGSRFYGNELKKEKQVNQRIENMMQQKAQITSQQLRKAQLQVDRFAMELEQSRNLSNTIVHIDMDAFYAAVEMRDNPELKDKPIAVGSMSMLSTSNYHARRFGVRAAMPGFIAKRLCPQLIIVPPNFDKYRAVSKEVKEILADYDPNFMAMSLDEAYLNITKHLEERQNWPEDKRRYFIKMGSSVENDNPGKEVNKLSEHERSISPLLFEESPSDVQPPGDPFQVNFEEQNNPQILQNSVVFGTSAQEVVKEIRFRIEQKTTLTASAGIAPNTMLAKVCSDKNKPNGQYQILPNRQAVMDFIKDLPIRKVSGIGKVTEKMLKALGIITCTELYQQRALLSLLFSETSWHYFLHISLGLGSTHLTRDRVRKSMSVERTFSEINKAEEQYSLCQELCSELAQDLQKERLKGRTVTIKLKNVNFEVKTRASTVSSVVSTAEEIFAIAKELLKTEIDADFPHPLRLRLMGVRISSFPNEEDRKHQQGGGSGKRTADGSGGGSPKKKRKVPAAKRVKLDGSGEGRGSLLTCGDVEENPGPMAAAMTDPRETVPPGNSGEETIGEAFAWLNRTVEAINREAVNHLPRELIFQVWQRSWRYWHDEQGMSESYTKYRYLCIIQKAVYMHVRKGCTCLGRGHGPGGWRPGPPPPPPPGLV

SEQ ID NO: 1903 - DNA, 3941 bp, synthetic construct
  misc_feature 1..3941: note = Synthetic
  source 1..3941: mol_type = other DNA
aggactcactatttgttttcgcgcccagttgcaaaaagtgtcgaagctcagaataaacgctcaactttggccggatctgccaccatgggcgtgaagatcatctcccgcaagtccctgggcacccagaacgtgtacgacatcggcgtggagaaggaccacaacttcctgctgaagaacggcctggtggcctccaactgcttcaacggcgcccccgagtccgccaccgagtccggcggcacctccaccgagtccgagggctccgccggccccaagaagaagcggaaggtgacctccaccgagtccgagggctccgccggctccgccggctccacctccggctcctcctccggcatgaagatcgccgtggtggacaaggccctgaacaacacccggtacgacaagcacttccagctgtacggcgaggaggtggacgtgttccacatgtgcaacgagaagctgtccggccggctgctgaagaagcacatcaccatcggcacccccgagaaccccttcgaccccaacgactacgacttcgtgatcctggtgggcgccgagcccttcctgtacttcgccggcaagaagggcatcggcgactacaccggcaagcgggtggagtacaacggctacgccaactggatcgcctccatctcccccgcccagctgcacttcaagcccgagatgaagcccgtgttcgacgccaccgtggagaacatccacgacatcatcaacggccgggagaagatcgccaaggccggcgactaccggcccatcaccgaccccgacgaggccgaggagtacatcaagatggtgtacaacatggtgatcggccccgtggccttcgcctccgccacctccgccctgtactgccgggacggctacctgctgggcgtgtccatctcccaccaggagtaccagggcgtgtacatcgactccgactgcctgaccgaggtggccgtgtactacctgcagaagatcctggactccgagaaccacaccatcgtgttccacaacctgaagttcgacatgcacttctacaagtaccacctgggcctgaccttcgacaaggcccacaaggagcggcggctgcacgacaccatgctgcagcactacgtgctggacgagcggcggggcacccacggcctgaagtccctggccatgaagtacaccgacatgggcgactacgacttcgagctggacaagttcaaggacgactactgcaaggcccacaagatcaagaaggaggacttcacctacgacctgatccccttcgacatcatgtggccctacgccgccaaggacaccgacgccaccatccggctgcacaacttcttcctgcccaagatcgagaagaacgagaagctgtgctccctgtactacgacgtgctgatgcccggctgcgtgttcctgcagcgggtggaggaccggggcgtgcccatctccatcgaccggctgaaggaggcccagtaccagctgacccacaacctgaacaaggcccgggagaagctgtacacctaccccgaggtgaagcagctggagcaggaccagaacgaggccttcaaccccaactccgtgaagcagctgcgggtgctgctgttcgactacgtgggcctgacccccaccggcaagctgaccgacaccggcgccgactccaccgacgccgaggccctgaacgagctggccacccagcaccccatcgccaagaccctgctggagatccggaagctgaccaagctgatctccacctacgtggagaagatcctgctgtccatcgacgccgacggctgcatccggaccggcttccacgagcacatgaccacctccggccggctgtcctcctccggcaagctgaacctgcagcagctgccccgggacgagtccatcatcaagggctgcgtggtggccccccccggctaccgggtgatcgcctgggacctgaccaccgccgaggtgtactacgccgccgtgctgtccggcgaccggaacatgcagcaggtgttcatcaacatgcggaacgagcccgacaagtaccccgacttccactccaacatcgcccacatggtgttcaagctgcagtgcgagccccgggacgtgaagaagctgttccccgccctgcggcaggccgccaaggccatcaccttcggcatcctgtacggctccggccccgccaaggtggcccactccgtgaacgaggccctgctggagcaggccgccaagaccggcgagcccttcgtggagtgcaccgtggccgacgccaaggagtacatcgagacctacttcggccagttcccccagctgaagcggtggatcgacaagtgccacgaccagatcaagaaccacggcttcatctactcccacttcggccggaagcggcggctgcacaacatccactccgaggaccggggcgtgcagggcgaggagatccggtccggcttcaacgccatcatccagtccgcctcctccgactccctgctgctgggcgccgtggacgccgacaacgagatcatctccctgggcctggagcaggagatgaagatcgtgatgctggtgcacgactccgtggtggccatcgtgcgggaggacctgatcgaccagtacaacgagatcctgatccggaacatccagaaggaccggggcatctccatccccggctgccccatcggcatcgactccgactccgaggccggcggctcccgggactactcctgcggcaagatgaagaagcagcacccctccatcgcctgcatcgacgacgacgagtacacccggtacgtgaagggcgtgctgctggacgccgagttcgagtacaagaagctggccgccatggacaaggagcaccccgaccactccaagtacaaggacgacaagttcatcgccgtgtgcaaggacctggacaacgtgaagcggatcctgggcgccggcggcggctccggcaagcggaccgccgacggctccggcggcggctcccccaagaagaagcggaaggtgcccgccgccaagcgcgtgaagctggacggctccggcgagggccggggctccctgctgacctgcggcgacgtggaggagaaccccggccccatggccgccgccatgaccgacccccgggagaccgtgccccccggcaactccggcgaggagaccatcggcgaggccttcgcctggctgaaccggaccgtggaggccatcaaccgggaggccgtgaaccacctgccccgggagctgatcttccaggtgtggcagcggtcctggcggtactggcacgacgagcagggcatgtccgagtcctacaccaagtaccggtacctgtgcatcatccagaaggccgtgtacatgcacgtgcggaagggctgcacctgcctgggccggggccacggccccggcggctggcggcccggccccccccctccccccccacccggcctggtgtagctagcaccagcctcaagaacacccgaatggagtctctaagctacataataccaacttacactttacaaaatgttgtcccccaaaatgtagccattcgtatctgctcctaataaaaagaaagtttcttcacattctctcgagaaaaaaaaaaaatggaaaaaaaaaaaacggaaaaaaaaaaaaggtaaaaaaaaaaaatataaaaaaaaaaaacataaaaaaaaaaaacgaaaaaaaaaaaacgtaaaaaaaaaaaactcaaaaaaaaaaaagataaaaaaaaaaaacctaaaaaaaaaaaatgtaaaaaaaaaaaagggaaaaaaaaaaaacgcaaaaaaaaaaaacacaaaaaaaaaaaatgcaaaaaaaaaaaatcgaaaaaaaaaaaatctaaaaaaaaaaaacgaaaaaaaaaaaacccaaaaaaaaaaaagacaaaaaaaaaaaatagaaaaaaaaaaagttaaaaaaaaaaaactgaaaaaaaaaaaatttaaaaaaaaaaaatctag

SEQ ID NO: 1904 - DNA, 3342 bp, synthetic construct
  misc_feature 1..3342: note = Synthetic
  source 1..3342: mol_type = other DNA
atgggcgtgaagatcatctcccgcaagtccctgggcacccagaacgtgtacgacatcggcgtggagaaggaccacaacttcctgctgaagaacggcctggtggcctccaactgcttcaacggcgcccccgagtccgccaccgagtccggcggcacctccaccgagtccgagggctccgccggccccaagaagaagcggaaggtgacctccaccgagtccgagggctccgccggctccgccggctccacctccggctcctcctccggcatgaagatcgccgtggtggacaaggccctgaacaacacccggtacgacaagcacttccagctgtacggcgaggaggtggacgtgttccacatgtgcaacgagaagctgtccggccggctgctgaagaagcacatcaccatcggcacccccgagaaccccttcgaccccaacgactacgacttcgtgatcctggtgggcgccgagcccttcctgtacttcgccggcaagaagggcatcggcgactacaccggcaagcgggtggagtacaacggctacgccaactggatcgcctccatctcccccgcccagctgcacttcaagcccgagatgaagcccgtgttcgacgccaccgtggagaacatccacgacatcatcaacggccgggagaagatcgccaaggccggcgactaccggcccatcaccgaccccgacgaggccgaggagtacatcaagatggtgtacaacatggtgatcggccccgtggccttcgcctccgccacctccgccctgtactgccgggacggctacctgctgggcgtgtccatctcccaccaggagtaccagggcgtgtacatcgactccgactgcctgaccgaggtggccgtgtactacctgcagaagatcctggactccgagaaccacaccatcgtgttccacaacctgaagttcgacatgcacttctacaagtaccacctgggcctgaccttcgacaaggcccacaaggagcggcggctgcacgacaccatgctgcagcactacgtgctggacgagcggcggggcacccacggcctgaagtccctggccatgaagtacaccgacatgggcgactacgacttcgagctggacaagttcaaggacgactactgcaaggcccacaagatcaagaaggaggacttcacctacgacctgatccccttcgacatcatgtggccctacgccgccaaggacaccgacgccaccatccggctgcacaacttcttcctgcccaagatcgagaagaacgagaagctgtgctccctgtactacgacgtgctgatgcccggctgcgtgttcctgcagcgggtggaggaccggggcgtgcccatctccatcgaccggctgaaggaggcccagtaccagctgacccacaacctgaacaaggcccgggagaagctgtacacctaccccgaggtgaagcagctggagcaggaccagaacgaggccttcaaccccaactccgtgaagcagctgcgggtgctgctgttcgactacgtgggcctgacccccaccggcaagctgaccgacaccggcgccgactccaccgacgccgaggccctgaacgagctggccacccagcaccccatcgccaagaccctgctggagatccggaagctgaccaagctgatctccacctacgtggagaagatcctgctgtccatcgacgccgacggctgcatccggaccggcttccacgagcacatgaccacctccggccggctgtcctcctccggcaagctgaacctgcagcagctgccccgggacgagtccatcatcaagggctgcgtggtggccccccccggctaccgggtgatcgcctgggacctgaccaccgccgaggtgtactacgccgccgtgctgtccggcgaccggaacatgcagcaggtgttcatcaacatgcggaacgagcccgacaagtaccccgacttccactccaacatcgcccacatggtgttcaagctgcagtgcgagccccgggacgtgaagaagctgttccccgccctgcggcaggccgccaaggccatcaccttcggcatcctgtacggctccggccccgccaaggtggcccactccgtgaacgaggccctgctggagcaggccgccaagaccggcgagcccttcgtggagtgcaccgtggccgacgccaaggagtacatcgagacctacttcggccagttcccccagctgaagcggtggatcgacaagtgccacgaccagatcaagaaccacggcttcatctactcccacttcggccggaagcggcggctgcacaacatccactccgaggaccggggcgtgcagggcgaggagatccggtccggcttcaacgccatcatccagtccgcctcctccgactccctgctgctgggcgccgtggacgccgacaacgagatcatctccctgggcctggagcaggagatgaagatcgtgatgctggtgcacgactccgtggtggccatcgtgcgggaggacctgatcgaccagtacaacgagatcctgatccggaacatccagaaggaccggggcatctccatccccggctgccccatcggcatcgactccgactccgaggccggcggctcccgggactactcctgcggcaagatgaagaagcagcacccctccatcgcctgcatcgacgacgacgagtacacccggtacgtgaagggcgtgctgctggacgccgagttcgagtacaagaagctggccgccatggacaaggagcaccccgaccactccaagtacaaggacgacaagttcatcgccgtgtgcaaggacctggacaacgtgaagcggatcctgggcgccggcggcggctccggcaagcggaccgccgacggctccggcggcggctcccccaagaagaagcggaaggtgcccgccgccaagcgcgtgaagctggacggctccggcgagggccggggctccctgctgacctgcggcgacgtggaggagaaccccggccccatggccgccgccatgaccgacccccgggagaccgtgccccccggcaactccggcgaggagaccatcggcgaggccttcgcctggctgaaccggaccgtggaggccatcaaccgggaggccgtgaaccacctgccccgggagctgatcttccaggtgtggcagcggtcctggcggtactggcacgacgagcagggcatgtccgagtcctacaccaagtaccggtacctgtgcatcatccagaaggccgtgtacatgcacgtgcggaagggctgcacctgcctgggccggggccacggccccggcggctggcggcccggccccccccctccccccccacccggcctggtgtag

SEQ ID NO: 1905 - protein, 1113 aa, synthetic construct
  REGION 1..1113: note = Synthetic
MGVKIISRKSLGTQNVYDIGVEKDHNFLLKNGLVASNCFNGAPESATESGGTSTESEGSAGPKKKRKVTSTESEGSAGSAGSTSGSSSGMKIAVVDKALNNTRYDKHFQLYGEEVDVFHMCNEKLSGRLLKKHITIGTPENPFDPNDYDFVILVGAEPFLYFAGKKGIGDYTGKRVEYNGYANWIASISPAQLHFKPEMKPVFDATVENIHDIINGREKIAKAGDYRPITDPDEAEEYIKMVYNMVIGPVAFASATSALYCRDGYLLGVSISHQEYQGVYIDSDCLTEVAVYYLQKILDSENHTIVFHNLKFDMHFYKYHLGLTFDKAHKERRLHDTMLQHYVLDERRGTHGLKSLAMKYTDMGDYDFELDKFKDDYCKAHKIKKEDFTYDLIPFDIMWPYAAKDTDATIRLHNFFLPKIEKNEKLCSLYYDVLMPGCVFLQRVEDRGVPISIDRLKEAQYQLTHNLNKAREKLYTYPEVKQLEQDQNEAFNPNSVKQLRVLLFDYVGLTPTGKLTDTGADSTDAEALNELATQHPIAKTLLEIRKLTKLISTYVEKILLSIDADGCIRTGFHEHMTTSGRLSSSGKLNLQQLPRDESIIKGCVVAPPGYRVIAWDLTTAEVYYAAVLSGDRNMQQVFINMRNEPDKYPDFHSNIAHMVFKLQCEPRDVKKLFPALRQAAKAITFGILYGSGPAKVAHSVNEALLEQAAKTGEPFVECTVADAKEYIETYFGQFPQLKRWIDKCHDQIKNHGFIYSHFGRKRRLHNIHSEDRGVQGEEIRSGFNAIIQSASSDSLLLGAVDADNEIISLGLEQEMKIVMLVHDSVVAIVREDLIDQYNEILIRNIQKDRGISIPGCPIGIDSDSEAGGSRDYSCGKMKKQHPSIACIDDDEYTRYVKGVLLDAEFEYKKLAAMDKEHPDHSKYKDDKFIAVCKDLDNVKRILGAGGGSGKRTADGSGGGSPKKKRKVPAAKRVKLDGSGEGRGSLLTCGDVEENPGPMAAAMTDPRETVPPGNSGEETIGEAFAWLNRTVEAINREAVNHLPRELIFQVWQRSWRYWHDEQGMSESYTKYRYLCIIQKAVYMHVRKGCTCLGRGHGPGGWRPGPPPPPPPGLV

SEQ ID NO: 1906 - DNA, 5084 bp, synthetic construct
  misc_feature 1..5084: note = Synthetic
  source 1..5084: mol_type = other DNA
aggactcactatttgttttcgcgcccagttgcaaaaagtgtcgaagctcagaataaacgctcaactttggccggatctgccaccatgggcaagcggcccgccgccaccaagaaggccggccaggccaagaagaagaaggacaagaagtactccatcggcctggacatcggcaccaactccgtgggctgggccgtgatcaccgacgagtacaaggtgccctccaagaagttcaaggtgctgggcaacaccgaccggcactccatcaagaagaacctgatcggcgccctgctgttcgactccggcgagaccgccgaggccacccggctgaagcggaccgcccggcggcggtacacccggcggaagaaccggatctgctacctgcaggagatcttctccaacgagatggccaaggtggacgactccttcttccaccggctggaggagtccttcctggtggaggaggacaagaagcacgagcggcaccccatcttcggcaacatcgtggacgaggtggcctaccacgagaagtaccccaccatctaccacctgcggaagaagctggtggactccaccgacaaggccgacctgcggctgatctacctggccctggcccacatgatcaagttccggggccacttcctgatcgagggcgacctgaaccccgacaactccgacgtggacaagctgttcatccagctggtgcagacctacaaccagctgttcgaggagaaccccatcaacgcctccggcgtggacgccaaggccatcctgtccgcccggctgtccaagtcccggcggctggagaacctgatcgcccagctgcccggcgagaagaagaacggcctgttcggcaacctgatcgccctgtccctgggcctgacccccaacttcaagtccaacttcgacctggccgaggacgccaagctgcagctgtccaaggacacctacgacgacgacctggacaacctgctggcccagatcggcgaccagtacgccgacctgttcctggccgccaagaacctgtccgacgccatcctgctgtccgacatcctgcgggtgaacaccgagatcaccaaggcccccctgtccgcctccatgatcaagcggtacgacgagcaccaccaggacctgaccctgctgaaggccctggtgcggcagcagctgcccgagaagtacaaggagatcttcttcgaccagtccaagaacggctacgccggctacatcgacggcggcgcctcccaggaggagttctacaagttcatcaagcccatcctggagaagatggacggcaccgaggagctgctggtgaagctgaaccgggaggacctgctgcggaagcagcggaccttcgacaacggctccatcccccaccagatccacctgggcgagctgcacgccatcctgcggcggcaggaggacttctaccccttcctgaaggacaaccgggagaagatcgagaagatcctgaccttccggatcccctactacgtgggccccctggcccggggcaactcccggttcgcctggatgacccggaagtccgaggagaccatcaccccctggaacttcgaggaggtggtggacaagggcgcctccgcccagtccttcatcgagcggatgaccaacttcgacaagaacctgcccaacgagaaggtgctgcccaagcactccctgctgtacgagtacttcaccgtgtacaacgagctgaccaaggtgaagtacgtgaccgagggcatgcggaagcccgccttcctgtccggcgagcagaagaaggccatcgtggacctgctgttcaagaccaaccggaaggtgaccgtgaagcagctgaaggaggactacttcaagaagatcgagtgcttcgactccgtggagatctccggcgtggaggaccggttcaacgcctccctgggcacctaccacgacctgctgaagatcatcaaggacaaggacttcctggacaacgaggagaacgaggacatcctggaggacatcgtgctgaccctgaccctgttcgaggaccgggagatgatcgaggagcggctgaagacctacgcccacctgttcgacgacaaggtgatgaagcagctgaagcggcggcggtacaccggctggggccggctgtcccggaagctgatcaacggcatccgggacaagcagtccggcaagaccatcctggacttcctgaagtccgacggcttcgccaaccggaacttcatgcagctgatccacgacgactccctgaccttcaaggaggacatccagaaggcccaggtgtccggccagggcgactccctgcacgagcacatcgccaacctggccggctcccccgccatcaagaagggcatcctgcagaccgtgaaggtggtggacgagctggtgaaggtgatgggccggcacaagcccgagaacatcgtgatcgagatggcccgggagaaccagaccacccagaagggccagaagaactcccgggagcggatgaagcggatcgaggagggcatcaaggagctgggctcccagatcctgaaggagcaccccgtggagaacacccagctgcagaacgagaagctgtacctgtactacctgcagaacggccgggacatgtacgtggaccaggagctggacatcaaccggctgtccgactacgacgtggacgccatcgtgccccagtccttcctgaaggacgactccatcgacaacaaggtgctgacccggtccgacaagaaccggggcaagtccgacaacgtgccctccgaggaggtggtgaagaagatgaagaactactggcggcagctgctgaacgccaagctgatcacccagcggaagttcgacaacctgaccaaggccgagcggggcggcctgtccgagctggacaaggccggcttcatcaagcggcagctggtggagacccggcagatcaccaagcacgtggcccagatcctggactcccggatgaacaccaagtacgacgagaacgacaagctgatccgggaggtgaaggtgatcaccctgaagtccaagctggtgtccgacttccggaaggacttccagttctacaaggtgcgggagatcaacaactaccaccacgcccacgacgcctacctgaacgccgtggtgggcaccgccctgatcaagaagtaccccaagctggagtccgagttcgtgtacggcgactacaaggtgtacgacgtgcggaagatgatcgccaagtccgagcaggagatcggcaaggccaccgccaagtacttcttctactccaacatcatgaacttcttcaagaccgagatcaccctggccaacggcgagatccggaagcggcccctgatcgagaccaacggcgagaccggcgagatcgtgtgggacaagggccgggacttcgccaccgtgcggaaggtgctgtccatgccccaggtgaacatcgtgaagaagaccgaggtgcagaccggcggcttctccaaggagtccatcctgcccaagcggaactccgacaagctgatcgcccggaagaaggactgggaccccaagaagtacggcggcttcgactcccccaccgtggcctactccgtgctggtggtggccaaggtggagaagggcaagtccaagaagctgaagtccgtgaaggagctgctgggcatcaccatcatggagcggtcctccttcgagaagaaccccatcgacttcctggaggccaagggctacaaggaggtgaagaaggacctgatcatcaagctgcccaagtactccctgttcgagctggagaacggccggaagcggatgctggcctccgccggcgagctgcagaagggcaacgagctggccctgccctccaagtacgtgaacttcctgtacctggcctcccactacgagaagctgaagggctcccccgaggacaacgagcagaagcagctgttcgtggagcagcacaagcactacctggacgagatcatcgagcagatctccgagttctccaagcgggtgatcctggccgacgccaacctggacaaggtgctgtccgcctacaacaagcaccgggacaagcccatccgggagcaggccgagaacatcatccacctgttcaccctgaccaacctgggcgcccccgccgccttcaagtacttcgacaccaccatcgaccggaagcggtacacctccaccaaggaggtgctggacgccaccctgatccaccagtccatcaccggcctgtacgagacccggatcgacctgtcccagctgggcggcgactccggcggctcccggggcaagtgcctgtcctacgagaccgagatcctgaccgtggagtacggcctgctgcccatcggcaagatcgtggagaagcggatcgagtgcaccgtgtactccgtggacaacaacggcaacatctacacccagcccgtggcccagtggcacgaccggggcgagcaggaggtgttcgagtactgcctggaggacggctccctgatccgggccaccaaggaccacaagttcatgaccgtggacggccagatgctgcccatcgacgagatcttcgagcgggagctggacctgatgcgggtggacaacctgcccaactagctagcaccagcctcaagaacacccgaatggagtctctaagctacataataccaacttacactttacaaaatgttgtcccccaaaatgtagccattcgtatctgctcctaataaaaagaaagtttcttcacattctctcgagaaaaaaaaaaaatggaaaaaaaaaaaacggaaaaaaaaaaaaggtaaaaaaaaaaaatataaaaaaaaaaaacataaaaaaaaaaaacgaaaaaaaaaaaacgtaaaaaaaaaaaactcaaaaaaaaaaaagataaaaaaaaaaaacctaaaaaaaaaaaatgtaaaaaaaaaaaagggaaaaaaaaaaaacgcaaaaaaaaaaaacacaaaaaaaaaaaatgcaaaaaaaaaaaatcgaaaaaaaaaaaatctaaaaaaaaaaaacgaaaaaaaaaaaacccaaaaaaaaaaaagacaaaaaaaaaaaatagaaaaaaaaaaagttaaaaaaaaaaaactgaaaaaaaaaaaatttaaaaaaaaaaaatctag

SEQ ID NO: 1907 - DNA, 4485 bp, synthetic construct
  misc_feature 1..4485: note = Synthetic
  source 1..4485: mol_type = other DNA
atgggcaagcggcccgccgccaccaagaaggccggccaggccaagaagaagaaggacaagaagtactccatcggcctggacatcggcaccaactccgtgggctgggccgtgatcaccgacgagtacaaggtgccctccaagaagttcaaggtgctgggcaacaccgaccggcactccatcaagaagaacctgatcggcgccctgctgttcgactccggcgagaccgccgaggccacccggctgaagcggaccgcccggcggcggtacacccggcggaagaaccggatctgctacctgcaggagatcttctccaacgagatggccaaggtggacgactccttcttccaccggctggaggagtccttcctggtggaggaggacaagaagcacgagcggcaccccatcttcggcaacatcgtggacgaggtggcctaccacgagaagtaccccaccatctaccacctgcggaagaagctggtggactccaccgacaaggccgacctgcggctgatctacctggccctggcccacatgatcaagttccggggccacttcctgatcgagggcgacctgaaccccgacaactccgacgtggacaagctgttcatccagctggtgcagacctacaaccagctgttcgaggagaaccccatcaacgcctccggcgtggacgccaaggccatcctgtccgcccggctgtccaagtcccggcggctggagaacctgatcgcccagctgcccggcgagaagaagaacggcctgttcggcaacctgatcgccctgtccctgggcctgacccccaacttcaagtccaacttcgacctggccgaggacgccaagctgcagctgtccaaggacacctacgacgacgacctggacaacctgctggcccagatcggcgaccagtacgccgacctgttcctggccgccaagaacctgtccgacgccatcctgctgtccgacatcctgcgggtgaacaccgagatcaccaaggcccccctgtccgcctccatgatcaagcggtacgacgagcaccaccaggacctgaccctgctgaaggccctggtgcggcagcagctgcccgagaagtacaaggagatcttcttcgaccagtccaagaacggctacgccggctacatcgacggcggcgcctcccaggaggagttctacaagttcatcaagcccatcctggagaagatggacggcaccgaggagctgctggtgaagctgaaccgggaggacctgctgcggaagcagcggaccttcgacaacggctccatcccccaccagatccacctgggcgagctgcacgccatcctgcggcggcaggaggacttctaccccttcctgaaggacaaccgggagaagatcgagaagatcctgaccttccggatcccctactacgtgggccccctggcccggggcaactcccggttcgcctggatgacccggaagtccgaggagaccatcaccccctggaacttcgaggaggtggtggacaagggcgcctccgcccagtccttcatcgagcggatgaccaacttcgacaagaacctgcccaacgagaaggtgctgcccaagcactccctgctgtacgagtacttcaccgtgtacaacgagctgaccaaggtgaagtacgtgaccgagggcatgcggaagcccgccttcctgtccggcgagcagaagaaggccatcgtggacctgctgttcaagaccaaccggaaggtgaccgtgaagcagctgaaggaggactacttcaagaagatcgagtgcttcgactccgtggagatctccggcgtggaggaccggttcaacgcctccctgggcacctaccacgacctgctgaagatcatcaaggacaaggacttcctggacaacgaggagaacgaggacatcctggaggacatcgtgctgaccctgaccctgttcgaggaccgggagatgatcgaggagcggctgaagacctacgcccacctgttcgacgacaaggtgatgaagcagctgaagcggcggcggtacaccggctggggccggctgtcccggaagctgatcaacggcatccgggacaagcagtccggcaagaccatcctggacttcctgaagtccgacggcttcgccaaccggaacttcatgcagctgatccacgacgactccctgaccttcaaggaggacatccagaaggcccaggtgtccggccagggcgactccctgcacgagcacatcgccaacctggccggctcccccgccatcaagaagggcatcctgcagaccgtgaaggtggtggacgagctggtgaaggtgatgggccggcacaagcccgagaacatcgtgatcgagatggcccgggagaaccagaccacccagaagggccagaagaactcccgggagcggatgaagcggatcgaggagggcatcaaggagctgggctcccagatcctgaaggagcaccccgtggagaacacccagctgcagaacgagaagctgtacctgtactacctgcagaacggccgggacatgtacgtggaccaggagctggacatcaaccggctgtccgactacgacgtggacgccatcgtgccccagtccttcctgaaggacgactccatcgacaacaaggtgctgacccggtccgacaagaaccggggcaagtccgacaacgtgccctccgaggaggtggtgaagaagatgaagaactactggcggcagctgctgaacgccaagctgatcacccagcggaagttcgacaacctgaccaaggccgagcggggcggcctgtccgagctggacaaggccggcttcatcaagcggcagctggtggagacccggcagatcaccaagcacgtggcccagatcctggactcccggatgaacaccaagtacgacgagaacgacaagctgatccgggaggtgaaggtgatcaccctgaagtccaagctggtgtccgacttccggaaggacttccagttctacaaggtgcgggagatcaacaactaccaccacgcccacgacgcctacctgaacgccgtggtgggcaccgccctgatcaagaagtaccccaagctggagtccgagttcgtgtacggcgactacaaggtgtacgacgtgcggaagatgatcgccaagtccgagcaggagatcggcaaggccaccgccaagtacttcttctactccaacatcatgaacttcttcaagaccgagatcaccctggccaacggcgagatccggaagcggcccctgatcgagaccaacggcgagaccggcgagatcgtgtgggacaagggccgggacttcgccaccgtgcggaaggtgctgtccatgccccaggtgaacatcgtgaagaagaccgaggtgcagaccggcggcttctccaaggagtccatcctgcccaagcggaactccgacaagctgatcgcccggaagaaggactgggaccccaagaagtacggcggcttcgactcccccaccgtggcctactccgtgctggtggtggccaaggtggagaagggcaagtccaagaagctgaagtccgtgaaggagctgctgggcatcaccatcatggagcggtcctccttcgagaagaaccccatcgacttcctggaggccaagggctacaaggaggtgaagaaggacctgatcatcaagctgcccaagtactccctgttcgagctggagaacggccggaagcggatgctggcctccgccggcgagctgcagaagggcaacgagctggccctgccctccaagtacgtgaacttcctgtacctggcctcccactacgagaagctgaagggctcccccgaggacaacgagcagaagcagctgttcgtggagcagcacaagcactacctggacgagatcatcgagcagatctccgagttctccaagcgggtgatcctggccgacgccaacctggacaaggtgctgtccgcctacaacaagcaccgggacaagcccatccgggagcaggccgagaacatcatccacctgttcaccctgaccaacctgggcgcccccgccgccttcaagtacttcgacaccaccatcgaccggaagcggtacacctccaccaaggaggtgctggacgccaccctgatccaccagtccatcaccggcctgtacgagacccggatcgacctgtcccagctgggcggcgactccggcggctcccggggcaagtgcctgtcctacgagaccgagatcctgaccgtggagtacggcctgctgcccatcggcaagatcgtggagaagcggatcgagtgcaccgtgtactccgtggacaacaacggcaacatctacacccagcccgtggcccagtggcacgaccggggcgagcaggaggtgttcgagtactgcctggaggacggctccctgatccgggccaccaaggaccacaagttcatgaccgtggacggccagatgctgcccatcgacgagatcttcgagcgggagctggacctgatgcgggtggacaacctgcccaactag

SEQ ID NO: 1908 - protein, 1494 aa, synthetic construct
  REGION 1..1494: note = Synthetic
MGKRPAATKKAGQAKKKKDKKYSIGLDIGTNSVGWAVITDEYKVPSKKFKVLGNTDRHSIKKNLIGALLFDSGETAEATRLKRTARRRYTRRKNRICYLQEIFSNEMAKVDDSFFHRLEESFLVEEDKKHERHPIFGNIVDEVAYHEKYPTIYHLRKKLVDSTDKADLRLIYLALAHMIKFRGHFLIEGDLNPDNSDVDKLFIQLVQTYNQLFEENPINASGVDAKAILSARLSKSRRLENLIAQLPGEKKNGLFGNLIALSLGLTPNFKSNFDLAEDAKLQLSKDTYDDDLDNLLAQIGDQYADLFLAAKNLSDAILLSDILRVNTEITKAPLSASMIKRYDEHHQDLTLLKALVRQQLPEKYKEIFFDQSKNGYAGYIDGGASQEEFYKFIKPILEKMDGTEELLVKLNREDLLRKQRTFDNGSIPHQIHLGELHAILRRQEDFYPFLKDNREKIEKILTFRIPYYVGPLARGNSRFAWMTRKSEETITPWNFEEVVDKGASAQSFIERMTNFDKNLPNEKVLPKHSLLYEYFTVYNELTKVKYVTEGMRKPAFLSGEQKKAIVDLLFKTNRKVTVKQLKEDYFKKIECFDSVEISGVEDRFNASLGTYHDLLKIIKDKDFLDNEENEDILEDIVLTLTLFEDREMIEERLKTYAHLFDDKVMKQLKRRRYTGWGRLSRKLINGIRDKQSGKTILDFLKSDGFANRNFMQLIHDDSLTFKEDIQKAQVSGQGDSLHEHIANLAGSPAIKKGILQTVKVVDELVKVMGRHKPENIVIEMARENQTTQKGQKNSRERMKRIEEGIKELGSQILKEHPVENTQLQNEKLYLYYLQNGRDMYVDQELDINRLSDYDVDAIVPQSFLKDDSIDNKVLTRSDKNRGKSDNVPSEEVVKKMKNYWRQLLNAKLITQRKFDNLTKAERGGLSELDKAGFIKRQLVETRQITKHVAQILDSRMNTKYDENDKLIREVKVITLKSKLVSDFRKDFQFYKVREINNYHHAHDAYLNAVVGTALIKKYPKLESEFVYGDYKVYDVRKMIAKSEQEIGKATAKYFFYSNIMNFFKTEITLANGEIRKRPLIETNGETGEIVWDKGRDFATVRKVLSMPQVNIVKKTEVQTGGFSKESILPKRNSDKLIARKKDWDPKKYGGFDSPTVAYSVLVVAKVEKGKSKKLKSVKELLGITIMERSSFEKNPIDFLEAKGYKEVKKDLIIKLPKYSLFELENGRKRMLASAGELQKGNELALPSKYVNFLYLASHYEKLKGSPEDNEQKQLFVEQHKHYLDEIIEQISEFSKRVILADANLDKVLSAYNKHRDKPIREQAENIIHLFTLTNLGAPAAFKYFDTTIDRKRYTSTKEVLDATLIHQSITGLYETRIDLSQLGGDSGGSRGKCLSYETEILTVEYGLLPIGKIVEKRIECTVYSVDNNGNIYTQPVAQWHDRGEQEVFEYCLEDGSLIRATKDHKFMTVDGQMLPIDEIFERELDLMRVDNLPN

SEQ ID NO: 1909 - DNA, 2486 bp, synthetic construct
  misc_feature 1..2486: note = Synthetic
  source 1..2486: mol_type = other DNA
aggactcactatttgttttcgcgcccagttgcaaaaagtgtcgaagctcagaataaacgctcaactttggccggatctgccaccatgggcatcaagatcgccacccggaagtacctgggcaagcagaacgtgtacgacatcggcgtggagcgggaccacaacttcgccctgaagaacggcttcatcgcctccaactgctgggagtccggcggctccaagcggaccgccgacggctccgagttcgagtcccccaagaagaagcggaaggtgtccggcggctcctccggcggctccatggactccaccaaggagaagtgcgactcctacaaggacgacctgctgctgcggatgggcctgaacgacaacaaggccggcatggagggcctggacaaggagaagatcaacaagatcatcatggaggccaccaagggctcccggttctacggcaacgagctgaagaaggagaagcaggtgaaccagcggatcgagaacatgatgcagcagaaggcccagatcacctcccagcagctgcggaaggcccagctgcaggtggaccggttcgccatggagctggagcagtcccggaacctgtccaacaccatcgtgcacatcgacatggacgccttctacgccgccgtggagatgcgggacaaccccgagctgaaggacaagcccatcgccgtgggctccatgtccatgctgtccacctccaactaccacgcccggcggttcggcgtgcgggccgccatgcccggcttcatcgccaagcggctgtgcccccagctgatcatcgtgccccccaacttcgacaagtaccgggccgtgtccaaggaggtgaaggagatcctggccgactacgaccccaacttcatggccatgtccctggacgaggcctacctgaacatcaccaagcacctggaggagcggcagaactggcccgaggacaagcggcggtacttcatcaagatgggctcctccgtggagaacgacaaccccggcaaggaggtgaacaagctgtccgagcacgagcggtccatctcccccctgctgttcgaggagtccccctccgacgtgcagccccccggcgaccccttccaggtgaacttcgaggagcagaacaacccccagatcctgcagaactccgtggtgttcggcacctccgcccaggaggtggtgaaggagatccggttccggatcgagcagaagaccaccctgaccgcctccgccggcatcgcccccaacaccatgctggccaaggtgtgctccgacaagaacaagcccaacggccagtaccagatcctgcccaaccggcaggccgtgatggacttcatcaaggacctgcccatccggaaggtgtccggcatcggcaaggtgaccgagaagatgctgaaggccctgggcatcatcacctgcaccgagctgtaccagcagcgggccctgctgtccctgctgttctccgagacctcctggcactacttcctgcacatctccctgggcctgggctccacccacctgacccgggaccgggtgcggaagtccatgtccgtggagcggaccttctccgagatcaacaaggccgaggagcagtactccctgtgccaggagctgtgctccgagctggcccaggacctgcagaaggagcggctgaagggccggaccgtgaccatcaagctgaagaacgtgaacttcgaggtgaagacccgggcctccaccgtgtcctccgtggtgtccaccgccgaggagatcttcgccatcgccaaggagctgctgaagaccgagatcgacgccgacttcccccaccccctgcggctgcggctgatgggcgtgcggatctcctccttccccaacgaggaggaccggaagcaccagcagggcggcggctccggcaagcggaccgccgacggctccggcggcggctcccccaagaagaagcggaaggtgcccgccgccaagcgcgtgaagctggactagctagcaccagcctcaagaacacccgaatggagtctctaagctacataataccaacttacactttacaaaatgttgtcccccaaaatgtagccattcgtatctgctcctaataaaaagaaagtttcttcacattctctcgagaaaaaaaaaaaatggaaaaaaaaaaaacggaaaaaaaaaaaaggtaaaaaaaaaaaatataaaaaaaaaaaacataaaaaaaaaaaacgaaaaaaaaaaaacgtaaaaaaaaaaaactcaaaaaaaaaaaagataaaaaaaaaaaacctaaaaaaaaaaaatgtaaaaaaaaaaaagggaaaaaaaaaaaacgcaaaaaaaaaaaacacaaaaaaaaaaaatgcaaaaaaaaaaaatcgaaaaaaaaaaaatctaaaaaaaaaaaacgaaaaaaaaaaaacccaaaaaaaaaaaagacaaaaaaaaaaaatagaaaaaaaaaaagttaaaaaaaaaaaactgaaaaaaaaaaaatttaaaaaaaaaaaatctag

SEQ ID NO: 1910 - DNA, 1887 bp, synthetic construct
  misc_feature 1..1887: note = Synthetic
  source 1..1887: mol_type = other DNA
atgggcatcaagatcgccacccggaagtacctgggcaagcagaacgtgtacgacatcggcgtggagcgggaccacaacttcgccctgaagaacggcttcatcgcctccaactgctgggagtccggcggctccaagcggaccgccgacggctccgagttcgagtcccccaagaagaagcggaaggtgtccggcggctcctccggcggctccatggactccaccaaggagaagtgcgactcctacaaggacgacctgctgctgcggatgggcctgaacgacaacaaggccggcatggagggcctggacaaggagaagatcaacaagatcatcatggaggccaccaagggctcccggttctacggcaacgagctgaagaaggagaagcaggtgaaccagcggatcgagaacatgatgcagcagaaggcccagatcacctcccagcagctgcggaaggcccagctgcaggtggaccggttcgccatggagctggagcagtcccggaacctgtccaacaccatcgtgcacatcgacatggacgccttctacgccgccgtggagatgcgggacaaccccgagctgaaggacaagcccatcgccgtgggctccatgtccatgctgtccacctccaactaccacgcccggcggttcggcgtgcgggccgccatgcccggcttcatcgccaagcggctgtgcccccagctgatcatcgtgccccccaacttcgacaagtaccgggccgtgtccaaggaggtgaaggagatcctggccgactacgaccccaacttcatggccatgtccctggacgaggcctacctgaacatcaccaagcacctggaggagcggcagaactggcccgaggacaagcggcggtacttcatcaagatgggctcctccgtggagaacgacaaccccggcaaggaggtgaacaagctgtccgagcacgagcggtccatctcccccctgctgttcgaggagtccccctccgacgtgcagccccccggcgaccccttccaggtgaacttcgaggagcagaacaacccccagatcctgcagaactccgtggtgttcggcacctccgcccaggaggtggtgaaggagatccggttccggatcgagcagaagaccaccctgaccgcctccgccggcatcgcccccaacaccatgctggccaaggtgtgctccgacaagaacaagcccaacggccagtaccagatcctgcccaaccggcaggccgtgatggacttcatcaaggacctgcccatccggaaggtgtccggcatcggcaaggtgaccgagaagatgctgaaggccctgggcatcatcacctgcaccgagctgtaccagcagcgggccctgctgtccctgctgttctccgagacctcctggcactacttcctgcacatctccctgggcctgggctccacccacctgacccgggaccgggtgcggaagtccatgtccgtggagcggaccttctccgagatcaacaaggccgaggagcagtactccctgtgccaggagctgtgctccgagctggcccaggacctgcagaaggagcggctgaagggccggaccgtgaccatcaagctgaagaacgtgaacttcgaggtgaagacccgggcctccaccgtgtcctccgtggtgtccaccgccgaggagatcttcgccatcgccaaggagctgctgaagaccgagatcgacgccgacttcccccaccccctgcggctgcggctgatgggcgtgcggatctcctccttccccaacgaggaggaccggaagcaccagcagggcggcggctccggcaagcggaccgccgacggctccggcggcggctcccccaagaagaagcggaaggtgcccgccgccaagcgcgtgaagctggactag

SEQ ID NO: 1911 - protein, 628 aa, synthetic construct
  REGION 1..628: note = Synthetic
MGIKIATRKYLGKQNVYDIGVERDHNFALKNGFIASNCWESGGSKRTADGSEFESPKKKRKVSGGSSGGSMDSTKEKCDSYKDDLLLRMGLNDNKAGMEGLDKEKINKIIMEATKGSRFYGNELKKEKQVNQRIENMMQQKAQITSQQLRKAQLQVDRFAMELEQSRNLSNTIVHIDMDAFYAAVEMRDNPELKDKPIAVGSMSMLSTSNYHARRFGVRAAMPGFIAKRLCPQLIIVPPNFDKYRAVSKEVKEILADYDPNFMAMSLDEAYLNITKHLEERQNWPEDKRRYFIKMGSSVENDNPGKEVNKLSEHERSISPLLFEESPSDVQPPGDPFQVNFEEQNNPQILQNSVVFGTSAQEVVKEIRFRIEQKTTLTASAGIAPNTMLAKVCSDKNKPNGQYQILPNRQAVMDFIKDLPIRKVSGIGKVTEKMLKALGIITCTELYQQRALLSLLFSETSWHYFLHISLGLGSTHLTRDRVRKSMSVERTFSEINKAEEQYSLCQELCSELAQDLQKERLKGRTVTIKLKNVNFEVKTRASTVSSVVSTAEEIFAIAKELLKTEIDADFPHPLRLRLMGVRISSFPNEEDRKHQQGGGSGKRTADGSGGGSPKKKRKVPAAKRVKLD

SEQ ID NO: 1912 - DNA, 5108 bp, synthetic construct
  misc_feature 1..5108: note = Synthetic
  source 1..5108: mol_type = other DNA
aggactcactatttgttttcgcgcccagttgcaaaaagtgtcgaagctcagaataaacgctcaactttggccggatctgccaccatggacaagaagtactccatcggcctggacatcggcaccaactccgtgggctgggccgtgatcaccgacgagtacaaggtgccctccaagaagttcaaggtgctgggcaacaccgaccggcactccatcaagaagaacctgatcggcgccctgctgttcgactccggcgagaccgccgaggccacccggctgaagcggaccgcccggcggcggtacacccggcggaagaaccggatctgctacctgcaggagatcttctccaacgagatggccaaggtggacgactccttcttccaccggctggaggagtccttcctggtggaggaggacaagaagcacgagcggcaccccatcttcggcaacatcgtggacgaggtggcctaccacgagaagtaccccaccatctaccacctgcggaagaagctggtggactccaccgacaaggccgacctgcggctgatctacctggccctggcccacatgatcaagttccggggccacttcctgatcgagggcgacctgaaccccgacaactccgacgtggacaagctgttcatccagctggtgcagacctacaaccagctgttcgaggagaaccccatcaacgcctccggcgtggacgccaaggccatcctgtccgcccggctgtccaagtcccggcggctggagaacctgatcgcccagctgcccggcgagaagaagaacggcctgttcggcaacctgatcgccctgtccctgggcctgacccccaacttcaagtccaacttcgacctggccgaggacgccaagctgcagctgtccaaggacacctacgacgacgacctggacaacctgctggcccagatcggcgaccagtacgccgacctgttcctggccgccaagaacctgtccgacgccatcctgctgtccgacatcctgcgggtgaacaccgagatcaccaaggcccccctgtccgcctccatgatcaagcggtacgacgagcaccaccaggacctgaccctgctgaaggccctggtgcggcagcagctgcccgagaagtacaaggagatcttcttcgaccagtccaagaacggctacgccggctacatcgacggcggcgcctcccaggaggagttctacaagttcatcaagcccatcctggagaagatggacggcaccgaggagctgctggtgaagctgaaccgggaggacctgctgcggaagcagcggaccttcgacaacggctccatcccccaccagatccacctgggcgagctgcacgccatcctgcggcggcaggaggacttctaccccttcctgaaggacaaccgggagaagatcgagaagatcctgaccttccggatcccctactacgtgggccccctggcccggggcaactcccggttcgcctggatgacccggaagtccgaggagaccatcaccccctggaacttcgaggaggtggtggacaagggcgcctccgcccagtccttcatcgagcggatgaccaacttcgacaagaacctgcccaacgagaaggtgctgcccaagcactccctgctgtacgagtacttcaccgtgtacaacgagctgaccaaggtgaagtacgtgaccgagggcatgcggaagcccgccttcctgtccggcgagcagaagaaggccatcgtggacctgctgttcaagaccaaccggaaggtgaccgtgaagcagctgaaggaggactacttcaagaagatcgagtgcttcgactccgtggagatctccggcgtggaggaccggttcaacgcctccctgggcacctaccacgacctgctgaagatcatcaaggacaaggacttcctggacaacgaggagaacgaggacatcctggaggacatcgtgctgaccctgaccctgttcgaggaccgggagatgatcgaggagcggctgaagacctacgcccacctgttcgacgacaaggtgatgaagcagctgaagcggcggcggtacaccggctggggccggctgtcccggaagctgatcaacggcatccgggacaagcagtccggcaagaccatcctggacttcctgaagtccgacggcttcgccaaccggaacttcatgcagctgatccacgacgactccctgaccttcaaggaggacatccagaaggcccaggtgtccggccagggcgactccctgcacgagcacatcgccaacctggccggctcccccgccatcaagaagggcatcctgcagaccgtgaaggtggtggacgagctggtgaaggtgatgggccggcacaagcccgagaacatcgtgatcgagatggcccgggagaaccagaccacccagaagggccagaagaactcccgggagcggatgaagcggatcgaggagggcatcaaggagctgggctcccagatcctgaaggagcaccccgtggagaacacccagctgcagaacgagaagctgtacctgtactacctgcagaacggccgggacatgtacgtggaccaggagctggacatcaaccggctgtccgactacgacgtggacgccatcgtgccccagtccttcctgaaggacgactccatcgacaacaaggtgctgacccggtccgacaagaaccggggcaagtccgacaacgtgccctccgaggaggtggtgaagaagatgaagaactactggcggcagctgctgaacgccaagctgatcacccagcggaagttcgacaacctgaccaaggccgagcggggcggcctgtccgagctggacaaggccggcttcatcaagcggcagctggtggagacccggcagatcaccaagcacgtggcccagatcctggactcccggatgaacaccaagtacgacgagaacgacaagctgatccgggaggtgaaggtgatcaccctgaagtccaagctggtgtccgacttccggaaggacttccagttctacaaggtgcgggagatcaacaactaccaccacgcccacgacgcctacctgaacgccgtggtgggcaccgccctgatcaagaagtaccccaagctggagtccgagttcgtgtacggcgactacaaggtgtacgacgtgcggaagatgatcgccaagtccgagcaggagatcggcaaggccaccgccaagtacttcttctactccaacatcatgaacttcttcaagaccgagatcaccctggccaacggcgagatccggaagcggcccctgatcgagaccaacggcgagaccggcgagatcgtgtgggacaagggccgggacttcgccaccgtgcggaaggtgctgtccatgccccaggtgaacatcgtgaagaagaccgaggtgcagaccggcggcttctccaaggagtccatcctgcccaagcggaactccgacaagctgatcgcccggaagaaggactgggaccccaagaagtacggcggcttcgactcccccaccgtggcctactccgtgctggtggtggccaaggtggagaagggcaagtccaagaagctgaagtccgtgaaggagctgctgggcatcaccatcatggagcggtcctccttcgagaagaaccccatcgacttcctggaggccaagggctacaaggaggtgaagaaggacctgatcatcaagctgcccaagtactccctgttcgagctggagaacggccggaagcggatgctggcctccgccggcgagctgcagaagggcaacgagctggccctgccctccaagtacgtgaacttcctgtacctggcctcccactacgagaagctgaagggctcccccgaggacaacgagcagaagcagctgttcgtggagcagcacaagcactacctggacgagatcatcgagcagatctccgagttctccaagcgggtgatcctggccgacgccaacctggacaaggtgctgtccgcctacaacaagcaccgggacaagcccatccgggagcaggccgagaacatcatccacctgttcaccctgaccaacctgggcgcccccgccgccttcaagtacttcgacaccaccatcgaccggaagcggtacacctccaccaaggaggtgctggacgccaccctgatccaccagtccatcaccggcctgtacgagacccggatcgacctgtcccagctgggcggcgactccggcggctcctccggcggctccaagcggaccgccgacggctccgagttcgagtcccccaagaagaagcggaaggtgtccggcggctcccggggcaagtgcctgtcctacgacaccgagatcctgaccgtggagtacggcttcctgcccatcggcaagatcgtggaggagcggatcgagtgcaccgtgtacaccgtggacaagaacggcttcgtgtacacccagcccatcgcccagtggcacaaccgcggcgagcaggaggtgttcgagtactgcctggaggacggctccatcatccgcgccaccaaggaccacaagttcatgaccaccgacggccagatgctgcccatcgacgagatcttcgagcgcggcctggacctgaagcaggtggacggcctgccctagctagcaccagcctcaagaacacccgaatggagtctctaagctacataataccaacttacactttacaaaatgttgtcccccaaaatgtagccattcgtatctgctcctaataaaaagaaagtttcttcacattctctcgagaaaaaaaaaaaatggaaaaaaaaaaaacggaaaaaaaaaaaaggtaaaaaaaaaaaatataaaaaaaaaaaacataaaaaaaaaaaacgaaaaaaaaaaaacgtaaaaaaaaaaaactcaaaaaaaaaaaagataaaaaaaaaaaacctaaaaaaaaaaaatgtaaaaaaaaaaaagggaaaaaaaaaaaacgcaaaaaaaaaaaacacaaaaaaaaaaaatgcaaaaaaaaaaaatcgaaaaaaaaaaaatctaaaaaaaaaaaacgaaaaaaaaaaaacccaaaaaaaaaaaagacaaaaaaaaaaaatagaaaaaaaaaaagttaaaaaaaaaaaactgaaaaaaaaaaaatttaaaaaaaaaaaatctag

SEQ ID NO: 1913 - DNA, 4509 bp, synthetic construct
  misc_feature 1..4509: note = Synthetic
  source 1..4509: mol_type = other DNA
atggacaagaagtactccatcggcctggacatcggcaccaactccgtgggctgggccgtgatcaccgacgagtacaaggtgccctccaagaagttcaaggtgctgggcaacaccgaccggcactccatcaagaagaacctgatcggcgccctgctgttcgactccggcgagaccgccgaggccacccggctgaagcggaccgcccggcggcggtacacccggcggaagaaccggatctgctacctgcaggagatcttctccaacgagatggccaaggtggacgactccttcttccaccggctggaggagtccttcctggtggaggaggacaagaagcacgagcggcaccccatcttcggcaacatcgtggacgaggtggcctaccacgagaagtaccccaccatctaccacctgcggaagaagctggtggactccaccgacaaggccgacctgcggctgatctacctggccctggcccacatgatcaagttccggggccacttcctgatcgagggcgacctgaaccccgacaactccgacgtggacaagctgttcatccagctggtgcagacctacaaccagctgttcgaggagaaccccatcaacgcctccggcgtggacgccaaggccatcctgtccgcccggctgtccaagtcccggcggctggagaacctgatcgcccagctgcccggcgagaagaagaacggcctgttcggcaacctgatcgccctgtccctgggcctgacccccaacttcaagtccaacttcgacctggccgaggacgccaagctgcagctgtccaaggacacctacgacgacgacctggacaacctgctggcccagatcggcgaccagtacgccgacctgttcctggccgccaagaacctgtccgacgccatcctgctgtccgacatcctgcgggtgaacaccgagatcaccaaggcccccctgtccgcctccatgatcaagcggtacgacgagcaccaccaggacctgaccctgctgaaggccctggtgcggcagcagctgcccgagaagtacaaggagatcttcttcgaccagtccaagaacggctacgccggctacatcgacggcggcgcctcccaggaggagttctacaagttcatcaagcccatcctggagaagatggacggcaccgaggagctgctggtgaagctgaaccgggaggacctgctgcggaagcagcggaccttcgacaacggctccatcccccaccagatccacctgggcgagctgcacgccatcctgcggcggcaggaggacttctaccccttcctgaaggacaaccgggagaagatcgagaagatcctgaccttccggatcccctactacgtgggccccctggcccggggcaactcccggttcgcctggatgacccggaagtccgaggagaccatcaccccctggaacttcgaggaggtggtggacaagggcgcctccgcccagtccttcatcgagcggatgaccaacttcgacaagaacctgcccaacgagaaggtgctgcccaagcactccctgctgtacgagtacttcaccgtgtacaacgagctgaccaaggtgaagtacgtgaccgagggcatgcggaagcccgccttcctgtccggcgagcagaagaaggccatcgtggacctgctgttcaagaccaaccggaaggtgaccgtgaagcagctgaaggaggactacttcaagaagatcgagtgcttcgactccgtggagatctccggcgtggaggaccggttcaacgcctccctgggcacctaccacgacctgctgaagatcatcaaggacaaggacttcctggacaacgaggagaacgaggacatcctggaggacatcgtgctgaccctgaccctgttcgaggaccgggagatgatcgaggagcggctgaagacctacgcccacctgttcgacgacaaggtgatgaagcagctgaagcggcggcggtacaccggctggggccggctgtcccggaagctgatcaacggcatccgggacaagcagtccggcaagaccatcctggacttcctgaagtccgacggcttcgccaaccggaacttcatgcagctgatccacgacgactccctgaccttcaaggaggacatccagaaggcccaggtgtccggccagggcgactccctgcacgagcacatcgccaacctggccggctcccccgccatcaagaagggcatcctgcagaccgtgaaggtggtggacgagctggtgaaggtgatgggccggcacaagcccgagaacatcgtgatcgagatggcccgggagaaccagaccacccagaagggccagaagaactcccgggagcggatgaagcggatcgaggagggcatcaaggagctgggctcccagatcctgaaggagcaccccgtggagaacacccagctgcagaacgagaagctgtacctgtactacctgcagaacggccgggacatgtacgtggaccaggagctggacatcaaccggctgtccgactacgacgtggacgccatcgtgccccagtccttcctgaaggacgactccatcgacaacaaggtgctgacccggtccgacaagaaccggggcaagtccgacaacgtgccctccgaggaggtggtgaagaagatgaagaactactggcggcagctgctgaacgccaagctgatcacccagcggaagttcgacaacctgaccaaggccgagcggggcggcctgtccgagctggacaaggccggcttcatcaagcggcagctggtggagacccggcagatcaccaagcacgtggcccagatcctggactcccggatgaacaccaagtacgacgagaacgacaagctgatccgggaggtgaaggtgatcaccctgaagtccaagctggtgtccgacttccggaaggacttccagttctacaaggtgcgggagatcaacaactaccaccacgcccacgacgcctacctgaacgccgtggtgggcaccgccctgatcaagaagtaccccaagctggagtccgagttcgtgtacggcgactacaaggtgtacgacgtgcggaagatgatcgccaagtccgagcaggagatcggcaaggccaccgccaagtacttcttctactccaacatcatgaacttcttcaagaccgagatcaccctggccaacggcgagatccggaagcggcccctgatcgagaccaacggcgagaccggcgagatcgtgtgggacaagggccgggacttcgccaccgtgcggaaggtgctgtccatgccccaggtgaacatcgtgaagaagaccgaggtgcagaccggcggcttctccaaggagtccatcctgcccaagcggaactccgacaagctgatcgcccggaagaaggactgggaccccaagaagtacggcggcttcgactcccccaccgtggcctactccgtgctggtggtggccaaggtggagaagggcaagtccaagaagctgaagtccgtgaaggagctgctgggcatcaccatcatggagcggtcctccttcgagaagaaccccatcgacttcctggaggccaagggctacaaggaggtgaagaaggacctgatcatcaagctgcccaagtactccctgttcgagctggagaacggccggaagcggatgctggcctccgccggcgagctgcagaagggcaacgagctggccctgccctccaagtacgtgaacttcctgtacctggcctcccactacgagaagctgaagggctcccccgaggacaacgagcagaagcagctgttcgtggagcagcacaagcactacctggacgagatcatcgagcagatctccgagttctccaagcgggtgatcctggccgacgccaacctggacaaggtgctgtccgcctacaacaagcaccgggacaagcccatccgggagcaggccgagaacatcatccacctgttcaccctgaccaacctgggcgcccccgccgccttcaagtacttcgacaccaccatcgaccggaagcggtacacctccaccaaggaggtgctggacgccaccctgatccaccagtccatcaccggcctgtacgagacccggatcgacctgtcccagctgggcggcgactccggcggctcctccggcggctccaagcggaccgccgacggctccgagttcgagtcccccaagaagaagcggaaggtgtccggcggctcccggggcaagtgcctgtcctacgacaccgagatcctgaccgtggagtacggcttcctgcccatcggcaagatcgtggaggagcggatcgagtgcaccgtgtacaccgtggacaagaacggcttcgtgtacacccagcccatcgcccagtggcacaaccgcggcgagcaggaggtgttcgagtactgcctggaggacggctccatcatccgcgccaccaaggaccacaagttcatgaccaccgacggccagatgctgcccatcgacgagatcttcgagcgcggcctggacctgaagcaggtggacggcctgccctag

SEQ ID NO: 1914 - protein, 1502 aa, synthetic construct
  REGION 1..1502: note = Synthetic
MDKKYSIGLDIGTNSVGWAVITDEYKVPSKKFKVLGNTDRHSIKKNLIGALLFDSGETAEATRLKRTARRRYTRRKNRICYLQEIFSNEMAKVDDSFFHRLEESFLVEEDKKHERHPIFGNIVDEVAYHEKYPTIYHLRKKLVDSTDKADLRLIYLALAHMIKFRGHFLIEGDLNPDNSDVDKLFIQLVQTYNQLFEENPINASGVDAKAILSARLSKSRRLENLIAQLPGEKKNGLFGNLIALSLGLTPNFKSNFDLAEDAKLQLSKDTYDDDLDNLLAQIGDQYADLFLAAKNLSDAILLSDILRVNTEITKAPLSASMIKRYDEHHQDLTLLKALVRQQLPEKYKEIFFDQSKNGYAGYIDGGASQEEFYKFIKPILEKMDGTEELLVKLNREDLLRKQRTFDNGSIPHQIHLGELHAILRRQEDFYPFLKDNREKIEKILTFRIPYYVGPLARGNSRFAWMTRKSEETITPWNFEEVVDKGASAQSFIERMTNFDKNLPNEKVLPKHSLLYEYFTVYNELTKVKYVTEGMRKPAFLSGEQKKAIVDLLFKTNRKVTVKQLKEDYFKKIECFDSVEISGVEDRFNASLGTYHDLLKIIKDKDFLDNEENEDILEDIVLTLTLFEDREMIEERLKTYAHLFDDKVMKQLKRRRYTGWGRLSRKLINGIRDKQSGKTILDFLKSDGFANRNFMQLIHDDSLTFKEDIQKAQVSGQGDSLHEHIANLAGSPAIKKGILQTVKVVDELVKVMGRHKPENIVIEMARENQTTQKGQKNSRERMKRIEEGIKELGSQILKEHPVENTQLQNEKLYLYYLQNGRDMYVDQELDINRLSDYDVDAIVPQSFLKDDSIDNKVLTRSDKNRGKSDNVPSEEVVKKMKNYWRQLLNAKLITQRKFDNLTKAERGGLSELDKAGFIKRQLVETRQITKHVAQILDSRMNTKYDENDKLIREVKVITLKSKLVSDFRKDFQFYKVREINNYHHAHDAYLNAVVGTALIKKYPKLESEFVYGDYKVYDVRKMIAKSEQEIGKATAKYFFYSNIMNFFKTEITLANGEIRKRPLIETNGETGEIVWDKGRDFATVRKVLSMPQVNIVKKTEVQTGGFSKESILPKRNSDKLIARKKDWDPKKYGGFDSPTVAYSVLVVAKVEKGKSKKLKSVKELLGITIMERSSFEKNPIDFLEAKGYKEVKKDLIIKLPKYSLFELENGRKRMLASAGELQKGNELALPSKYVNFLYLASHYEKLKGSPEDNEQKQLFVEQHKHYLDEIIEQISEFSKRVILADANLDKVLSAYNKHRDKPIREQAENIIHLFTLTNLGAPAAFKYFDTTIDRKRYTSTKEVLDATLIHQSITGLYETRIDLSQLGGDSGGSSGGSKRTADGSEFESPKKKRKVSGGSRGKCLSYDTEILTVEYGFLPIGKIVEERIECTVYTVDKNGFVYTQPIAQWHNRGEQEVFEYCLEDGSIIRATKDHKFMTTDGQMLPIDEIFERGLDLKQVDGLP

SEQ ID NO: 1915 - DNA, 2408 bp, synthetic construct
  misc_feature 1..2408: note = Synthetic
  source 1..2408: mol_type = other DNA
aggactcactatttgttttcgcgcccagttgcaaaaagtgtcgaagctcagaataaacgctcaactttggccggatctgccaccatgggcgtgaagatcatctcccgcaagtccctgggcacccagaacgtgtacgacatcggcgtggagaaggaccacaacttcctgctgaagaacggcctggtggcctccaactgcttcaactccggcggctccatggactccaccaaggagaagtgcgactcctacaaggacgacctgctgctgcggatgggcctgaacgacaacaaggccggcatggagggcctggacaaggagaagatcaacaagatcatcatggaggccaccaagggctcccggttctacggcaacgagctgaagaaggagaagcaggtgaaccagcggatcgagaacatgatgcagcagaaggcccagatcacctcccagcagctgcggaaggcccagctgcaggtggaccggttcgccatggagctggagcagtcccggaacctgtccaacaccatcgtgcacatcgacatggacgccttctacgccgccgtggagatgcgggacaaccccgagctgaaggacaagcccatcgccgtgggctccatgtccatgctgtccacctccaactaccacgcccggcggttcggcgtgcgggccgccatgcccggcttcatcgccaagcggctgtgcccccagctgatcatcgtgccccccaacttcgacaagtaccgggccgtgtccaaggaggtgaaggagatcctggccgactacgaccccaacttcatggccatgtccctggacgaggcctacctgaacatcaccaagcacctggaggagcggcagaactggcccgaggacaagcggcggtacttcatcaagatgggctcctccgtggagaacgacaaccccggcaaggaggtgaacaagctgtccgagcacgagcggtccatctcccccctgctgttcgaggagtccccctccgacgtgcagccccccggcgaccccttccaggtgaacttcgaggagcagaacaacccccagatcctgcagaactccgtggtgttcggcacctccgcccaggaggtggtgaaggagatccggttccggatcgagcagaagaccaccctgaccgcctccgccggcatcgcccccaacaccatgctggccaaggtgtgctccgacaagaacaagcccaacggccagtaccagatcctgcccaaccggcaggccgtgatggacttcatcaaggacctgcccatccggaaggtgtccggcatcggcaaggtgaccgagaagatgctgaaggccctgggcatcatcacctgcaccgagctgtaccagcagcgggccctgctgtccctgctgttctccgagacctcctggcactacttcctgcacatctccctgggcctgggctccacccacctgacccgggaccgggtgcggaagtccatgtccgtggagcggaccttctccgagatcaacaaggccgaggagcagtactccctgtgccaggagctgtgctccgagctggcccaggacctgcagaaggagcggctgaagggccggaccgtgaccatcaagctgaagaacgtgaacttcgaggtgaagacccgggcctccaccgtgtcctccgtggtgtccaccgccgaggagatcttcgccatcgccaaggagctgctgaagaccgagatcgacgccgacttcccccaccccctgcggctgcggctgatgggcgtgcggatctcctccttccccaacgaggaggaccggaagcaccagcagggcggcggctccggcaagcggaccgccgacggctccggcggcggctcccccaagaagaagcggaaggtgcccgccgccaagcgcgtgaagctggactagctagcaccagcctcaagaacacccgaatggagtctctaagctacataataccaacttacactttacaaaatgttgtcccccaaaatgtagccattcgtatctgctcctaataaaaagaaagtttcttcacattctctcgagaaaaaaaaaaaatggaaaaaaaaaaaacggaaaaaaaaaaaaggtaaaaaaaaaaaatataaaaaaaaaaaacataaaaaaaaaaaacgaaaaaaaaaaaacgtaaaaaaaaaaaactcaaaaaaaaaaaagataaaaaaaaaaaacctaaaaaaaaaaaatgtaaaaaaaaaaaagggaaaaaaaaaaaacgcaaaaaaaaaaaacacaaaaaaaaaaaatgcaaaaaaaaaaaatcgaaaaaaaaaaaatctaaaaaaaaaaaacgaaaaaaaaaaaacccaaaaaaaaaaaagacaaaaaaaaaaaatagaaaaaaaaaaagttaaaaaaaaaaaactgaaaaaaaaaaaatttaaaaaaaaaaaatctag

SEQ ID NO: 1916 - DNA, 1809 bp, synthetic construct
  misc_feature 1..1809: note = Synthetic
  source 1..1809: mol_type = other DNA
atgggcgtgaagatcatctcccgcaagtccctgggcacccagaacgtgtacgacatcggcgtggagaaggaccacaacttcctgctgaagaacggcctggtggcctccaactgcttcaactccggcggctccatggactccaccaaggagaagtgcgactcctacaaggacgacctgctgctgcggatgggcctgaacgacaacaaggccggcatggagggcctggacaaggagaagatcaacaagatcatcatggaggccaccaagggctcccggttctacggcaacgagctgaagaaggagaagcaggtgaaccagcggatcgagaacatgatgcagcagaaggcccagatcacctcccagcagctgcggaaggcccagctgcaggtggaccggttcgccatggagctggagcagtcccggaacctgtccaacaccatcgtgcacatcgacatggacgccttctacgccgccgtggagatgcgggacaaccccgagctgaaggacaagcccatcgccgtgggctccatgtccatgctgtccacctccaactaccacgcccggcggttcggcgtgcgggccgccatgcccggcttcatcgccaagcggctgtgcccccagctgatcatcgtgccccccaacttcgacaagtaccgggccgtgtccaaggaggtgaaggagatcctggccgactacgaccccaacttcatggccatgtccctggacgaggcctacctgaacatcaccaagcacctggaggagcggcagaactggcccgaggacaagcggcggtacttcatcaagatgggctcctccgtggagaacgacaaccccggcaaggaggtgaacaagctgtccgagcacgagcggtccatctcccccctgctgttcgaggagtccccctccgacgtgcagccccccggcgaccccttccaggtgaacttcgaggagcagaacaacccccagatcctgcagaactccgtggtgttcggcacctccgcccaggaggtggtgaaggagatccggttccggatcgagcagaagaccaccctgaccgcctccgccggcatcgcccccaacaccatgctggccaaggtgtgctccgacaagaacaagcccaacggccagtaccagatcctgcccaaccggcaggccgtgatggacttcatcaaggacctgcccatccggaaggtgtccggcatcggcaaggtgaccgagaagatgctgaaggccctgggcatcatcacctgcaccgagctgtaccagcagcgggccctgctgtccctgctgttctccgagacctcctggcactacttcctgcacatctccctgggcctgggctccacccacctgacccgggaccgggtgcggaagtccatgtccgtggagcggaccttctccgagatcaacaaggccgaggagcagtactccctgtgccaggagctgtgctccgagctggcccaggacctgcagaaggagcggctgaagggccggaccgtgaccatcaagctgaagaacgtgaacttcgaggtgaagacccgggcctccaccgtgtcctccgtggtgtccaccgccgaggagatcttcgccatcgccaaggagctgctgaagaccgagatcgacgccgacttcccccaccccctgcggctgcggctgatgggcgtgcggatctcctccttccccaacgaggaggaccggaagcaccagcagggcggcggctccggcaagcggaccgccgacggctccggcggcggctcccccaagaagaagcggaaggtgcccgccgccaagcgcgtgaagctggactag

SEQ ID NO: 1917 - protein, 602 aa, synthetic construct
  REGION 1..602: note = Synthetic
MGVKIISRKSLGTQNVYDIGVEKDHNFLLKNGLVASNCFNSGGSMDSTKEKCDSYKDDLLLRMGLNDNKAGMEGLDKEKINKIIMEATKGSRFYGNELKKEKQVNQRIENMMQQKAQITSQQLRKAQLQVDRFAMELEQSRNLSNTIVHIDMDAFYAAVEMRDNPELKDKPIAVGSMSMLSTSNYHARRFGVRAAMPGFIAKRLCPQLIIVPPNFDKYRAVSKEVKEILADYDPNFMAMSLDEAYLNITKHLEERQNWPEDKRRYFIKMGSSVENDNPGKEVNKLSEHERSISPLLFEESPSDVQPPGDPFQVNFEEQNNPQILQNSVVFGTSAQEVVKEIRFRIEQKTTLTASAGIAPNTMLAKVCSDKNKPNGQYQILPNRQAVMDFIKDLPIRKVSGIGKVTEKMLKALGIITCTELYQQRALLSLLFSETSWHYFLHISLGLGSTHLTRDRVRKSMSVERTFSEINKAEEQYSLCQELCSELAQDLQKERLKGRTVTIKLKNVNFEVKTRASTVSSVVSTAEEIFAIAKELLKTEIDADFPHPLRLRLMGVRISSFPNEEDRKHQQGGGSGKRTADGSGGGSPKKKRKVPAAKRVKLD

SEQ ID NO: 1918 - DNA, 3530 bp, synthetic construct
  misc_feature 1..3530: note = Synthetic
  source 1..3530: mol_type = other DNA
aggactcactatttgttttcgcgcccagttgcaaaaagtgtcgaagctcagaataaacgctcaactttggccggatctgccaccatgggcgtgaagatcatctcccgcaagtccctgggcacccagaacgtgtacgacatcggcgtggagaaggaccacaacttcctgctgaagaacggcctggtggcctccaactgcttcaacggcgcccccgagtccgccaccgagtccggcggcacctccaccgagtccgagggctccgccggccccaagaagaagcggaaggtgacctccaccgagtccgagggctccgccggctccgccggctccacctccggctcctcctccggcatgaagatcgccgtggtggacaaggccctgaacaacacccggtacgacaagcacttccagctgtacggcgaggaggtggacgtgttccacatgtgcaacgagaagctgtccggccggctgctgaagaagcacatcaccatcggcacccccgagaaccccttcgaccccaacgactacgacttcgtgatcctggtgggcgccgagcccttcctgtacttcgccggcaagaagggcatcggcgactacaccggcaagcgggtggagtacaacggctacgccaactggatcgcctccatctcccccgcccagctgcacttcaagcccgagatgaagcccgtgttcgacgccaccgtggagaacatccacgacatcatcaacggccgggagaagatcgccaaggccggcgactaccggcccatcaccgaccccgacgaggccgaggagtacatcaagatggtgtacaacatggtgatcggccccgtggccttcgcctccgccacctccgccctgtactgccgggacggctacctgctgggcgtgtccatctcccaccaggagtaccagggcgtgtacatcgactccgactgcctgaccgaggtggccgtgtactacctgcagaagatcctggactccgagaaccacaccatcgtgttccacaacctgaagttcgacatgcacttctacaagtaccacctgggcctgaccttcgacaaggcccacaaggagcggcggctgcacgacaccatgctgcagcactacgtgctggacgagcggcggggcacccacggcctgaagtccctggccatgaagtacaccgacatgggcgactacgacttcgagctggacaagttcaaggacgactactgcaaggcccacaagatcaagaaggaggacttcacctacgacctgatccccttcgacatcatgtggccctacgccgccaaggacaccgacgccaccatccggctgcacaacttcttcctgcccaagatcgagaagaacgagaagctgtgctccctgtactacgacgtgctgatgcccggctgcgtgttcctgcagcgggtggaggaccggggcgtgcccatctccatcgaccggctgaaggaggcccagtaccagctgacccacaacctgaacaaggcccgggagaagctgtacacctaccccgaggtgaagcagctggagcaggaccagaacgaggccttcaaccccaactccgtgaagcagctgcgggtgctgctgttcgactacgtgggcctgacccccaccggcaagctgaccgacaccggcgccgactccaccgacgccgaggccctgaacgagctggccacccagcaccccatcgccaagaccctgctggagatccggaagctgaccaagctgatctccacctacgtggagaagatcctgctgtccatcgacgccgacggctgcatccggaccggcttccacgagcacatgaccacctccggccggctgtcctcctccggcaagctgaacctgcagcagctgccccgggacgagtccatcatcaagggctgcgtggtggccccccccggctaccgggtgatcgcctgggacctgaccaccgccgaggtgtactacgccgccgtgctgtccggcgaccggaacatgcagcaggtgttcatcaacatgcggaacgagcccgacaagtaccccgacttccactccaacatcgcccacatggtgttcaagctgcagtgcgagccccgggacgtgaagaagctgttccccgccctgcggcaggccgccaaggccatcaccttcggcatcctgtacggctccggccccgccaaggtggcccactccgtgaacgaggccctgctggagcaggccgccaagaccggcgagcccttcgtggagtgcaccgtggccgacgccaaggagtacatcgagacctacttcggccagttcccccagctgaagcggtggatcgacaagtgccacgaccagatcaagaaccacggcttcatctactcccacttcggccggaagcggcggctgcacaacatccactccgaggaccggggcgtgcagggcgaggagatccggtccggcttcaacgccatcatccagtccgcctcctccgactccctgctgctgggcgccgtggacgccgacaacgagatcatctccctgggcctggagcaggagatgaagatcgtgatgctggtgcacgactccgtggtggccatcgtgcgggaggacctgatcgaccagtacaacgagatcctgatccggaacatccagaaggaccggggcatctccatccccggctgccccatcggcatcgactccgactccgaggccggcggctcccgggactactcctgcggcaagatgaagaagcagcacccctccatcgcctgcatcgacgacgacgagtacacccggtacgtgaagggcgtgctgctggacgccgagttcgagtacaagaagctggccgccatggacaaggagcaccccgaccactccaagtacaaggacgacaagttcatcgccgtgtgcaaggacctggacaacgtgaagcggatcctgggcgccggcggcggctccggcaagcggaccgccgacggctccggcggcggctcccccaagaagaagcggaaggtgcccgccgccaagcgcgtgaagctggactagctagcaccagcctcaagaacacccgaatggagtctctaagctacataataccaacttacactttacaaaatgttgtcccccaaaatgtagccattcgtatctgctcctaataaaaagaaagtttcttcacattctctcgagaaaaaaaaaaaatggaaaaaaaaaaaacggaaaaaaaaaaaaggtaaaaaaaaaaaatataaaaaaaaaaaacataaaaaaaaaaaacgaaaaaaaaaaaacgtaaaaaaaaaaaactcaaaaaaaaaaaagataaaaaaaaaaaacctaaaaaaaaaaaatgtaaaaaaaaaaaagggaaaaaaaaaaaacgcaaaaaaaaaaaacacaaaaaaaaaaaatgcaaaaaaaaaaaatcgaaaaaaaaaaaatctaaaaaaaaaaaacgaaaaaaaaaaaacccaaaaaaaaaaaagacaaaaaaaaaaaatagaaaaaaaaaaagttaaaaaaaaaaaactgaaaaaaaaaaaatttaaaaaaaaaaaatctag

SEQ ID NO: 1919 - DNA, 2931 bp, synthetic construct
  misc_feature 1..2931: note = Synthetic
  source 1..2931: mol_type = other DNA
atgggcgtgaagatcatctcccgcaagtccctgggcacccagaacgtgtacgacatcggcgtggagaaggaccacaacttcctgctgaagaacggcctggtggcctccaactgcttcaacggcgcccccgagtccgccaccgagtccggcggcacctccaccgagtccgagggctccgccggccccaagaagaagcggaaggtgacctccaccgagtccgagggctccgccggctccgccggctccacctccggctcctcctccggcatgaagatcgccgtggtggacaaggccctgaacaacacccggtacgacaagcacttccagctgtacggcgaggaggtggacgtgttccacatgtgcaacgagaagctgtccggccggctgctgaagaagcacatcaccatcggcacccccgagaaccccttcgaccccaacgactacgacttcgtgatcctggtgggcgccgagcccttcctgtacttcgccggcaagaagggcatcggcgactacaccggcaagcgggtggagtacaacggctacgccaactggatcgcctccatctcccccgcccagctgcacttcaagcccgagatgaagcccgtgttcgacgccaccgtggagaacatccacgacatcatcaacggccgggagaagatcgccaaggccggcgactaccggcccatcaccgaccccgacgaggccgaggagtacatcaagatggtgtacaacatggtgatcggccccgtggccttcgcctccgccacctccgccctgtactgccgggacggctacctgctgggcgtgtccatctcccaccaggagtaccagggcgtgtacatcgactccgactgcctgaccgaggtggccgtgtactacctgcagaagatcctggactccgagaaccacaccatcgtgttccacaacctgaagttcgacatgcacttctacaagtaccacctgggcctgaccttcgacaaggcccacaaggagcggcggctgcacgacaccatgctgcagcactacgtgctggacgagcggcggggcacccacggcctgaagtccctggccatgaagtacaccgacatgggcgactacgacttcgagctggacaagttcaaggacgactactgcaaggcccacaagatcaagaaggaggacttcacctacgacctgatccccttcgacatcatgtggccctacgccgccaaggacaccgacgccaccatccggctgcacaacttcttcctgcccaagatcgagaagaacgagaagctgtgctccctgtactacgacgtgctgatgcccggctgcgtgttcctgcagcgggtggaggaccggggcgtgcccatctccatcgaccggctgaaggaggcccagtaccagctgacccacaacctgaacaaggcccgggagaagctgtacacctaccccgaggtgaagcagctggagcaggaccagaacgaggccttcaaccccaactccgtgaagcagctgcgggtgctgctgttcgactacgtgggcctgacccccaccggcaagctgaccgacaccggcgccgactccaccgacgccgaggccctgaacgagctggccacccagcaccccatcgccaagaccctgctggagatccggaagctgaccaagctgatctccacctacgtggagaagatcctgctgtccatcgacgccgacggctgcatccggaccggcttccacgagcacatgaccacctccggccggctgtcctcctccggcaagctgaacctgcagcagctgccccgggacgagtccatcatcaagggctgcgtggtggccccccccggctaccgggtgatcgcctgggacctgaccaccgccgaggtgtactacgccgccgtgctgtccggcgaccggaacatgcagcaggtgttcatcaacatgcggaacgagcccgacaagtaccccgacttccactccaacatcgcccacatggtgttcaagctgcagtgcgagccccgggacgtgaagaagctgttccccgccctgcggcaggccgccaaggccatcaccttcggcatcctgtacggctccggccccgccaaggtggcccactccgtgaacgaggccctgctggagcaggccgccaagaccggcgagcccttcgtggagtgcaccgtggccgacgccaaggagtacatcgagacctacttcggccagttcccccagctgaagcggtggatcgacaagtgccacgaccagatcaagaaccacggcttcatctactcccacttcggccggaagcggcggctgcacaacatccactccgaggaccggggcgtgcagggcgaggagatccggtccggcttcaacgccatcatccagtccgcctcctccgactccctgctgctgggcgccgtggacgccgacaacgagatcatctccctgggcctggagcaggagatgaagatcgtgatgctggtgcacgactccgtggtggccatcgtgcgggaggacctgatcgaccagtacaacgagatcctgatccggaacatccagaaggaccggggcatctccatccccggctgccccatcggcatcgactccgactccgaggccggcggctcccgggactactcctgcggcaagatgaagaagcagcacccctccatcgcctgcatcgacgacgacgagtacacccggtacgtgaagggcgtgctgctggacgccgagttcgagtacaagaagctggccgccatggacaaggagcaccccgaccactccaagtacaaggacgacaagttcatcgccgtgtgcaaggacctggacaacgtgaagcggatcctgggcgccggcggcggctccggcaagcggaccgccgacggctccggcggcggctcccccaagaagaagcggaaggtgcccgccgccaagcgcgtgaagctggactag

SEQ ID NO: 1920 - protein, 976 aa, synthetic construct
  REGION 1..976: note = Synthetic
MGVKIISRKSLGTQNVYDIGVEKDHNFLLKNGLVASNCFNGAPESATESGGTSTESEGSAGPKKKRKVTSTESEGSAGSAGSTSGSSSGMKIAVVDKALNNTRYDKHFQLYGEEVDVFHMCNEKLSGRLLKKHITIGTPENPFDPNDYDFVILVGAEPFLYFAGKKGIGDYTGKRVEYNGYANWIASISPAQLHFKPEMKPVFDATVENIHDIINGREKIAKAGDYRPITDPDEAEEYIKMVYNMVIGPVAFASATSALYCRDGYLLGVSISHQEYQGVYIDSDCLTEVAVYYLQKILDSENHTIVFHNLKFDMHFYKYHLGLTFDKAHKERRLHDTMLQHYVLDERRGTHGLKSLAMKYTDMGDYDFELDKFKDDYCKAHKIKKEDFTYDLIPFDIMWPYAAKDTDATIRLHNFFLPKIEKNEKLCSLYYDVLMPGCVFLQRVEDRGVPISIDRLKEAQYQLTHNLNKAREKLYTYPEVKQLEQDQNEAFNPNSVKQLRVLLFDYVGLTPTGKLTDTGADSTDAEALNELATQHPIAKTLLEIRKLTKLISTYVEKILLSIDADGCIRTGFHEHMTTSGRLSSSGKLNLQQLPRDESIIKGCVVAPPGYRVIAWDLTTAEVYYAAVLSGDRNMQQVFINMRNEPDKYPDFHSNIAHMVFKLQCEPRDVKKLFPALRQAAKAITFGILYGSGPAKVAHSVNEALLEQAAKTGEPFVECTVADAKEYIETYFGQFPQLKRWIDKCHDQIKNHGFIYSHFGRKRRLHNIHSEDRGVQGEEIRSGFNAIIQSASSDSLLLGAVDADNEIISLGLEQEMKIVMLVHDSVVAIVREDLIDQYNEILIRNIQKDRGISIPGCPIGIDSDSEAGGSRDYSCGKMKKQHPSIACIDDDEYTRYVKGVLLDAEFEYKKLAAMDKEHPDHSKYKDDKFIAVCKDLDNVKRILGAGGGSGKRTADGSGGGSPKKKRKVPAAKRVKLD

SEQ ID NO: 1921 - DNA, 6512 bp, synthetic construct
  misc_feature 1..6512: note = Synthetic
  source 1..6512: mol_type = other DNA
aggactcactatttgttttcgcgcccagttgcaaaaagtgtcgaagctcagaataaacgctcaactttggccggatctgccaccatgggcaagcggaccgccgacggctccgagttcgagtcccccaagaagaagcggaaggtggacaagaagtactccatcggcctggacatcggcaccaactccgtgggctgggccgtgatcaccgacgagtacaaggtgccctccaagaagttcaaggtgctgggcaacaccgaccggcactccatcaagaagaacctgatcggcgccctgctgttcgactccggcgagaccgccgaggccacccggctgaagcggaccgcccggcggcggtacacccggcggaagaaccggatctgctacctgcaggagatcttctccaacgagatggccaaggtggacgactccttcttccaccggctggaggagtccttcctggtggaggaggacaagaagcacgagcggcaccccatcttcggcaacatcgtggacgaggtggcctaccacgagaagtaccccaccatctaccacctgcggaagaagctggtggactccaccgacaaggccgacctgcggctgatctacctggccctggcccacatgatcaagttccggggccacttcctgatcgagggcgacctgaaccccgacaactccgacgtggacaagctgttcatccagctggtgcagacctacaaccagctgttcgaggagaaccccatcaacgcctccggcgtggacgccaaggccatcctgtccgcccggctgtccaagtcccggcggctggagaacctgatcgcccagctgcccggcgagaagaagaacggcctgttcggcaacctgatcgccctgtccctgggcctgacccccaacttcaagtccaacttcgacctggccgaggacgccaagctgcagctgtccaaggacacctacgacgacgacctggacaacctgctggcccagatcggcgaccagtacgccgacctgttcctggccgccaagaacctgtccgacgccatcctgctgtccgacatcctgcgggtgaacaccgagatcaccaaggcccccctgtccgcctccatgatcaagcggtacgacgagcaccaccaggacctgaccctgctgaaggccctggtgcggcagcagctgcccgagaagtacaaggagatcttcttcgaccagtccaagaacggctacgccggctacatcgacggcggcgcctcccaggaggagttctacaagttcatcaagcccatcctggagaagatggacggcaccgaggagctgctggtgaagctgaaccgggaggacctgctgcggaagcagcggaccttcgacaacggctccatcccccaccagatccacctgggcgagctgcacgccatcctgcggcggcaggaggacttctaccccttcctgaaggacaaccgggagaagatcgagaagatcctgaccttccggatcccctactacgtgggccccctggcccggggcaactcccggttcgcctggatgacccggaagtccgaggagaccatcaccccctggaacttcgaggaggtggtggacaagggcgcctccgcccagtccttcatcgagcggatgaccaacttcgacaagaacctgcccaacgagaaggtgctgcccaagcactccctgctgtacgagtacttcaccgtgtacaacgagctgaccaaggtgaagtacgtgaccgagggcatgcggaagcccgccttcctgtccggcgagcagaagaaggccatcgtggacctgctgttcaagaccaaccggaaggtgaccgtgaagcagctgaaggaggactacttcaagaagatcgagtgcttcgactccgtggagatctccggcgtggaggaccggttcaacgcctccctgggcacctaccacgacctgctgaagatcatcaaggacaaggacttcctggacaacgaggagaacgaggacatcctggaggacatcgtgctgaccctgaccctgttcgaggaccgggagatgatcgaggagcggctgaagacctacgcccacctgttcgacgacaaggtgatgaagcagctgaagcggcggcggtacaccggctggggccggctgtcccggaagctgatcaacggcatccgggacaagcagtccggcaagaccatcctggacttcctgaagtccgacggcttcgccaaccggaacttcatgcagctgatccacgacgactccctgaccttcaaggaggacatccagaaggcccaggtgtccggccagggcgactccctgcacgagcacatcgccaacctggccggctcccccgccatcaagaagggcatcctgcagaccgtgaaggtggtggacgagctggtgaaggtgatgggccggcacaagcccgagaacatcgtgatcgagatggcccgggagaaccagaccacccagaagggccagaagaactcccgggagcggatgaagcggatcgaggagggcatcaaggagctgggctcccagatcctgaaggagcaccccgtggagaacacccagctgcagaacgagaagctgtacctgtactacctgcagaacggccgggacatgtacgtggaccaggagctggacatcaaccggctgtccgactacgacgtggacgccatcgtgccccagtccttcctgaaggacgactccatcgacaacaaggtgctgacccggtccgacaaggcccggggcaagtccgacaacgtgccctccgaggaggtggtgaagaagatgaagaactactggcggcagctgctgaacgccaagctgatcacccagcggaagttcgacaacctgaccaaggccgagcggggcggcctgtccgagctggacaaggccggcttcatcaagcggcagctggtggagacccggcagatcaccaagcacgtggcccagatcctggactcccggatgaacaccaagtacgacgagaacgacaagctgatccgggaggtgaaggtgatcaccctgaagtccaagctggtgtccgacttccggaaggacttccagttctacaaggtgcgggagatcaacaactaccaccacgcccacgacgcctacctgaacgccgtggtgggcaccgccctgatcaagaagtaccccaagctggagtccgagttcgtgtacggcgactacaaggtgtacgacgtgcggaagatgatcgccaagtccgagcaggagatcggcaaggccaccgccaagtacttcttctactccaacatcatgaacttcttcaagaccgagatcaccctggccaacggcgagatccggaagcggcccctgatcgagaccaacggcgagaccggcgagatcgtgtgggacaagggccgggacttcgccaccgtgcggaaggtgctgtccatgccccaggtgaacatcgtgaagaagaccgaggtgcagaccggcggcttctccaaggagtccatcctgcccaagcggaactccgacaagctgatcgcccggaagaaggactgggaccccaagaagtacggcggcttcgactcccccaccgtggcctactccgtgctggtggtggccaaggtggagaagggcaagtccaagaagctgaagtccgtgaaggagctgctgggcatcaccatcatggagcggtcctccttcgagaagaaccccatcgacttcctggaggccaagggctacaaggaggtgaagaaggacctgatcatcaagctgcccaagtactccctgttcgagctggagaacggccggaagcggatgctggcctccgccggcgagctgcagaagggcaacgagctggccctgccctccaagtacgtgaacttcctgtacctggcctcccactacgagaagctgaagggctcccccgaggacaacgagcagaagcagctgttcgtggagcagcacaagcactacctggacgagatcatcgagcagatctccgagttctccaagcgggtgatcctggccgacgccaacctggacaaggtgctgtccgcctacaacaagcaccgggacaagcccatccgggagcaggccgagaacatcatccacctgttcaccctgaccaacctgggcgcccccgccgccttcaagtacttcgacaccaccatcgaccggaagcggtacacctccaccaaggaggtgctggacgccaccctgatccaccagtccatcaccggcctgtacgagacccggatcgacctgtcccagctgggcggcgactccggcggctcctccggcggctccaagcggaccgccgacggctccgagttcgagtcccccaagaagaagcggaaggtgtccggcggctcctccggcggctccatggactccaccaaggagaagtgcgactcctacaaggacgacctgctgctgcggatgggcctgaacgacaacaaggccggcatggagggcctggacaaggagaagatcaacaagatcatcatggaggccaccaagggctcccggttctacggcaacgagctgaagaaggagaagcaggtgaaccagcggatcgagaacatgatgcagcagaaggcccagatcacctcccagcagctgcggaaggcccagctgcaggtggaccggttcgccatggagctggagcagtcccggaacctgtccaacaccatcgtgcacatcgacatggacgccttctacgccgccgtggagatgcgggacaaccccgagctgaaggacaagcccatcgccgtgggctccatgtccatgctgtccacctccaactaccacgcccggcggttcggcgtgcgggccgccatgcccggcttcatcgccaagcggctgtgcccccagctgatcatcgtgccccccaacttcgacaagtaccgggccgtgtccaaggaggtgaaggagatcctggccgactacgaccccaacttcatggccatgtccctggacgaggcctacctgaacatcaccaagcacctggaggagcggcagaactggcccgaggacaagcggcggtacttcatcaagatgggctcctccgtggagaacgacaaccccggcaaggaggtgaacaagctgtccgagcacgagcggtccatctcccccctgctgttcgaggagtccccctccgacgtgcagccccccggcgaccccttccaggtgaacttcgaggagcagaacaacccccagatcctgcagaactccgtggtgttcggcacctccgcccaggaggtggtgaaggagatccggttccggatcgagcagaagaccaccctgaccgcctccgccggcatcgcccccaacaccatgctggccaaggtgtgctccgacaagaacaagcccaacggccagtaccagatcctgcccaaccggcaggccgtgatggacttcatcaaggacctgcccatccggaaggtgtccggcatcggcaaggtgaccgagaagatgctgaaggccctgggcatcatcacctgcaccgagctgtaccagcagcgggccctgctgtccctgctgttctccgagacctcctggcactacttcctgcacatctccctgggcctgggctccacccacctgacccgggaccgggtgcggaagtccatgtccgtggagcggaccttctccgagatcaacaaggccgaggagcagtactccctgtgccaggagctgtgctccgagctggcccaggacctgcagaaggagcggctgaagggccggaccgtgaccatcaagctgaagaacgtgaacttcgaggtgaagacccgggcctccaccgtgtcctccgtggtgtccaccgccgaggagatcttcgccatcgccaaggagctgctgaagaccgagatcgacgccgacttcccccaccccctgcggctgcggctgatgggcgtgcggatctcctccttccccaacgaggaggaccggaagcaccagcagggcggcggctccggcaagcggaccgccgacggctccggcggcggctcccccaagaagaagcggaaggtgtagctagcaccagcctcaagaacacccgaatggagtctctaagctacataataccaacttacactttacaaaatgttgtcccccaaaatgtagccattcgtatctgctcctaataaaaagaaagtttcttcacattctctcgagaaaaaaaaaaaatggaaaaaaaaaaaacggaaaaaaaaaaaaggtaaaaaaaaaaaatataaaaaaaaaaaacataaaaaaaaaaaacgaaaaaaaaaaaacgtaaaaaaaaaaaactcaaaaaaaaaaaagataaaaaaaaaaaacctaaaaaaaaaaaatgtaaaaaaaaaaaagggaaaaaaaaaaaacgcaaaaaaaaaaaacacaaaaaaaaaaaatgcaaaaaaaaaaaatcgaaaaaaaaaaaatctaaaaaaaaaaaacgaaaaaaaaaaaacccaaaaaaaaaaaagacaaaaaaaaaaaatagaaaaaaaaaaagttaaaaaaaaaaaactgaaaaaaaaaaaatttaaaaaaaaaaaatctag

SEQ ID NO: 1922 - DNA, 5913 bp, synthetic construct
  misc_feature 1..5913: note = Synthetic
  source 1..5913: mol_type = other DNA
atgggcaagcggaccgccgacggctccgagttcgagtcccccaagaagaagcggaaggtggacaagaagtactccatcggcctggacatcggcaccaactccgtgggctgggccgtgatcaccgacgagtacaaggtgccctccaagaagttcaaggtgctgggcaacaccgaccggcactccatcaagaagaacctgatcggcgccctgctgttcgactccggcgagaccgccgaggccacccggctgaagcggaccgcccggcggcggtacacccggcggaagaaccggatctgctacctgcaggagatcttctccaacgagatggccaaggtggacgactccttcttccaccggctggaggagtccttcctggtggaggaggacaagaagcacgagcggcaccccatcttcggcaacatcgtggacgaggtggcctaccacgagaagtaccccaccatctaccacctgcggaagaagctggtggactccaccgacaaggccgacctgcggctgatctacctggccctggcccacatgatcaagttccggggccacttcctgatcgagggcgacctgaaccccgacaactccgacgtggacaagctgttcatccagctggtgcagacctacaaccagctgttcgaggagaaccccatcaacgcctccggcgtggacgccaaggccatcctgtccgcccggctgtccaagtcccggcggctggagaacctgatcgcccagctgcccggcgagaagaagaacggcctgttcggcaacctgatcgccctgtccctgggcctgacccccaacttcaagtccaacttcgacctggccgaggacgccaagctgcagctgtccaaggacacctacgacgacgacctggacaacctgctggcccagatcggcgaccagtacgccgacctgttcctggccgccaagaacctgtccgacgccatcctgctgtccgacatcctgcgggtgaacaccgagatcaccaaggcccccctgtccgcctccatgatcaagcggtacgacgagcaccaccaggacctgaccctgctgaaggccctggtgcggcagcagctgcccgagaagtacaaggagatcttcttcgaccagtccaagaacggctacgccggctacatcgacggcggcgcctcccaggaggagttctacaagttcatcaagcccatcctggagaagatggacggcaccgaggagctgctggtgaagctgaaccgggaggacctgctgcggaagcagcggaccttcgacaacggctccatcccccaccagatccacctgggcgagctgcacgccatcctgcggcggcaggaggacttctaccccttcctgaaggacaaccgggagaagatcgagaagatcctgaccttccggatcccctactacgtgggccccctggcccggggcaactcccggttcgcctggatgacccggaagtccgaggagaccatcaccccctggaacttcgaggaggtggtggacaagggcgcctccgcccagtccttcatcgagcggatgaccaacttcgacaagaacctgcccaacgagaaggtgctgcccaagcactccctgctgtacgagtacttcaccgtgtacaacgagctgaccaaggtgaagtacgtgaccgagggcatgcggaagcccgccttcctgtccggcgagcagaagaaggccatcgtggacctgctgttcaagaccaaccggaaggtgaccgtgaagcagctgaaggaggactacttcaagaagatcgagtgcttcgactccgtggagatctccggcgtggaggaccggttcaacgcctccctgggcacctaccacgacctgctgaagatcatcaaggacaaggacttcctggacaacgaggagaacgaggacatcctggaggacatcgtgctgaccctgaccctgttcgaggaccgggagatgatcgaggagcggctgaagacctacgcccacctgttcgacgacaaggtgatgaagcagctgaagcggcggcggtacaccggctggggccggctgtcccggaagctgatcaacggcatccgggacaagcagtccggcaagaccatcctggacttcctgaagtccgacggcttcgccaaccggaacttcatgcagctgatccacgacgactccctgaccttcaaggaggacatccagaaggcccaggtgtccggccagggcgactccctgcacgagcacatcgccaacctggccggctcccccgccatcaagaagggcatcctgcagaccgtgaaggtggtggacgagctggtgaaggtgatgggccggcacaagcccgagaacatcgtgatcgagatggcccgggagaaccagaccacccagaagggccagaagaactcccgggagcggatgaagcggatcgaggagggcatcaaggagctgggctcccagatcctgaaggagcaccccgtggagaacacccagctgcagaacgagaagctgtacctgtactacctgcagaacggccgggacatgtacgtggaccaggagctggacatcaaccggctgtccgactacgacgtggacgccatcgtgccccagtccttcctgaaggacgactccatcgacaacaaggtgctgacccggtccgacaaggcccggggcaagtccgacaacgtgccctccgaggaggtggtgaagaagatgaagaactactggcggcagctgctgaacgccaagctgatcacccagcggaagttcgacaacctgaccaaggccgagcggggcggcctgtccgagctggacaaggccggcttcatcaagcggcagctggtggagacccggcagatcaccaagcacgtggcccagatcctggactcccggatgaacaccaagtacgacgagaacgacaagctgatccgggaggtgaaggtgatcaccctgaagtccaagctggtgtccgacttccggaaggacttccagttctacaaggtgcgggagatcaacaactaccaccacgcccacgacgcctacctgaacgccgtggtgggcaccgccctgatcaagaagtaccccaagctggagtccgagttcgtgtacggcgactacaaggtgtacgacgtgcggaagatgatcgccaagtccgagcaggagatcggcaaggccaccgccaagtacttcttctactccaacatcatgaacttcttcaagaccgagatcaccctggccaacggcgagatccggaagcggcccctgatcgagaccaacggcgagaccggcgagatcgtgtgggacaagggccgggacttcgccaccgtgcggaaggtgctgtccatgccccaggtgaacatcgtgaagaagaccgaggtgcagaccggcggcttctccaaggagtccatcctgcccaagcggaactccgacaagctgatcgcccggaagaaggactgggaccccaagaagtacggcggcttcgactcccccaccgtggcctactccgtgctggtggtggccaaggtggagaagggcaagtccaagaagctgaagtccgtgaaggagctgctgggcatcaccatcatggagcggtcctccttcgagaagaaccccatcgacttcctggaggccaagggctacaaggaggtgaagaaggacctgatcatcaagctgcccaagtactccctgttcgagctggagaacggccggaagcggatgctggcctccgccggcgagctgcagaagggcaacgagctggccctgccctccaagtacgtgaacttcctgtacctggcctcccactacgagaagctgaagggctcccccgaggacaacgagcagaagcagctgttcgtggagcagcacaagcactacctggacgagatcatcgagcagatctccgagttctccaagcgggtgatcctggccgacgccaacctggacaaggtgctgtccgcctacaacaagcaccgggacaagcccatccgggagcaggccgagaacatcatccacctgttcaccctgaccaacctgggcgcccccgccgccttcaagtacttcgacaccaccatcgaccggaagcggtacacctccaccaaggaggtgctggacgccaccctgatccaccagtccatcaccggcctgtacgagacccggatcgacctgtcccagctgggcggcgactccggcggctcctccggcggctccaagcggaccgccgacggctccgagttcgagtcccccaagaagaagcggaaggtgtccggcggctcctccggcggctccatggactccaccaaggagaagtgcgactcctacaaggacgacctgctgctgcggatgggcctgaacgacaacaaggccggcatggagggcctggacaaggagaagatcaacaagatcatcatggaggccaccaagggctcccggttctacggcaacgagctgaagaaggagaagcaggtgaaccagcggatcgagaacatgatgcagcagaaggcccagatcacctcccagcagctgcggaaggcccagctgcaggtggaccggttcgccatggagctggagcagtcccggaacctgtccaacaccatcgtgcacatcgacatggacgccttctacgccgccgtggagatgcgggacaaccccgagctgaaggacaagcccatcgccgtgggctccatgtccatgctgtccacctccaactaccacgcccggcggttcggcgtgcgggccgccatgcccggcttcatcgccaagcggctgtgcccccagctgatcatcgtgccccccaacttcgacaagtaccgggccgtgtccaaggaggtgaaggagatcctggccgactacgaccccaacttcatggccatgtccctggacgaggcctacctgaacatcaccaagcacctggaggagcggcagaactggcccgaggacaagcggcggtacttcatcaagatgggctcctccgtggagaacgacaaccccggcaaggaggtgaacaagctgtccgagcacgagcggtccatctcccccctgctgttcgaggagtccccctccgacgtgcagccccccggcgaccccttccaggtgaacttcgaggagcagaacaacccccagatcctgcagaactccgtggtgttcggcacctccgcccaggaggtggtgaaggagatccggttccggatcgagcagaagaccaccctgaccgcctccgccggcatcgcccccaacaccatgctggccaaggtgtgctccgacaagaacaagcccaacggccagtaccagatcctgcccaaccggcaggccgtgatggacttcatcaaggacctgcccatccggaaggtgtccggcatcggcaaggtgaccgagaagatgctgaaggccctgggcatcatcacctgcaccgagctgtaccagcagcgggccctgctgtccctgctgttctccgagacctcctggcactacttcctgcacatctccctgggcctgggctccacccacctgacccgggaccgggtgcggaagtccatgtccgtggagcggaccttctccgagatcaacaaggccgaggagcagtactccctgtgccaggagctgtgctccgagctggcccaggacctgcagaaggagcggctgaagggccggaccgtgaccatcaagctgaagaacgtgaacttcgaggtgaagacccgggcctccaccgtgtcctccgtggtgtccaccgccgaggagatcttcgccatcgccaaggagctgctgaagaccgagatcgacgccgacttcccccaccccctgcggctgcggctgatgggcgtgcggatctcctccttccccaacgaggaggaccggaagcaccagcagggcggcggctccggcaagcggaccgccgacggctccggcggcggctcccccaagaagaagcggaaggtgtag

SEQ ID NO: 1923 - protein, 1970 aa, synthetic construct
  REGION 1..1970: note = Synthetic
MGKRTADGSEFESPKKKRKVDKKYSIGLDIGTNSVGWAVITDEYKVPSKKFKVLGNTDRHSIKKNLIGALLFDSGETAEATRLKRTARRRYTRRKNRICYLQEIFSNEMAKVDDSFFHRLEESFLVEEDKKHERHPIFGNIVDEVAYHEKYPTIYHLRKKLVDSTDKADLRLIYLALAHMIKFRGHFLIEGDLNPDNSDVDKLFIQLVQTYNQLFEENPINASGVDAKAILSARLSKSRRLENLIAQLPGEKKNGLFGNLIALSLGLTPNFKSNFDLAEDAKLQLSKDTYDDDLDNLLAQIGDQYADLFLAAKNLSDAILLSDILRVNTEITKAPLSASMIKRYDEHHQDLTLLKALVRQQLPEKYKEIFFDQSKNGYAGYIDGGASQEEFYKFIKPILEKMDGTEELLVKLNREDLLRKQRTFDNGSIPHQIHLGELHAILRRQEDFYPFLKDNREKIEKILTFRIPYYVGPLARGNSRFAWMTRKSEETITPWNFEEVVDKGASAQSFIERMTNFDKNLPNEKVLPKHSLLYEYFTVYNELTKVKYVTEGMRKPAFLSGEQKKAIVDLLFKTNRKVTVKQLKEDYFKKIECFDSVEISGVEDRFNASLGTYHDLLKIIKDKDFLDNEENEDILEDIVLTLTLFEDREMIEERLKTYAHLFDDKVMKQLKRRRYTGWGRLSRKLINGIRDKQSGKTILDFLKSDGFANRNFMQLIHDDSLTFKEDIQKAQVSGQGDSLHEHIANLAGSPAIKKGILQTVKVVDELVKVMGRHKPENIVIEMARENQTTQKGQKNSRERMKRIEEGIKELGSQILKEHPVENTQLQNEKLYLYYLQNGRDMYVDQELDINRLSDYDVDAIVPQSFLKDDSIDNKVLTRSDKARGKSDNVPSEEVVKKMKNYWRQLLNAKLITQRKFDNLTKAERGGLSELDKAGFIKRQLVETRQITKHVAQILDSRMNTKYDENDKLIREVKVITLKSKLVSDFRKDFQFYKVREINNYHHAHDAYLNAVVGTALIKKYPKLESEFVYGDYKVYDVRKMIAKSEQEIGKATAKYFFYSNIMNFFKTEITLANGEIRKRPLIETNGETGEIVWDKGRDFATVRKVLSMPQVNIVKKTEVQTGGFSKESILPKRNSDKLIARKKDWDPKKYGGFDSPTVAYSVLVVAKVEKGKSKKLKSVKELLGITIMERSSFEKNPIDFLEAKGYKEVKKDLIIKLPKYSLFELENGRKRMLASAGELQKGNELALPSKYVNFLYLASHYEKLKGSPEDNEQKQLFVEQHKHYLDEIIEQISEFSKRVILADANLDKVLSAYNKHRDKPIREQAENIIHLFTLTNLGAPAAFKYFDTTIDRKRYTSTKEVLDATLIHQSITGLYETRIDLSQLGGDSGGSSGGSKRTADGSEFESPKKKRKVSGGSSGGSMDSTKEKCDSYKDDLLLRMGLNDNKAGMEGLDKEKINKIIMEATKGSRFYGNELKKEKQVNQRIENMMQQKAQITSQQLRKAQLQVDRFAMELEQSRNLSNTIVHIDMDAFYAAVEMRDNPELKDKPIAVGSMSMLSTSNYHARRFGVRAAMPGFIAKRLCPQLIIVPPNFDKYRAVSKEVKEILADYDPNFMAMSLDEAYLNITKHLEERQNWPEDKRRYFIKMGSSVENDNPGKEVNKLSEHERSISPLLFEESPSDVQPPGDPFQVNFEEQNNPQILQNSVVFGTSAQEVVKEIRFRIEQKTTLTASAGIAPNTMLAKVCSDKNKPNGQYQILPNRQAVMDFIKDLPIRKVSGIGKVTEKMLKALGIITCTELYQQRALLSLLFSETSWHYFLHISLGLGSTHLTRDRVRKSMSVERTFSEINKAEEQYSLCQELCSELAQDLQKERLKGRTVTIKLKNVNFEVKTRASTVSSVVSTAEEIFAIAKELLKTEIDADFPHPLRLRLMGVRISSFPNEEDRKHQQGGGSGKRTADGSGGGSPKKKRKV

SEQ ID NO: 1924 - DNA, 6512 bp, synthetic construct
  misc_feature 1..6512: note = Synthetic
  source 1..6512: mol_type = other DNA
aggactcactatttgttttcgcgcccagttgcaaaaagtgtcgaagctcagaataaacgctcaactttggccggatctgccaccatgggcaagcggaccgccgacggctccgagttcgagtcccccaagaagaagcggaaggtggacaagaagtactccatcggcctggacatcggcaccaactccgtgggctgggccgtgatcaccgacgagtacaaggtgccctccaagaagttcaaggtgctgggcaacaccgaccggcactccatcaagaagaacctgatcggcgccctgctgttcgactccggcgagaccgccgaggccacccggctgaagcggaccgcccggcggcggtacacccggcggaagaaccggatctgctacctgcaggagatcttctccaacgagatggccaaggtggacgactccttcttccaccggctggaggagtccttcctggtggaggaggacaagaagcacgagcggcaccccatcttcggcaacatcgtggacgaggtggcctaccacgagaagtaccccaccatctaccacctgcggaagaagctggtggactccaccgacaaggccgacctgcggctgatctacctggccctggcccacatgatcaagttccggggccacttcctgatcgagggcgacctgaaccccgacaactccgacgtggacaagctgttcatccagctggtgcagacctacaaccagctgttcgaggagaaccccatcaacgcctccggcgtggacgccaaggccatcctgtccgcccggctgtccaagtcccggcggctggagaacctgatcgcccagctgcccggcgagaagaagaacggcctgttcggcaacctgatcgccctgtccctgggcctgacccccaacttcaagtccaacttcgacctggccgaggacgccaagctgcagctgtccaaggacacctacgacgacgacctggacaacctgctggcccagatcggcgaccagtacgccgacctgttcctggccgccaagaacctgtccgacgccatcctgctgtccgacatcctgcgggtgaacaccgagatcaccaaggcccccctgtccgcctccatgatcaagcggtacgacgagcaccaccaggacctgaccctgctgaaggccctggtgcggcagcagctgcccgagaagtacaaggagatcttcttcgaccagtccaagaacggctacgccggctacatcgacggcggcgcctcccaggaggagttctacaagttcatcaagcccatcctggagaagatggacggcaccgaggagctgctggtgaagctgaaccgggaggacctgctgcggaagcagcggaccttcgacaacggctccatcccccaccagatccacctgggcgagctgcacgccatcctgcggcggcaggaggacttctaccccttcctgaaggacaaccgggagaagatcgagaagatcctgaccttccggatcccctactacgtgggccccctggcccggggcaactcccggttcgcctggatgacccggaagtccgaggagaccatcaccccctggaacttcgaggaggtggtggacaagggcgcctccgcccagtccttcatcgagcggatgaccaacttcgacaagaacctgcccaacgagaaggtgctgcccaagcactccctgctgtacgagtacttcaccgtgtacaacgagctgaccaaggtgaagtacgtgaccgagggcatgcggaagcccgccttcctgtccggcgagcagaagaaggccatcgtggacctgctgttcaagaccaaccggaaggtgaccgtgaagcagctgaaggaggactacttcaagaagatcgagtgcttcgactccgtggagatctccggcgtggaggaccggttcaacgcctccctgggcacctaccacgacctgctgaagatcatcaaggacaaggacttcctggacaacgaggagaacgaggacatcctggaggacatcgtgctgaccctgaccctgttcgaggaccgggagatgatcgaggagcggctgaagacctacgcccacctgttcgacgacaaggtgatgaagcagctgaagcggcggcggtacaccggctggggccggctgtcccggaagctgatcaacggcatccgggacaagcagtccggcaagaccatcctggacttcctgaagtccgacggcttcgccaaccggaacttcatgcagctgatccacgacgactccctgaccttcaaggaggacatccagaaggcccaggtgtccggccagggcgactccctgcacgagcacatcgccaacctggccggctcccccgccatcaagaagggcatcctgcagaccgtgaaggtggtggacgagctggtgaaggtgatgggccggcacaagcccgagaacatcgtgatcgagatggcccgggagaaccagaccacccagaagggccagaagaactcccgggagcggatgaagcggatcgaggagggcatcaaggagctgggctcccagatcctgaaggagcaccccgtggagaacacccagctgcagaacgagaagctgtacctgtactacctgcagaacggccgggacatgtacgtggaccaggagctggacatcaaccggctgtccgactacgacgtggacgccatcgtgccccagtccttcctgaaggacgactccatcgacgccaaggtgctgacccggtccgacaagaaccggggcaagtccgacaacgtgccctccgaggaggtggtgaagaagatgaagaactactggcggcagctgctgaacgccaagctgatcacccagcggaagttcgacaacctgaccaaggccgagcggggcggcctgtccgagctggacaaggccggcttcatcaagcggcagctggtggagacccggcagatcaccaagcacgtggcccagatcctggactcccggatgaacaccaagtacgacgagaacgacaagctgatccgggaggtgaaggtgatcaccctgaagtccaagctggtgtccgacttccggaaggacttccagttctacaaggtgcgggagatcaacaactaccaccacgcccacgacgcctacctgaacgccgtggtgggcaccgccctgatcaagaagtaccccaagctggagtccgagttcgtgtacggcgactacaaggtgtacgacgtgcggaagatgatcgccaagtccgagcaggagatcggcaaggccaccgccaagtacttcttctactccaacatcatgaacttcttcaagaccgagatcaccctggccaacggcgagatccggaagcggcccctgatcgagaccaacggcgagaccggcgagatcgtgtgggacaagggccgggacttcgccaccgtgcggaaggtgctgtccatgccccaggtgaacatcgtgaagaagaccgaggtgcagaccggcggcttctccaaggagtccatcctgcccaagcggaactccgacaagctgatcgcccggaagaaggactgggaccccaagaagtacggcggcttcgactcccccaccgtggcctactccgtgctggtggtggccaaggtggagaagggcaagtccaagaagctgaagtccgtgaaggagctgctgggcatcaccatcatggagcggtcctccttcgagaagaaccccatcgacttcctggaggccaagggctacaaggaggtgaagaaggacctgatcatcaagctgcccaagtactccctgttcgagctggagaacggccggaagcggatgctggcctccgccggcgagctgcagaagggcaacgagctggccctgccctccaagtacgtgaacttcctgtacctggcctcccactacgagaagctgaagggctcccccgaggacaacgagcagaagcagctgttcgtggagcagcacaagcactacctggacgagatcatcgagcagatctccgagttctccaagcgggtgatcctggccgacgccaacctggacaaggtgctgtccgcctacaacaagcaccgggacaagcccatccgggagcaggccgagaacatcatccacctgttcaccctgaccaacctgggcgcccccgccgccttcaagtacttcgacaccaccatcgaccggaagcggtacacctccaccaaggaggtgctggacgccaccctgatccaccagtccatcaccggcctgtacgagacccggatcgacctgtcccagctgggcggcgactccggcggctcctccggcggctccaagcggaccgccgacggctccgagttcgagtcccccaagaagaagcggaaggtgtccggcggctcctccggcggctccatggactccaccaaggagaagtgcgactcctacaaggacgacctgctgctgcggatgggcctgaacgacaacaaggccggcatggagggcctggacaaggagaagatcaacaagatcatcatggaggccaccaagggctcccggttctacggcaacgagctgaagaaggagaagcaggtgaaccagcggatcgagaacatgatgcagcagaaggcccagatcacctcccagcagctgcggaaggcccagctgcaggtggaccggttcgccatggagctggagcagtcccggaacctgtccaacaccatcgtgcacatcgacatggacgccttctacgccgccgtggagatgcgggacaaccccgagctgaaggacaagcccatcgccgtgggctccatgtccatgctgtccacctccaactaccacgcccggcggttcggcgtgcgggccgccatgcccggcttcatcgccaagcggctgtgcccccagctgatcatcgtgccccccaacttcgacaagtaccgggccgtgtccaaggaggtgaaggagatcctggccgactacgaccccaacttcatggccatgtccctggacgaggcctacctgaacatcaccaagcacctggaggagcggcagaactggcccgaggacaagcggcggtacttcatcaagatgggctcctccgtggagaacgacaaccccggcaaggaggtgaacaagctgtccgagcacgagcggtccatctcccccctgctgttcgaggagtccccctccgacgtgcagccccccggcgaccccttccaggtgaacttcgaggagcagaacaacccccagatcctgcagaactccgtggtgttcggcacctccgcccaggaggtggtgaaggagatccggttccggatcgagcagaagaccaccctgaccgcctccgccggcatcgcccccaacaccatgctggccaaggtgtgctccgacaagaacaagcccaacggccagtaccagatcctgcccaaccggcaggccgtgatggacttcatcaaggacctgcccatccggaaggtgtccggcatcggcaaggtgaccgagaagatgctgaaggccctgggcatcatcacctgcaccgagctgtaccagcagcgggccctgctgtccctgctgttctccgagacctcctggcactacttcctgcacatctccctgggcctgggctccacccacctgacccgggaccgggtgcggaagtccatgtccgtggagcggaccttctccgagatcaacaaggccgaggagcagtactccctgtgccaggagctgtgctccgagctggcccaggacctgcagaaggagcggctgaagggccggaccgtgaccatcaagctgaagaacgtgaacttcgaggtgaagacccgggcctccaccgtgtcctccgtggtgtccaccgccgaggagatcttcgccatcgccaaggagctgctgaagaccgagatcgacgccgacttcccccaccccctgcggctgcggctgatgggcgtgcggatctcctccttccccaacgaggaggaccggaagcaccagcagggcggcggctccggcaagcggaccgccgacggctccggcggcggctcccccaagaagaagcggaaggtgtagctagcaccagcctcaagaacacccgaatggagtctctaagctacataataccaacttacactttacaaaatgttgtcccccaaaatgtagccattcgtatctgctcctaataaaaagaaagtttcttcacattctctcgagaaaaaaaaaaaatggaaaaaaaaaaaacggaaaaaaaaaaaaggtaaaaaaaaaaaatataaaaaaaaaaaacataaaaaaaaaaaacgaaaaaaaaaaaacgtaaaaaaaaaaaactcaaaaaaaaaaaagataaaaaaaaaaaacctaaaaaaaaaaaatgtaaaaaaaaaaaagggaaaaaaaaaaaacgcaaaaaaaaaaaacacaaaaaaaaaaaatgcaaaaaaaaaaaatcgaaaaaaaaaaaatctaaaaaaaaaaaacgaaaaaaaaaaaacccaaaaaaaaaaaagacaaaaaaaaaaaatagaaaaaaaaaaagttaaaaaaaaaaaactgaaaaaaaaaaaatttaaaaaaaaaaaatctag

SEQ ID NO: 1925 - DNA, 5913 bp, synthetic construct
  misc_feature 1..5913: note = Synthetic
  source 1..5913: mol_type = other DNA
atgggcaagcggaccgccgacggctccgagttcgagtcccccaagaagaagcggaaggtggacaagaagtactccatcggcctggacatcggcaccaactccgtgggctgggccgtgatcaccgacgagtacaaggtgccctccaagaagttcaaggtgctgggcaacaccgaccggcactccatcaagaagaacctgatcggcgccctgctgttcgactccggcgagaccgccgaggccacccggctgaagcggaccgcccggcggcggtacacccggcggaagaaccggatctgctacctgcaggagatcttctccaacgagatggccaaggtggacgactccttcttccaccggctggaggagtccttcctggtggaggaggacaagaagcacgagcggcaccccatcttcggcaacatcgtggacgaggtggcctaccacgagaagtaccccaccatctaccacctgcggaagaagctggtggactccaccgacaaggccgacctgcggctgatctacctggccctggcccacatgatcaagttccggggccacttcctgatcgagggcgacctgaaccccgacaactccgacgtggacaagctgttcatccagctggtgcagacctacaaccagctgttcgaggagaaccccatcaacgcctccggcgtggacgccaaggccatcctgtccgcccggctgtccaagtcccggcggctggagaacctgatcgcccagctgcccggcgagaagaagaacggcctgttcggcaacctgatcgccctgtccctgggcctgacccccaacttcaagtccaacttcgacctggccgaggacgccaagctgcagctgtccaaggacacctacgacgacgacctggacaacctgctggcccagatcggcgaccagtacgccgacctgttcctggccgccaagaacctgtccgacgccatcctgctgtccgacatcctgcgggtgaacaccgagatcaccaaggcccccctgtccgcctccatgatcaagcggtacgacgagcaccaccaggacctgaccctgctgaaggccctggtgcggcagcagctgcccgagaagtacaaggagatcttcttcgaccagtccaagaacggctacgccggctacatcgacggcggcgcctcccaggaggagttctacaagttcatcaagcccatcctggagaagatggacggcaccgaggagctgctggtgaagctgaaccgggaggacctgctgcggaagcagcggaccttcgacaacggctccatcccccaccagatccacctgggcgagctgcacgccatcctgcggcggcaggaggacttctaccccttcctgaaggacaaccgggagaagatcgagaagatcctgaccttccggatcccctactacgtgggccccctggcccggggcaactcccggttcgcctggatgacccggaagtccgaggagaccatcaccccctggaacttcgaggaggtggtggacaagggcgcctccgcccagtccttcatcgagcggatgaccaacttcgacaagaacctgcccaacgagaaggtgctgcccaagcactccctgctgtacgagtacttcaccgtgtacaacgagctgaccaaggtgaagtacgtgaccgagggcatgcggaagcccgccttcctgtccggcgagcagaagaaggccatcgtggacctgctgttcaagaccaaccggaaggtgaccgtgaagcagctgaaggaggactacttcaagaagatcgagtgcttcgactccgtggagatctccggcgtggaggaccggttcaacgcctccctgggcacctaccacgacctgctgaagatcatcaaggacaaggacttcctggacaacgaggagaacgaggacatcctggaggacatcgtgctgaccctgaccctgttcgaggaccgggagatgatcgaggagcggctgaagacctacgcccacctgttcgacgacaaggtgatgaagcagctgaagcggcggcggtacaccggctggggccggctgtcccggaagctgatcaacggcatccgggacaagcagtccggcaagaccatcctggacttcctgaagtccgacggcttcgccaaccggaacttcatgcagctgatccacgacgactccctgaccttcaaggaggacatccagaaggcccaggtgtccggccagggcgactccctgcacgagcacatcgccaacctggccggctcccccgccatcaagaagggcatcctgcagaccgtgaaggtggtggacgagctggtgaaggtgatgggccggcacaagcccgagaacatcgtgatcgagatggcccgggagaaccagaccacccagaagggccagaagaactcccgggagcggatgaagcggatcgaggagggcatcaaggagctgggctcccagatcctgaaggagcaccccgtggagaacacccagctgcagaacgagaagctgtacctgtactacctgcagaacggccgggacatgtacgtggaccaggagctggacatcaaccggctgtccgactacgacgtggacgccatcgtgccccagtccttcctgaaggacgactccatcgacgccaaggtgctgacccggtccgacaagaaccggggcaagtccgacaacgtgccctccgaggaggtggtgaagaagatgaagaactactggcggcagctgctgaacgccaagctgatcacccagcggaagttcgacaacctgaccaaggccgagcggggcggcctgtccgagctggacaaggccggcttcatcaagcggcagctggtggagacccggcagatcaccaagcacgtggcccagatcctggactcccggatgaacaccaagtacgacgagaacgacaagctgatccgggaggtgaaggtgatcaccctgaagtccaagctggtgtccgacttccggaaggacttccagttctacaaggtgcgggagatcaacaactaccaccacgcccacgacgcctacctgaacgccgtggtgggcaccgccctgatcaagaagtaccccaagctggagtccgagttcgtgtacggcgactacaaggtgtacgacgtgcggaagatgatcgccaagtccgagcaggagatcggcaaggccaccgccaagtacttcttctactccaacatcatgaacttcttcaagaccgagatcaccctggccaacggcgagatccggaagcggcccctgatcgagaccaacggcgagaccggcgagatcgtgtgggacaagggccgggacttcgccaccgtgcggaaggtgctgtccatgccccaggtgaacatcgtgaagaagaccgaggtgcagaccggcggcttctccaaggagtccatcctgcccaagcggaactccgacaagctgatcgcccggaagaaggactgggaccccaagaagtacggcggcttcgactcccccaccgtggcctactccgtgctggtggtggccaaggtggagaagggcaagtccaagaagctgaagtccgtgaaggagctgctgggcatcaccatcatggagcggtcctccttcgagaagaaccccatcgacttcctggaggccaagggctacaaggaggtgaagaaggacctgatcatcaagctgcccaagtactccctgttcgagctggagaacggccggaagcggatgctggcctccgccggcgagctgcagaagggcaacgagctggccctgccctccaagtacgtgaacttcctgtacctggcctcccactacgagaagctgaagggctcccccgaggacaacgagcagaagcagctgttcgtggagcagcacaagcactacctggacgagatcatcgagcagatctccgagttctccaagcgggtgatcctggccgacgccaacctggacaaggtgctgtccgcctacaacaagcaccgggacaagcccatccgggagcaggccgagaacatcatccacctgttcaccctgaccaacctgggcgcccccgccgccttcaagtacttcgacaccaccatcgaccggaagcggtacacctccaccaaggaggtgctggacgccaccctgatccaccagtccatcaccggcctgtacgagacccggatcgacctgtcccagctgggcggcgactccggcggctcctccggcggctccaagcggaccgccgacggctccgagttcgagtcccccaagaagaagcggaaggtgtccggcggctcctccggcggctccatggactccaccaaggagaagtgcgactcctacaaggacgacctgctgctgcggatgggcctgaacgacaacaaggccggcatggagggcctggacaaggagaagatcaacaagatcatcatggaggccaccaagggctcccggttctacggcaacgagctgaagaaggagaagcaggtgaaccagcggatcgagaacatgatgcagcagaaggcccagatcacctcccagcagctgcggaaggcccagctgcaggtggaccggttcgccatggagctggagcagtcccggaacctgtccaacaccatcgtgcacatcgacatggacgccttctacgccgccgtggagatgcgggacaaccccgagctgaaggacaagcccatcgccgtgggctccatgtccatgctgtccacctccaactaccacgcccggcggttcggcgtgcgggccgccatgcccggcttcatcgccaagcggctgtgcccccagctgatcatcgtgccccccaacttcgacaagtaccgggccgtgtccaaggaggtgaaggagatcctggccgactacgaccccaacttcatggccatgtccctggacgaggcctacctgaacatcaccaagcacctggaggagcggcagaactggcccgaggacaagcggcggtacttcatcaagatgggctcctccgtggagaacgacaaccccggcaaggaggtgaacaagctgtccgagcacgagcggtccatctcccccctgctgttcgaggagtccccctccgacgtgcagccccccggcgaccccttccaggtgaacttcgaggagcagaacaacccccagatcctgcagaactccgtggtgttcggcacctccgcccaggaggtggtgaaggagatccggttccggatcgagcagaagaccaccctgaccgcctccgccggcatcgcccccaacaccatgctggccaaggtgtgctccgacaagaacaagcccaacggccagtaccagatcctgcccaaccggcaggccgtgatggacttcatcaaggacctgcccatccggaaggtgtccggcatcggcaaggtgaccgagaagatgctgaaggccctgggcatcatcacctgcaccgagctgtaccagcagcgggccctgctgtccctgctgttctccgagacctcctggcactacttcctgcacatctccctgggcctgggctccacccacctgacccgggaccgggtgcggaagtccatgtccgtggagcggaccttctccgagatcaacaaggccgaggagcagtactccctgtgccaggagctgtgctccgagctggcccaggacctgcagaaggagcggctgaagggccggaccgtgaccatcaagctgaagaacgtgaacttcgaggtgaagacccgggcctccaccgtgtcctccgtggtgtccaccgccgaggagatcttcgccatcgccaaggagctgctgaagaccgagatcgacgccgacttcccccaccccctgcggctgcggctgatgggcgtgcggatctcctccttccccaacgaggaggaccggaagcaccagcagggcggcggctccggcaagcggaccgccgacggctccggcggcggctcccccaagaagaagcggaaggtgtag

SEQ ID NO: 1926 - protein, 1970 aa, synthetic construct
  REGION 1..1970: note = Synthetic
MGKRTADGSEFESPKKKRKVDKKYSIGLDIGTNSVGWAVITDEYKVPSKKFKVLGNTDRHSIKKNLIGALLFDSGETAEATRLKRTARRRYTRRKNRICYLQEIFSNEMAKVDDSFFHRLEESFLVEEDKKHERHPIFGNIVDEVAYHEKYPTIYHLRKKLVDSTDKADLRLIYLALAHMIKFRGHFLIEGDLNPDNSDVDKLFIQLVQTYNQLFEENPINASGVDAKAILSARLSKSRRLENLIAQLPGEKKNGLFGNLIALSLGLTPNFKSNFDLAEDAKLQLSKDTYDDDLDNLLAQIGDQYADLFLAAKNLSDAILLSDILRVNTEITKAPLSASMIKRYDEHHQDLTLLKALVRQQLPEKYKEIFFDQSKNGYAGYIDGGASQEEFYKFIKPILEKMDGTEELLVKLNREDLLRKQRTFDNGSIPHQIHLGELHAILRRQEDFYPFLKDNREKIEKILTFRIPYYVGPLARGNSRFAWMTRKSEETITPWNFEEVVDKGASAQSFIERMTNFDKNLPNEKVLPKHSLLYEYFTVYNELTKVKYVTEGMRKPAFLSGEQKKAIVDLLFKTNRKVTVKQLKEDYFKKIECFDSVEISGVEDRFNASLGTYHDLLKIIKDKDFLDNEENEDILEDIVLTLTLFEDREMIEERLKTYAHLFDDKVMKQLKRRRYTGWGRLSRKLINGIRDKQSGKTILDFLKSDGFANRNFMQLIHDDSLTFKEDIQKAQVSGQGDSLHEHIANLAGSPAIKKGILQTVKVVDELVKVMGRHKPENIVIEMARENQTTQKGQKNSRERMKRIEEGIKELGSQILKEHPVENTQLQNEKLYLYYLQNGRDMYVDQELDINRLSDYDVDAIVPQSFLKDDSIDAKVLTRSDKNRGKSDNVPSEEVVKKMKNYWRQLLNAKLITQRKFDNLTKAERGGLSELDKAGFIKRQLVETRQITKHVAQILDSRMNTKYDENDKLIREVKVITLKSKLVSDFRKDFQFYKVREINNYHHAHDAYLNAVVGTALIKKYPKLESEFVYGDYKVYDVRKMIAKSEQEIGKATAKYFFYSNIMNFFKTEITLANGEIRKRPLIETNGETGEIVWDKGRDFATVRKVLSMPQVNIVKKTEVQTGGFSKESILPKRNSDKLIARKKDWDPKKYGGFDSPTVAYSVLVVAKVEKGKSKKLKSVKELLGITIMERSSFEKNPIDFLEAKGYKEVKKDLIIKLPKYSLFELENGRKRMLASAGELQKGNELALPSKYVNFLYLASHYEKLKGSPEDNEQKQLFVEQHKHYLDEIIEQISEFSKRVILADANLDKVLSAYNKHRDKPIREQAENIIHLFTLTNLGAPAAFKYFDTTIDRKRYTSTKEVLDATLIHQSITGLYETRIDLSQLGGDSGGSSGGSKRTADGSEFESPKKKRKVSGGSSGGSMDSTKEKCDSYKDDLLLRMGLNDNKAGMEGLDKEKINKIIMEATKGSRFYGNELKKEKQVNQRIENMMQQKAQITSQQLRKAQLQVDRFAMELEQSRNLSNTIVHIDMDAFYAAVEMRDNPELKDKPIAVGSMSMLSTSNYHARRFGVRAAMPGFIAKRLCPQLIIVPPNFDKYRAVSKEVKEILADYDPNFMAMSLDEAYLNITKHLEERQNWPEDKRRYFIKMGSSVENDNPGKEVNKLSEHERSISPLLFEESPSDVQPPGDPFQVNFEEQNNPQILQNSVVFGTSAQEVVKEIRFRIEQKTTLTASAGIAPNTMLAKVCSDKNKPNGQYQILPNRQAVMDFIKDLPIRKVSGIGKVTEKMLKALGIITCTELYQQRALLSLLFSETSWHYFLHISLGLGSTHLTRDRVRKSMSVERTFSEINKAEEQYSLCQELCSELAQDLQKERLKGRTVTIKLKNVNFEVKTRASTVSSVVSTAEEIFAIAKELLKTEIDADFPHPLRLRLMGVRISSFPNEEDRKHQQGGGSGKRTADGSGGGSPKKKRKV

SEQ ID NO: 1927 - DNA, 6512 bp, synthetic construct
  misc_feature 1..6512: note = Synthetic
  source 1..6512: mol_type = other DNA
aggactcactatttgttttcgcgcccagttgcaaaaagtgtcgaagctcagaataaacgctcaactttggccggatctgccaccatgggcaagcggaccgccgacggctccgagttcgagtcccccaagaagaagcggaaggtggacaagaagtactccatcggcctggacatcggcaccaactccgtgggctgggccgtgatcaccgacgagtacaaggtgccctccaagaagttcaaggtgctgggcaacaccgaccggcactccatcaagaagaacctgatcggcgccctgctgttcgactccggcgagaccgccgaggccacccggctgaagcggaccgcccggcggcggtacacccggcggaagaaccggatctgctacctgcaggagatcttctccaacgagatggccaaggtggacgactccttcttccaccggctggaggagtccttcctggtggaggaggacaagaagcacgagcggcaccccatcttcggcaacatcgtggacgaggtggcctaccacgagaagtaccccaccatctaccacctgcggaagaagctggtggactccaccgacaaggccgacctgcggctgatctacctggccctggcccacatgatcaagttccggggccacttcctgatcgagggcgacctgaaccccgacaactccgacgtggacaagctgttcatccagctggtgcagacctacaaccagctgttcgaggagaaccccatcaacgcctccggcgtggacgccaaggccatcctgtccgcccggctgtccaagtcccggcggctggagaacctgatcgcccagctgcccggcgagaagaagaacggcctgttcggcaacctgatcgccctgtccctgggcctgacccccaacttcaagtccaacttcgacctggccgaggacgccaagctgcagctgtccaaggacacctacgacgacgacctggacaacctgctggcccagatcggcgaccagtacgccgacctgttcctggccgccaagaacctgtccgacgccatcctgctgtccgacatcctgcgggtgaacaccgagatcaccaaggcccccctgtccgcctccatgatcaagcggtacgacgagcaccaccaggacctgaccctgctgaaggccctggtgcggcagcagctgcccgagaagtacaaggagatcttcttcgaccagtccaagaacggctacgccggctacatcgacggcggcgcctcccaggaggagttctacaagttcatcaagcccatcctggagaagatggacggcaccgaggagctgctggtgaagctgaaccgggaggacctgctgcggaagcagcggaccttcgacaacggctccatcccccaccagatccacctgggcgagctgcacgccatcctgcggcggcaggaggacttctaccccttcctgaaggacaaccgggagaagatcgagaagatcctgaccttccggatcccctactacgtgggccccctggcccggggcaactcccggttcgcctggatgacccggaagtccgaggagaccatcaccccctggaacttcgaggaggtggtggacaagggcgcctccgcccagtccttcatcgagcggatgaccaacttcgacaagaacctgcccaacgagaaggtgctgcccaagcactccctgctgtacgagtacttcaccgtgtacaacgagctgaccaaggtgaagtacgtgaccgagggcatgcggaagcccgccttcctgtccggcgagcagaagaaggccatcgtggacctgctgttcaagaccaaccggaaggtgaccgtgaagcagctgaaggaggactacttcaagaagatcgagtgcttcgactccgtggagatctccggcgtggaggaccggttcaacgcctccctgggcacctaccacgacctgctgaagatcatcaaggacaaggacttcctggacaacgaggagaacgaggacatcctggaggacatcgtgctgaccctgaccctgttcgaggaccgggagatgatcgaggagcggctgaagacctacgcccacctgttcgacgacaaggtgatgaagcagctgaagcggcggcggtacaccggctggggccggctgtcccggaagctgatcaacggcatccgggacaagcagtccggcaagaccatcctggacttcctgaagtccgacggcttcgccaaccggaacttcatgcagctgatccacgacgactccctgaccttcaaggaggacatccagaaggcccaggtgtccggccagggcgactccctgcacgagcacatcgccaacctggccggctcccccgccatcaagaagggcatcctgcagaccgtgaaggtggtggacgagctggtgaaggtgatgggccggcacaagcccgagaacatcgtgatcgagatggcccgggagaaccagaccacccagaagggccagaagaactcccgggagcggatgaagcggatcgaggagggcatcaaggagctgggctcccagatcctgaaggagcaccccgtggagaacacccagctgcagaacgagaagctgtacctgtactacctgcagaacggccgggacatgtacgtggaccaggagctggacatcaaccggctgtccgactacgacgtggcccacatcgtgccccagtccttcctgaaggacgactccatcgacgccaaggtgctgacccggtccgacaagaaccggggcaagtccgacaacgtgccctccgaggaggtggtgaagaagatgaagaactactggcggcagctgctgaacgccaagctgatcacccagcggaagttcgacaacctgaccaaggccgagcggggcggcctgtccgagctggacaaggccggcttcatcaagcggcagctggtggagacccggcagatcaccaagcacgtggcccagatcctggactcccggatgaacaccaagtacgacgagaacgacaagctgatccgggaggtgaaggtgatcaccctgaagtccaagctggtgtccgacttccggaaggacttccagttctacaaggtgcgggagatcaacaactaccaccacgcccacgacgcctacctgaacgccgtggtgggcaccgccctgatcaagaagtaccccaagctggagtccgagttcgtgtacggcgactacaaggtgtacgacgtgcggaagatgatcgccaagtccgagcaggagatcggcaaggccaccgccaagtacttcttctactccaacatcatgaacttcttcaagaccgagatcaccctggccaacggcgagatccggaagcggcccctgatcgagaccaacggcgagaccggcgagatcgtgtgggacaagggccgggacttcgccaccgtgcggaaggtgctgtccatgccccaggtgaacatcgtgaagaagaccgaggtgcagaccggcggcttctccaaggagtccatcctgcccaagcggaactccgacaagctgatcgcccggaagaaggactgggaccccaagaagtacggcggcttcgactcccccaccgtggcctactccgtgctggtggtggccaaggtggagaagggcaagtccaagaagctgaagtccgtgaaggagctgctgggcatcaccatcatggagcggtcctccttcgagaagaaccccatcgacttcctggaggccaagggctacaaggaggtgaagaaggacctgatcatcaagctgcccaagtactccctgttcgagctggagaacggccggaagcggatgctggcctccgccggcgagctgcagaagggcaacgagctggccctgccctccaagtacgtgaacttcctgtacctggcctcccactacgagaagctgaagggctcccccgaggacaacgagcagaagcagctgttcgtggagcagcacaagcactacctggacgagatcatcgagcagatctccgagttctccaagcgggtgatcctggccgacgccaacctggacaaggtgctgtccgcctacaacaagcaccgggacaagcccatccgggagcaggccgagaacatcatccacctgttcaccctgaccaacctgggcgcccccgccgccttcaagtacttcgacaccaccatcgaccggaagcggtacacctccaccaaggaggtgctggacgccaccctgatccaccagtccatcaccggcctgtacgagacccggatcgacctgtcccagctgggcggcgactccggcggctcctccggcggctccaagcggaccgccgacggctccgagttcgagtcccccaagaagaagcggaaggtgtccggcggctcctccggcggctccatggactccaccaaggagaagtgcgactcctacaaggacgacctgctgctgcggatgggcctgaacgacaacaaggccggcatggagggcctggacaaggagaagatcaacaagatcatcatggaggccaccaagggctcccggttctacggcaacgagctgaagaaggagaagcaggtgaaccagcggatcgagaacatgatgcagcagaaggcccagatcacctcccagcagctgcggaaggcccagctgcaggtggaccggttcgccatggagctggagcagtcccggaacctgtccaacaccatcgtgcacatcgacatggacgccttctacgccgccgtggagatgcgggacaaccccgagctgaaggacaagcccatcgccgtgggctccatgtccatgctgtccacctccaactaccacgcccggcggttcggcgtgcgggccgccatgcccggcttcatcgccaagcggctgtgcccccagctgatcatcgtgccccccaacttcgacaagtaccgggccgtgtccaaggaggtgaaggagatcctggccgactacgaccccaacttcatggccatgtccctggacgaggcctacctgaacatcaccaagcacctggaggagcggcagaactggcccgaggacaagcggcggtacttcatcaagatgggctcctccgtggagaacgacaaccccggcaaggaggtgaacaagctgtccgagcacgagcggtccatctcccccctgctgttcgaggagtccccctccgacgtgcagccccccggcgaccccttccaggtgaacttcgaggagcagaacaacccccagatcctgcagaactccgtggtgttcggcacctccgcccaggaggtggtgaaggagatccggttccggatcgagcagaagaccaccctgaccgcctccgccggcatcgcccccaacaccatgctggccaaggtgtgctccgacaagaacaagcccaacggccagtaccagatcctgcccaaccggcaggccgtgatggacttcatcaaggacctgcccatccggaaggtgtccggcatcggcaaggtgaccgagaagatgctgaaggccctgggcatcatcacctgcaccgagctgtaccagcagcgggccctgctgtccctgctgttctccgagacctcctggcactacttcctgcacatctccctgggcctgggctccacccacctgacccgggaccgggtgcggaagtccatgtccgtggagcggaccttctccgagatcaacaaggccgaggagcagtactccctgtgccaggagctgtgctccgagctggcccaggacctgcagaaggagcggctgaagggccggaccgtgaccatcaagctgaagaacgtgaacttcgaggtgaagacccgggcctccaccgtgtcctccgtggtgtccaccgccgaggagatcttcgccatcgccaaggagctgctgaagaccgagatcgacgccgacttcccccaccccctgcggctgcggctgatgggcgtgcggatctcctccttccccaacgaggaggaccggaagcaccagcagggcggcggctccggcaagcggaccgccgacggctccggcggcggctcccccaagaagaagcggaaggtgtagctagcaccagcctcaagaacacccgaatggagtctctaagctacataataccaacttacactttacaaaatgttgtcccccaaaatgtagccattcgtatctgctcctaataaaaagaaagtttcttcacattctctcgagaaaaaaaaaaaatggaaaaaaaaaaaacggaaaaaaaaaaaaggtaaaaaaaaaaaatataaaaaaaaaaaacataaaaaaaaaaaacgaaaaaaaaaaaacgtaaaaaaaaaaaactcaaaaaaaaaaaagataaaaaaaaaaaacctaaaaaaaaaaaatgtaaaaaaaaaaaagggaaaaaaaaaaaacgcaaaaaaaaaaaacacaaaaaaaaaaaatgcaaaaaaaaaaaatcgaaaaaaaaaaaatctaaaaaaaaaaaacgaaaaaaaaaaaacccaaaaaaaaaaaagacaaaaaaaaaaaatagaaaaaaaaaaagttaaaaaaaaaaaactgaaaaaaaaaaaatttaaaaaaaaaaaatctag

SEQ ID NO: 1928 - DNA, 5913 bp, synthetic construct
  misc_feature 1..5913: note = Synthetic
  source 1..5913: mol_type = other DNA
atgggcaagcggaccgccgacggctccgagttcgagtcccccaagaagaagcggaaggtggacaagaagtactccatcggcctggacatcggcaccaactccgtgggctgggccgtgatcaccgacgagtacaaggtgccctccaagaagttcaaggtgctgggcaacaccgaccggcactccatcaagaagaacctgatcggcgccctgctgttcgactccggcgagaccgccgaggccacccggctgaagcggaccgcccggcggcggtacacccggcggaagaaccggatctgctacctgcaggagatcttctccaacgagatggccaaggtggacgactccttcttccaccggctggaggagtccttcctggtggaggaggacaagaagcacgagcggcaccccatcttcggcaacatcgtggacgaggtggcctaccacgagaagtaccccaccatctaccacctgcggaagaagctggtggactccaccgacaaggccgacctgcggctgatctacctggccctggcccacatgatcaagttccggggccacttcctgatcgagggcgacctgaaccccgacaactccgacgtggacaagctgttcatccagctggtgcagacctacaaccagctgttcgaggagaaccccatcaacgcctccggcgtggacgccaaggccatcctgtccgcccggctgtccaagtcccggcggctggagaacctgatcgcccagctgcccggcgagaagaagaacggcctgttcggcaacctgatcgccctgtccctgggcctgacccccaacttcaagtccaacttcgacctggccgaggacgccaagctgcagctgtccaaggacacctacgacgacgacctggacaacctgctggcccagatcggcgaccagtacgccgacctgttcctggccgccaagaacctgtccgacgccatcctgctgtccgacatcctgcgggtgaacaccgagatcaccaaggcccccctgtccgcctccatgatcaagcggtacgacgagcaccaccaggacctgaccctgctgaaggccctggtgcggcagcagctgcccgagaagtacaaggagatcttcttcgaccagtccaagaacggctacgccggctacatcgacggcggcgcctcccaggaggagttctacaagttcatcaagcccatcctggagaagatggacggcaccgaggagctgctggtgaagctgaaccgggaggacctgctgcggaagcagcggaccttcgacaacggctccatcccccaccagatccacctgggcgagctgcacgccatcctgcggcggcaggaggacttctaccccttcctgaaggacaaccgggagaagatcgagaagatcctgaccttccggatcccctactacgtgggccccctggcccggggcaactcccggttcgcctggatgacccggaagtccgaggagaccatcaccccctggaacttcgaggaggtggtggacaagggcgcctccgcccagtccttcatcgagcggatgaccaacttcgacaagaacctgcccaacgagaaggtgctgcccaagcactccctgctgtacgagtacttcaccgtgtacaacgagctgaccaaggtgaagtacgtgaccgagggcatgcggaagcccgccttcctgtccggcgagcagaagaaggccatcgtggacctgctgttcaagaccaaccggaaggtgaccgtgaagcagctgaaggaggactacttcaagaagatcgagtgcttcgactccgtggagatctccggcgtggaggaccggttcaacgcctccctgggcacctaccacgacctgctgaagatcatcaaggacaaggacttcctggacaacgaggagaacgaggacatcctggaggacatcgtgctgaccctgaccctgttcgaggaccgggagatgatcgaggagcggctgaagacctacgcccacctgttcgacgacaaggtgatgaagcagctgaagcggcggcggtacaccggctggggccggctgtcccggaagctgatcaacggcatccgggacaagcagtccggcaagaccatcctggacttcctgaagtccgacggcttcgccaaccggaacttcatgcagctgatccacgacgactccctgaccttcaaggaggacatccagaaggcccaggtgtccggccagggcgactccctgcacgagcacatcgccaacctggccggctcccccgccatcaagaagggcatcctgcagaccgtgaaggtggtggacgagctggtgaaggtgatgggccggcacaagcccgagaacatcgtgatcgagatggcccgggagaaccagaccacccagaagggccagaagaactcccgggagcggatgaagcggatcgaggagggcatcaaggagctgggctcccagatcctgaaggagcaccccgtggagaacacccagctgcagaacgagaagctgtacctgtactacctgcagaacggccgggacatgtacgtggaccaggagctggacatcaaccggctgtccgactacgacgtggcccacatcgtgccccagtccttcctgaaggacgactccatcgacgccaaggtgctgacccggtccgacaagaaccggggcaagtccgacaacgtgccctccgaggaggtggtgaagaagatgaagaactactggcggcagctgctgaacgccaagctgatcacccagcggaagttcgacaacctgaccaaggccgagcggggcggcctgtccgagctggacaaggccggcttcatcaagcggcagctggtggagacccggcagatcaccaagcacgtggcccagatcctggactcccggatgaacaccaagtacgacgagaacgacaagctgatccgggaggtgaaggtgatcaccctgaagtccaagctggtgtccgacttccggaaggacttccagttctacaaggtgcgggagatcaacaactaccaccacgcccacgacgcctacctgaacgccgtggtgggcaccgccctgatcaagaagtaccccaagctggagtccgagttcgtgtacggcgactacaaggtgtacgacgtgcggaagatgatcgccaagtccgagcaggagatcggcaaggccaccgccaagtacttcttctactccaacatcatgaacttcttcaagaccgagatcaccctggccaacggcgagatccggaagcggcccctgatcgagaccaacggcgagaccggcgagatcgtgtgggacaagggccgggacttcgccaccgtgcggaaggtgctgtccatgccccaggtgaacatcgtgaagaagaccgaggtgcagaccggcggcttctccaaggagtccatcctgcccaagcggaactccgacaagctgatcgcccggaagaaggactgggaccccaagaagtacggcggcttcgactcccccaccgtggcctactccgtgctggtggtggccaaggtggagaagggcaagtccaagaagctgaagtccgtgaaggagctgctgggcatcaccatcatggagcggtcctccttcgagaagaaccccatcgacttcctggaggccaagggctacaaggaggtgaagaaggacctgatcatcaagctgcccaagtactccctgttcgagctggagaacggccggaagcggatgctggcctccgccggcgagctgcagaagggcaacgagctggccctgccctccaagtacgtgaacttcctgtacctggcctcccactacgagaagctgaagggctcccccgaggacaacgagcagaagcagctgttcgtggagcagcacaagcactacctggacgagatcatcgagcagatctccgagttctccaagcgggtgatcctggccgacgccaacctggacaaggtgctgtccgcctacaacaagcaccgggacaagcccatccgggagcaggccgagaacatcatccacctgttcaccctgaccaacctgggcgcccccgccgccttcaagtacttcgacaccaccatcgaccggaagcggtacacctccaccaaggaggtgctggacgccaccctgatccaccagtccatcaccggcctgtacgagacccggatcgacctgtcccagctgggcggcgactccggcggctcctccggcggctccaagcggaccgccgacggctccgagttcgagtcccccaagaagaagcggaaggtgtccggcggctcctccggcggctccatggactccaccaaggagaagtgcgactcctacaaggacgacctgctgctgcggatgggcctgaacgacaacaaggccggcatggagggcctggacaaggagaagatcaacaagatcatcatggaggccaccaagggctcccggttctacggcaacgagctgaagaaggagaagcaggtgaaccagcggatcgagaacatgatgcagcagaaggcccagatcacctcccagcagctgcggaaggcccagctgcaggtggaccggttcgccatggagctggagcagtcccggaacctgtccaacaccatcgtgcacatcgacatggacgccttctacgccgccgtggagatgcgggacaaccccgagctgaaggacaagcccatcgccgtgggctccatgtccatgctgtccacctccaactaccacgcccggcggttcggcgtgcgggccgccatgcccggcttcatcgccaagcggctgtgcccccagctgatcatcgtgccccccaacttcgacaagtaccgggccgtgtccaaggaggtgaaggagatcctggccgactacgaccccaacttcatggccatgtccctggacgaggcctacctgaacatcaccaagcacctggaggagcggcagaactggcccgaggacaagcggcggtacttcatcaagatgggctcctccgtggagaacgacaaccccggcaaggaggtgaacaagctgtccgagcacgagcggtccatctcccccctgctgttcgaggagtccccctccgacgtgcagccccccggcgaccccttccaggtgaacttcgaggagcagaacaacccccagatcctgcagaactccgtggtgttcggcacctccgcccaggaggtggtgaaggagatccggttccggatcgagcagaagaccaccctgaccgcctccgccggcatcgcccccaacaccatgctggccaaggtgtgctccgacaagaacaagcccaacggccagtaccagatcctgcccaaccggcaggccgtgatggacttcatcaaggacctgcccatccggaaggtgtccggcatcggcaaggtgaccgagaagatgctgaaggccctgggcatcatcacctgcaccgagctgtaccagcagcgggccctgctgtccctgctgttctccgagacctcctggcactacttcctgcacatctccctgggcctgggctccacccacctgacccgggaccgggtgcggaagtccatgtccgtggagcggaccttctccgagatcaacaaggccgaggagcagtactccctgtgccaggagctgtgctccgagctggcccaggacctgcagaaggagcggctgaagggccggaccgtgaccatcaagctgaagaacgtgaacttcgaggtgaagacccgggcctccaccgtgtcctccgtggtgtccaccgccgaggagatcttcgccatcgccaaggagctgctgaagaccgagatcgacgccgacttcccccaccccctgcggctgcggctgatgggcgtgcggatctcctccttccccaacgaggaggaccggaagcaccagcagggcggcggctccggcaagcggaccgccgacggctccggcggcggctcccccaagaagaagcggaaggtgtag

SEQ ID NO: 1929 - protein, 1970 aa, synthetic construct
  REGION 1..1970: note = Synthetic
MGKRTADGSEFESPKKKRKVDKKYSIGLDIGTNSVGWAVITDEYKVPSKKFKVLGNTDRHSIKKNLIGALLFDSGETAEATRLKRTARRRYTRRKNRICYLQEIFSNEMAKVDDSFFHRLEESFLVEEDKKHERHPIFGNIVDEVAYHEKYPTIYHLRKKLVDSTDKADLRLIYLALAHMIKFRGHFLIEGDLNPDNSDVDKLFIQLVQTYNQLFEENPINASGVDAKAILSARLSKSRRLENLIAQLPGEKKNGLFGNLIALSLGLTPNFKSNFDLAEDAKLQLSKDTYDDDLDNLLAQIGDQYADLFLAAKNLSDAILLSDILRVNTEITKAPLSASMIKRYDEHHQDLTLLKALVRQQLPEKYKEIFFDQSKNGYAGYIDGGASQEEFYKFIKPILEKMDGTEELLVKLNREDLLRKQRTFDNGSIPHQIHLGELHAILRRQEDFYPFLKDNREKIEKILTFRIPYYVGPLARGNSRFAWMTRKSEETITPWNFEEVVDKGASAQSFIERMTNFDKNLPNEKVLPKHSLLYEYFTVYNELTKVKYVTEGMRKPAFLSGEQKKAIVDLLFKTNRKVTVKQLKEDYFKKIECFDSVEISGVEDRFNASLGTYHDLLKIIKDKDFLDNEENEDILEDIVLTLTLFEDREMIEERLKTYAHLFDDKVMKQLKRRRYTGWGRLSRKLINGIRDKQSGKTILDFLKSDGFANRNFMQLIHDDSLTFKEDIQKAQVSGQGDSLHEHIANLAGSPAIKKGILQTVKVVDELVKVMGRHKPENIVIEMARENQTTQKGQKNSRERMKRIEEGIKELGSQILKEHPVENTQLQNEKLYLYYLQNGRDMYVDQELDINRLSDYDVAHIVPQSFLKDDSIDAKVLTRSDKNRGKSDNVPSEEVVKKMKNYWRQLLNAKLITQRKFDNLTKAERGGLSELDKAGFIKRQLVETRQITKHVAQILDSRMNTKYDENDKLIREVKVITLKSKLVSDFRKDFQFYKVREINNYHHAHDAYLNAVVGTALIKKYPKLESEFVYGDYKVYDVRKMIAKSEQEIGKATAKYFFYSNIMNFFKTEITLANGEIRKRPLIETNGETGEIVWDKGRDFATVRKVLSMPQVNIVKKTEVQTGGFSKESILPKRNSDKLIARKKDWDPKKYGGFDSPTVAYSVLVVAKVEKGKSKKLKSVKELLGITIMERSSFEKNPIDFLEAKGYKEVKKDLIIKLPKYSLFELENGRKRMLASAGELQKGNELALPSKYVNFLYLASHYEKLKGSPEDNEQKQLFVEQHKHYLDEIIEQISEFSKRVILADANLDKVLSAYNKHRDKPIREQAENIIHLFTLTNLGAPAAFKYFDTTIDRKRYTSTKEVLDATLIHQSITGLYETRIDLSQLGGDSGGSSGGSKRTADGSEFESPKKKRKVSGGSSGGSMDSTKEKCDSYKDDLLLRMGLNDNKAGMEGLDKEKINKIIMEATKGSRFYGNELKKEKQVNQRIENMMQQKAQITSQQLRKAQLQVDRFAMELEQSRNLSNTIVHIDMDAFYAAVEMRDNPELKDKPIAVGSMSMLSTSNYHARRFGVRAAMPGFIAKRLCPQLIIVPPNFDKYRAVSKEVKEILADYDPNFMAMSLDEAYLNITKHLEERQNWPEDKRRYFIKMGSSVENDNPGKEVNKLSEHERSISPLLFEESPSDVQPPGDPFQVNFEEQNNPQILQNSVVFGTSAQEVVKEIRFRIEQKTTLTASAGIAPNTMLAKVCSDKNKPNGQYQILPNRQAVMDFIKDLPIRKVSGIGKVTEKMLKALGIITCTELYQQRALLSLLFSETSWHYFLHISLGLGSTHLTRDRVRKSMSVERTFSEINKAEEQYSLCQELCSELAQDLQKERLKGRTVTIKLKNVNFEVKTRASTVSSVVSTAEEIFAIAKELLKTEIDADFPHPLRLRLMGVRISSFPNEEDRKHQQGGGSGKRTADGSGGGSPKKKRKV

SEQ ID NO: 1930 - DNA, 7565 bp, synthetic construct
  misc_feature 1..7565: note = Synthetic
  source 1..7565: mol_type = other DNA
aggactcactatttgttttcgcgcccagttgcaaaaagtgtcgaagctcagaataaacgctcaactttggccggatctgccaccatgggcaagcggcccgccgccaccaagaaggccggccaggccaagaagaagaaggacaagaagtactccatcggcctggacatcggcaccaactccgtgggctgggccgtgatcaccgacgagtacaaggtgccctccaagaagttcaaggtgctgggcaacaccgaccggcactccatcaagaagaacctgatcggcgccctgctgttcgactccggcgagaccgccgaggccacccggctgaagcggaccgcccggcggcggtacacccggcggaagaaccggatctgctacctgcaggagatcttctccaacgagatggccaaggtggacgactccttcttccaccggctggaggagtccttcctggtggaggaggacaagaagcacgagcggcaccccatcttcggcaacatcgtggacgaggtggcctaccacgagaagtaccccaccatctaccacctgcggaagaagctggtggactccaccgacaaggccgacctgcggctgatctacctggccctggcccacatgatcaagttccggggccacttcctgatcgagggcgacctgaaccccgacaactccgacgtggacaagctgttcatccagctggtgcagacctacaaccagctgttcgaggagaaccccatcaacgcctccggcgtggacgccaaggccatcctgtccgcccggctgtccaagtcccggcggctggagaacctgatcgcccagctgcccggcgagaagaagaacggcctgttcggcaacctgatcgccctgtccctgggcctgacccccaacttcaagtccaacttcgacctggccgaggacgccaagctgcagctgtccaaggacacctacgacgacgacctggacaacctgctggcccagatcggcgaccagtacgccgacctgttcctggccgccaagaacctgtccgacgccatcctgctgtccgacatcctgcgggtgaacaccgagatcaccaaggcccccctgtccgcctccatgatcaagcggtacgacgagcaccaccaggacctgaccctgctgaaggccctggtgcggcagcagctgcccgagaagtacaaggagatcttcttcgaccagtccaagaacggctacgccggctacatcgacggcggcgcctcccaggaggagttctacaagttcatcaagcccatcctggagaagatggacggcaccgaggagctgctggtgaagctgaaccgggaggacctgctgcggaagcagcggaccttcgacaacggctccatcccccaccagatccacctgggcgagctgcacgccatcctgcggcggcaggaggacttctaccccttcctgaaggacaaccgggagaagatcgagaagatcctgaccttccggatcccctactacgtgggccccctggcccggggcaactcccggttcgcctggatgacccggaagtccgaggagaccatcaccccctggaacttcgaggaggtggtggacaagggcgcctccgcccagtccttcatcgagcggatgaccaacttcgacaagaacctgcccaacgagaaggtgctgcccaagcactccctgctgtacgagtacttcaccgtgtacaacgagctgaccaaggtgaagtacgtgaccgagggcatgcggaagcccgccttcctgtccggcgagcagaagaaggccatcgtggacctgctgttcaagaccaaccggaaggtgaccgtgaagcagctgaaggaggactacttcaagaagatcgagtgcttcgactccgtggagatctccggcgtggaggaccggttcaacgcctccctgggcacctaccacgacctgctgaagatcatcaaggacaaggacttcctggacaacgaggagaacgaggacatcctggaggacatcgtgctgaccctgaccctgttcgaggaccgggagatgatcgaggagcggctgaagacctacgcccacctgttcgacgacaaggtgatgaagcagctgaagcggcggcggtacaccggctggggccggctgtcccggaagctgatcaacggcatccgggacaagcagtccggcaagaccatcctggacttcctgaagtccgacggcttcgccaaccggaacttcatgcagctgatccacgacgactccctgaccttcaaggaggacatccagaaggcccaggtgtccggccagggcgactccctgcacgagcacatcgccaacctggccggctcccccgccatcaagaagggcatcctgcagaccgtgaaggtggtggacgagctggtgaaggtgatgggccggcacaagcccgagaacatcgtgatcgagatggcccgggagaaccagaccacccagaagggccagaagaactcccgggagcggatgaagcggatcgaggagggcatcaaggagctgggctcccagatcctgaaggagcaccccgtggagaacacccagctgcagaacgagaagctgtacctgtactacctgcagaacggccgggacatgtacgtggaccaggagctggacatcaaccggctgtccgactacgacgtggcccacatcgtgccccagtccttcctgaaggacgactccatcgacgccaaggtgctgacccggtccgacaagaaccggggcaagtccgacaacgtgccctccgaggaggtggtgaagaagatgaagaactactggcggcagctgctgaacgccaagctgatcacccagcggaagttcgacaacctgaccaaggccgagcggggcggcctgtccgagctggacaaggccggcttcatcaagcggcagctggtggagacccggcagatcaccaagcacgtggcccagatcctggactcccggatgaacaccaagtacgacgagaacgacaagctgatccgggaggtgaaggtgatcaccctgaagtccaagctggtgtccgacttccggaaggacttccagttctacaaggtgcgggagatcaacaactaccaccacgcccacgacgcctacctgaacgccgtggtgggcaccgccctgatcaagaagtaccccaagctggagtccgagttcgtgtacggcgactacaaggtgtacgacgtgcggaagatgatcgccaagtccgagcaggagatcggcaaggccaccgccaagtacttcttctactccaacatcatgaacttcttcaagaccgagatcaccctggccaacggcgagatccggaagcggcccctgatcgagaccaacggcgagaccggcgagatcgtgtgggacaagggccgggacttcgccaccgtgcggaaggtgctgtccatgccccaggtgaacatcgtgaagaagaccgaggtgcagaccggcggcttctccaaggagtccatcctgcccaagcggaactccgacaagctgatcgcccggaagaaggactgggaccccaagaagtacggcggcttcgactcccccaccgtggcctactccgtgctggtggtggccaaggtggagaagggcaagtccaagaagctgaagtccgtgaaggagctgctgggcatcaccatcatggagcggtcctccttcgagaagaaccccatcgacttcctggaggccaagggctacaaggaggtgaagaaggacctgatcatcaagctgcccaagtactccctgttcgagctggagaacggccggaagcggatgctggcctccgccggcgagctgcagaagggcaacgagctggccctgccctccaagtacgtgaacttcctgtacctggcctcccactacgagaagctgaagggctcccccgaggacaacgagcagaagcagctgttcgtggagcagcacaagcactacctggacgagatcatcgagcagatctccgagttctccaagcgggtgatcctggccgacgccaacctggacaaggtgctgtccgcctacaacaagcaccgggacaagcccatccgggagcaggccgagaacatcatccacctgttcaccctgaccaacctgggcgcccccgccgccttcaagtacttcgacaccaccatcgaccggaagcggtacacctccaccaaggaggtgctggacgccaccctgatccaccagtccatcaccggcctgtacgagacccggatcgacctgtcccagctgggcggcgacggcgcccccgagtccgccaccgagtccggcggcacctccaccgagtccgagggctccgccggccccaagaagaagcggaaggtgacctccaccgagtccgagggctccgccggctccgccggctccacctccggctcctcctccggcatgaagatcgccgtggtggacaaggccctgaacaacacccggtacgacaagcacttccagctgtacggcgaggaggtggacgtgttccacatgtgcaacgagaagctgtccggccggctgctgaagaagcacatcaccatcggcacccccgagaaccccttcgaccccaacgactacgacttcgtgatcctggtgggcgccgagcccttcctgtacttcgccggcaagaagggcatcggcgactacaccggcaagcgggtggagtacaacggctacgccaactggatcgcctccatctcccccgcccagctgcacttcaagcccgagatgaagcccgtgttcgacgccaccgtggagaacatccacgacatcatcaacggccgggagaagatcgccaaggccggcgactaccggcccatcaccgaccccgacgaggccgaggagtacatcaagatggtgtacaacatggtgatcggccccgtggccttcgcctccgccacctccgccctgtactgccgggacggctacctgctgggcgtgtccatctcccaccaggagtaccagggcgtgtacatcgactccgactgcctgaccgaggtggccgtgtactacctgcagaagatcctggactccgagaaccacaccatcgtgttccacaacctgaagttcgacatgcacttctacaagtaccacctgggcctgaccttcgacaaggcccacaaggagcggcggctgcacgacaccatgctgcagcactacgtgctggacgagcggcggggcacccacggcctgaagtccctggccatgaagtacaccgacatgggcgactacgacttcgagctggacaagttcaaggacgactactgcaaggcccacaagatcaagaaggaggacttcacctacgacctgatccccttcgacatcatgtggccctacgccgccaaggacaccgacgccaccatccggctgcacaacttcttcctgcccaagatcgagaagaacgagaagctgtgctccctgtactacgacgtgctgatgcccggctgcgtgttcctgcagcgggtggaggaccggggcgtgcccatctccatcgaccggctgaaggaggcccagtaccagctgacccacaacctgaacaaggcccgggagaagctgtacacctaccccgaggtgaagcagctggagcaggaccagaacgaggccttcaaccccaactccgtgaagcagctgcgggtgctgctgttcgactacgtgggcctgacccccaccggcaagctgaccgacaccggcgccgactccaccgacgccgaggccctgaacgagctggccacccagcaccccatcgccaagaccctgctggagatccggaagctgaccaagctgatctccacctacgtggagaagatcctgctgtccatcgacgccgacggctgcatccggaccggcttccacgagcacatgaccacctccggccggctgtcctcctccggcaagctgaacctgcagcagctgccccgggacgagtccatcatcaagggctgcgtggtggccccccccggctaccgggtgatcgcctgggacctgaccaccgccgaggtgtactacgccgccgtgctgtccggcgaccggaacatgcagcaggtgttcatcaacatgcggaacgagcccgacaagtaccccgacttccactccaacatcgcccacatggtgttcaagctgcagtgcgagccccgggacgtgaagaagctgttccccgccctgcggcaggccgccaaggccatcaccttcggcatcctgtacggctccggccccgccaaggtggcccactccgtgaacgaggccctgctggagcaggccgccaagaccggcgagcccttcgtggagtgcaccgtggccgacgccaaggagtacatcgagacctacttcggccagttcccccagctgaagcggtggatcgacaagtgccacgaccagatcaagaaccacggcttcatctactcccacttcggccggaagcggcggctgcacaacatccactccgaggaccggggcgtgcagggcgaggagatccggtccggcttcaacgccatcatccagtccgcctcctccgactccctgctgctgggcgccgtggacgccgacaacgagatcatctccctgggcctggagcaggagatgaagatcgtgatgctggtgcacgactccgtggtggccatcgtgcgggaggacctgatcgaccagtacaacgagatcctgatccggaacatccagaaggaccggggcatctccatccccggctgccccatcggcatcgactccgactccgaggccggcggctcccgggactactcctgcggcaagatgaagaagcagcacccctccatcgcctgcatcgacgacgacgagtacacccggtacgtgaagggcgtgctgctggacgccgagttcgagtacaagaagctggccgccatggacaaggagcaccccgaccactccaagtacaaggacgacaagttcatcgccgtgtgcaaggacctggacaacgtgaagcggatcctgggcgccggcggcggctccggcaagcggaccgccgacggctccggcggcggctcccccaagaagaagcggaaggtgcctgccgctaagagagtgaagctggactagctagcaccagcctcaagaacacccgaatggagtctctaagctacataataccaacttacactttacaaaatgttgtcccccaaaatgtagccattcgtatctgctcctaataaaaagaaagtttcttcacattctctcgagaaaaaaaaaaaatggaaaaaaaaaaaacggaaaaaaaaaaaaggtaaaaaaaaaaaatataaaaaaaaaaaacataaaaaaaaaaaacgaaaaaaaaaaaacgtaaaaaaaaaaaactcaaaaaaaaaaaagataaaaaaaaaaaacctaaaaaaaaaaaatgtaaaaaaaaaaaagggaaaaaaaaaaaacgcaaaaaaaaaaaacacaaaaaaaaaaaatgcaaaaaaaaaaaatcgaaaaaaaaaaaatctaaaaaaaaaaaacgaaaaaaaaaaaacccaaaaaaaaaaaagacaaaaaaaaaaaatagaaaaaaaaaaagttaaaaaaaaaaaactgaaaaaaaaaaaatttaaaaaaaaaaaatctag

SEQ ID NO: 1931 - DNA, 6966 bp, synthetic construct
  misc_feature 1..6966: note = Synthetic
  source 1..6966: mol_type = other DNA
atgggcaagcggcccgccgccaccaagaaggccggccaggccaagaagaagaaggacaagaagtactccatcggcctggacatcggcaccaactccgtgggctgggccgtgatcaccgacgagtacaaggtgccctccaagaagttcaaggtgctgggcaacaccgaccggcactccatcaagaagaacctgatcggcgccctgctgttcgactccggcgagaccgccgaggccacccggctgaagcggaccgcccggcggcggtacacccggcggaagaaccggatctgctacctgcaggagatcttctccaacgagatggccaaggtggacgactccttcttccaccggctggaggagtccttcctggtggaggaggacaagaagcacgagcggcaccccatcttcggcaacatcgtggacgaggtggcctaccacgagaagtaccccaccatctaccacctgcggaagaagctggtggactccaccgacaaggccgacctgcggctgatctacctggccctggcccacatgatcaagttccggggccacttcctgatcgagggcgacctgaaccccgacaactccgacgtggacaagctgttcatccagctggtgcagacctacaaccagctgttcgaggagaaccccatcaacgcctccggcgtggacgccaaggccatcctgtccgcccggctgtccaagtcccggcggctggagaacctgatcgcccagctgcccggcgagaagaagaacggcctgttcggcaacctgatcgccctgtccctgggcctgacccccaacttcaagtccaacttcgacctggccgaggacgccaagctgcagctgtccaaggacacctacgacgacgacctggacaacctgctggcccagatcggcgaccagtacgccgacctgttcctggccgccaagaacctgtccgacgccatcctgctgtccgacatcctgcgggtgaacaccgagatcaccaaggcccccctgtccgcctccatgatcaagcggtacgacgagcaccaccaggacctgaccctgctgaaggccctggtgcggcagcagctgcccgagaagtacaaggagatcttcttcgaccagtccaagaacggctacgccggctacatcgacggcggcgcctcccaggaggagttctacaagttcatcaagcccatcctggagaagatggacggcaccgaggagctgctggtgaagctgaaccgggaggacctgctgcggaagcagcggaccttcgacaacggctccatcccccaccagatccacctgggcgagctgcacgccatcctgcggcggcaggaggacttctaccccttcctgaaggacaaccgggagaagatcgagaagatcctgaccttccggatcccctactacgtgggccccctggcccggggcaactcccggttcgcctggatgacccggaagtccgaggagaccatcaccccctggaacttcgaggaggtggtggacaagggcgcctccgcccagtccttcatcgagcggatgaccaacttcgacaagaacctgcccaacgagaaggtgctgcccaagcactccctgctgtacgagtacttcaccgtgtacaacgagctgaccaaggtgaagtacgtgaccgagggcatgcggaagcccgccttcctgtccggcgagcagaagaaggccatcgtggacctgctgttcaagaccaaccggaaggtgaccgtgaagcagctgaaggaggactacttcaagaagatcgagtgcttcgactccgtggagatctccggcgtggaggaccggttcaacgcctccctgggcacctaccacgacctgctgaagatcatcaaggacaaggacttcctggacaacgaggagaacgaggacatcctggaggacatcgtgctgaccctgaccctgttcgaggaccgggagatgatcgaggagcggctgaagacctacgcccacctgttcgacgacaaggtgatgaagcagctgaagcggcggcggtacaccggctggggccggctgtcccggaagctgatcaacggcatccgggacaagcagtccggcaagaccatcctggacttcctgaagtccgacggcttcgccaaccggaacttcatgcagctgatccacgacgactccctgaccttcaaggaggacatccagaaggcccaggtgtccggccagggcgactccctgcacgagcacatcgccaacctggccggctcccccgccatcaagaagggcatcctgcagaccgtgaaggtggtggacgagctggtgaaggtgatgggccggcacaagcccgagaacatcgtgatcgagatggcccgggagaaccagaccacccagaagggccagaagaactcccgggagcggatgaagcggatcgaggagggcatcaaggagctgggctcccagatcctgaaggagcaccccgtggagaacacccagctgcagaacgagaagctgtacctgtactacctgcagaacggccgggacatgtacgtggaccaggagctggacatcaaccggctgtccgactacgacgtggcccacatcgtgccccagtccttcctgaaggacgactccatcgacgccaaggtgctgacccggtccgacaagaaccggggcaagtccgacaacgtgccctccgaggaggtggtgaagaagatgaagaactactggcggcagctgctgaacgccaagctgatcacccagcggaagttcgacaacctgaccaaggccgagcggggcggcctgtccgagctggacaaggccggcttcatcaagcggcagctggtggagacccggcagatcaccaagcacgtggcccagatcctggactcccggatgaacaccaagtacgacgagaacgacaagctgatccgggaggtgaaggtgatcaccctgaagtccaagctggtgtccgacttccggaaggacttccagttctacaaggtgcgggagatcaacaactaccaccacgcccacgacgcctacctgaacgccgtggtgggcaccgccctgatcaagaagtaccccaagctggagtccgagttcgtgtacggcgactacaaggtgtacgacgtgcggaagatgatcgccaagtccgagcaggagatcggcaaggccaccgccaagtacttcttctactccaacatcatgaacttcttcaagaccgagatcaccctggccaacggcgagatccggaagcggcccctgatcgagaccaacggcgagaccggcgagatcgtgtgggacaagggccgggacttcgccaccgtgcggaaggtgctgtccatgccccaggtgaacatcgtgaagaagaccgaggtgcagaccggcggcttctccaaggagtccatcctgcccaagcggaactccgacaagctgatcgcccggaagaaggactgggaccccaagaagtacggcggcttcgactcccccaccgtggcctactccgtgctggtggtggccaaggtggagaagggcaagtccaagaagctgaagtccgtgaaggagctgctgggcatcaccatcatggagcggtcctccttcgagaagaaccccatcgacttcctggaggccaagggctacaaggaggtgaagaaggacctgatcatcaagctgcccaagtactccctgttcgagctggagaacggccggaagcggatgctggcctccgccggcgagctgcagaagggcaacgagctggccctgccctccaagtacgtgaacttcctgtacctggcctcccactacgagaagctgaagggctcccccgaggacaacgagcagaagcagctgttcgtggagcagcacaagcactacctggacgagatcatcgagcagatctccgagttctccaagcgggtgatcctggccgacgccaacctggacaaggtgctgtccgcctacaacaagcaccgggacaagcccatccgggagcaggccgagaacatcatccacctgttcaccctgaccaacctgggcgcccccgccgccttcaagtacttcgacaccaccatcgaccggaagcggtacacctccaccaaggaggtgctggacgccaccctgatccaccagtccatcaccggcctgtacgagacccggatcgacctgtcccagctgggcggcgacggcgcccccgagtccgccaccgagtccggcggcacctccaccgagtccgagggctccgccggccccaagaagaagcggaaggtgacctccaccgagtccgagggctccgccggctccgccggctccacctccggctcctcctccggcatgaagatcgccgtggtggacaaggccctgaacaacacccggtacgacaagcacttccagctgtacggcgaggaggtggacgtgttccacatgtgcaacgagaagctgtccggccggctgctgaagaagcacatcaccatcggcacccccgagaaccccttcgaccccaacgactacgacttcgtgatcctggtgggcgccgagcccttcctgtacttcgccggcaagaagggcatcggcgactacaccggcaagcgggtggagtacaacggctacgccaactggatcgcctccatctcccccgcccagctgcacttcaagcccgagatgaagcccgtgttcgacgccaccgtggagaacatccacgacatcatcaacggccgggagaagatcgccaaggccggcgactaccggcccatcaccgaccccgacgaggccgaggagtacatcaagatggtgtacaacatggtgatcggccccgtggccttcgcctccgccacctccgccctgtactgccgggacggctacctgctgggcgtgtccatctcccaccaggagtaccagggcgtgtacatcgactccgactgcctgaccgaggtggccgtgtactacctgcagaagatcctggactccgagaaccacaccatcgtgttccacaacctgaagttcgacatgcacttctacaagtaccacctgggcctgaccttcgacaaggcccacaaggagcggcggctgcacgacaccatgctgcagcactacgtgctggacgagcggcggggcacccacggcctgaagtccctggccatgaagtacaccgacatgggcgactacgacttcgagctggacaagttcaaggacgactactgcaaggcccacaagatcaagaaggaggacttcacctacgacctgatccccttcgacatcatgtggccctacgccgccaaggacaccgacgccaccatccggctgcacaacttcttcctgcccaagatcgagaagaacgagaagctgtgctccctgtactacgacgtgctgatgcccggctgcgtgttcctgcagcgggtggaggaccggggcgtgcccatctccatcgaccggctgaaggaggcccagtaccagctgacccacaacctgaacaaggcccgggagaagctgtacacctaccccgaggtgaagcagctggagcaggaccagaacgaggccttcaaccccaactccgtgaagcagctgcgggtgctgctgttcgactacgtgggcctgacccccaccggcaagctgaccgacaccggcgccgactccaccgacgccgaggccctgaacgagctggccacccagcaccccatcgccaagaccctgctggagatccggaagctgaccaagctgatctccacctacgtggagaagatcctgctgtccatcgacgccgacggctgcatccggaccggcttccacgagcacatgaccacctccggccggctgtcctcctccggcaagctgaacctgcagcagctgccccgggacgagtccatcatcaagggctgcgtggtggccccccccggctaccgggtgatcgcctgggacctgaccaccgccgaggtgtactacgccgccgtgctgtccggcgaccggaacatgcagcaggtgttcatcaacatgcggaacgagcccgacaagtaccccgacttccactccaacatcgcccacatggtgttcaagctgcagtgcgagccccgggacgtgaagaagctgttccccgccctgcggcaggccgccaaggccatcaccttcggcatcctgtacggctccggccccgccaaggtggcccactccgtgaacgaggccctgctggagcaggccgccaagaccggcgagcccttcgtggagtgcaccgtggccgacgccaaggagtacatcgagacctacttcggccagttcccccagctgaagcggtggatcgacaagtgccacgaccagatcaagaaccacggcttcatctactcccacttcggccggaagcggcggctgcacaacatccactccgaggaccggggcgtgcagggcgaggagatccggtccggcttcaacgccatcatccagtccgcctcctccgactccctgctgctgggcgccgtggacgccgacaacgagatcatctccctgggcctggagcaggagatgaagatcgtgatgctggtgcacgactccgtggtggccatcgtgcgggaggacctgatcgaccagtacaacgagatcctgatccggaacatccagaaggaccggggcatctccatccccggctgccccatcggcatcgactccgactccgaggccggcggctcccgggactactcctgcggcaagatgaagaagcagcacccctccatcgcctgcatcgacgacgacgagtacacccggtacgtgaagggcgtgctgctggacgccgagttcgagtacaagaagctggccgccatggacaaggagcaccccgaccactccaagtacaaggacgacaagttcatcgccgtgtgcaaggacctggacaacgtgaagcggatcctgggcgccggcggcggctccggcaagcggaccgccgacggctccggcggcggctcccccaagaagaagcggaaggtgcctgccgctaagagagtgaagctggactag

SEQ ID NO: 1932 - protein, 2321 aa, synthetic construct
  REGION 1..2321: note = Synthetic
MGKRPAATKKAGQAKKKKDKKYSIGLDIGTNSVGWAVITDEYKVPSKKFKVLGNTDRHSIKKNLIGALLFDSGETAEATRLKRTARRRYTRRKNRICYLQEIFSNEMAKVDDSFFHRLEESFLVEEDKKHERHPIFGNIVDEVAYHEKYPTIYHLRKKLVDSTDKADLRLIYLALAHMIKFRGHFLIEGDLNPDNSDVDKLFIQLVQTYNQLFEENPINASGVDAKAILSARLSKSRRLENLIAQLPGEKKNGLFGNLIALSLGLTPNFKSNFDLAEDAKLQLSKDTYDDDLDNLLAQIGDQYADLFLAAKNLSDAILLSDILRVNTEITKAPLSASMIKRYDEHHQDLTLLKALVRQQLPEKYKEIFFDQSKNGYAGYIDGGASQEEFYKFIKPILEKMDGTEELLVKLNREDLLRKQRTFDNGSIPHQIHLGELHAILRRQEDFYPFLKDNREKIEKILTFRIPYYVGPLARGNSRFAWMTRKSEETITPWNFEEVVDKGASAQSFIERMTNFDKNLPNEKVLPKHSLLYEYFTVYNELTKVKYVTEGMRKPAFLSGEQKKAIVDLLFKTNRKVTVKQLKEDYFKKIECFDSVEISGVEDRFNASLGTYHDLLKIIKDKDFLDNEENEDILEDIVLTLTLFEDREMIEERLKTYAHLFDDKVMKQLKRRRYTGWGRLSRKLINGIRDKQSGKTILDFLKSDGFANRNFMQLIHDDSLTFKEDIQKAQVSGQGDSLHEHIANLAGSPAIKKGILQTVKVVDELVKVMGRHKPENIVIEMARENQTTQKGQKNSRERMKRIEEGIKELGSQILKEHPVENTQLQNEKLYLYYLQNGRDMYVDQELDINRLSDYDVAHIVPQSFLKDDSIDAKVLTRSDKNRGKSDNVPSEEVVKKMKNYWRQLLNAKLITQRKFDNLTKAERGGLSELDKAGFIKRQLVETRQITKHVAQILDSRMNTKYDENDKLIREVKVITLKSKLVSDFRKDFQFYKVREINNYHHAHDAYLNAVVGTALIKKYPKLESEFVYGDYKVYDVRKMIAKSEQEIGKATAKYFFYSNIMNFFKTEITLANGEIRKRPLIETNGETGEIVWDKGRDFATVRKVLSMPQVNIVKKTEVQTGGFSKESILPKRNSDKLIARKKDWDPKKYGGFDSPTVAYSVLVVAKVEKGKSKKLKSVKELLGITIMERSSFEKNPIDFLEAKGYKEVKKDLIIKLPKYSLFELENGRKRMLASAGELQKGNELALPSKYVNFLYLASHYEKLKGSPEDNEQKQLFVEQHKHYLDEIIEQISEFSKRVILADANLDKVLSAYNKHRDKPIREQAENIIHLFTLTNLGAPAAFKYFDTTIDRKRYTSTKEVLDATLIHQSITGLYETRIDLSQLGGDGAPESATESGGTSTESEGSAGPKKKRKVTSTESEGSAGSAGSTSGSSSGMKIAVVDKALNNTRYDKHFQLYGEEVDVFHMCNEKLSGRLLKKHITIGTPENPFDPNDYDFVILVGAEPFLYFAGKKGIGDYTGKRVEYNGYANWIASISPAQLHFKPEMKPVFDATVENIHDIINGREKIAKAGDYRPITDPDEAEEYIKMVYNMVIGPVAFASATSALYCRDGYLLGVSISHQEYQGVYIDSDCLTEVAVYYLQKILDSENHTIVFHNLKFDMHFYKYHLGLTFDKAHKERRLHDTMLQHYVLDERRGTHGLKSLAMKYTDMGDYDFELDKFKDDYCKAHKIKKEDFTYDLIPFDIMWPYAAKDTDATIRLHNFFLPKIEKNEKLCSLYYDVLMPGCVFLQRVEDRGVPISIDRLKEAQYQLTHNLNKAREKLYTYPEVKQLEQDQNEAFNPNSVKQLRVLLFDYVGLTPTGKLTDTGADSTDAEALNELATQHPIAKTLLEIRKLTKLISTYVEKILLSIDADGCIRTGFHEHMTTSGRLSSSGKLNLQQLPRDESIIKGCVVAPPGYRVIAWDLTTAEVYYAAVLSGDRNMQQVFINMRNEPDKYPDFHSNIAHMVFKLQCEPRDVKKLFPALRQAAKAITFGILYGSGPAKVAHSVNEALLEQAAKTGEPFVECTVADAKEYIETYFGQFPQLKRWIDKCHDQIKNHGFIYSHFGRKRRLHNIHSEDRGVQGEEIRSGFNAIIQSASSDSLLLGAVDADNEIISLGLEQEMKIVMLVHDSVVAIVREDLIDQYNEILIRNIQKDRGISIPGCPIGIDSDSEAGGSRDYSCGKMKKQHPSIACIDDDEYTRYVKGVLLDAEFEYKKLAAMDKEHPDHSKYKDDKFIAVCKDLDNVKRILGAGGGSGKRTADGSGGGSPKKKRKVPAAKRVKLD

SEQ ID NO: 1933 - DNA, 7565 bp, synthetic construct
  misc_feature 1..7565: note = Synthetic
  source 1..7565: mol_type = other DNA
aggactcactatttgttttcgcgcccagttgcaaaaagtgtcgaagctcagaataaacgctcaactttggccggatctgccaccatgggcaagcggcccgccgccaccaagaaggccggccaggccaagaagaagaaggacaagaagtactccatcggcctggacatcggcaccaactccgtgggctgggccgtgatcaccgacgagtacaaggtgccctccaagaagttcaaggtgctgggcaacaccgaccggcactccatcaagaagaacctgatcggcgccctgctgttcgactccggcgagaccgccgaggccacccggctgaagcggaccgcccggcggcggtacacccggcggaagaaccggatctgctacctgcaggagatcttctccaacgagatggccaaggtggacgactccttcttccaccggctggaggagtccttcctggtggaggaggacaagaagcacgagcggcaccccatcttcggcaacatcgtggacgaggtggcctaccacgagaagtaccccaccatctaccacctgcggaagaagctggtggactccaccgacaaggccgacctgcggctgatctacctggccctggcccacatgatcaagttccggggccacttcctgatcgagggcgacctgaaccccgacaactccgacgtggacaagctgttcatccagctggtgcagacctacaaccagctgttcgaggagaaccccatcaacgcctccggcgtggacgccaaggccatcctgtccgcccggctgtccaagtcccggcggctggagaacctgatcgcccagctgcccggcgagaagaagaacggcctgttcggcaacctgatcgccctgtccctgggcctgacccccaacttcaagtccaacttcgacctggccgaggacgccaagctgcagctgtccaaggacacctacgacgacgacctggacaacctgctggcccagatcggcgaccagtacgccgacctgttcctggccgccaagaacctgtccgacgccatcctgctgtccgacatcctgcgggtgaacaccgagatcaccaaggcccccctgtccgcctccatgatcaagcggtacgacgagcaccaccaggacctgaccctgctgaaggccctggtgcggcagcagctgcccgagaagtacaaggagatcttcttcgaccagtccaagaacggctacgccggctacatcgacggcggcgcctcccaggaggagttctacaagttcatcaagcccatcctggagaagatggacggcaccgaggagctgctggtgaagctgaaccgggaggacctgctgcggaagcagcggaccttcgacaacggctccatcccccaccagatccacctgggcgagctgcacgccatcctgcggcggcaggaggacttctaccccttcctgaaggacaaccgggagaagatcgagaagatcctgaccttccggatcccctactacgtgggccccctggcccggggcaactcccggttcgcctggatgacccggaagtccgaggagaccatcaccccctggaacttcgaggaggtggtggacaagggcgcctccgcccagtccttcatcgagcggatgaccaacttcgacaagaacctgcccaacgagaaggtgctgcccaagcactccctgctgtacgagtacttcaccgtgtacaacgagctgaccaaggtgaagtacgtgaccgagggcatgcggaagcccgccttcctgtccggcgagcagaagaaggccatcgtggacctgctgttcaagaccaaccggaaggtgaccgtgaagcagctgaaggaggactacttcaagaagatcgagtgcttcgactccgtggagatctccggcgtggaggaccggttcaacgcctccctgggcacctaccacgacctgctgaagatcatcaaggacaaggacttcctggacaacgaggagaacgaggacatcctggaggacatcgtgctgaccctgaccctgttcgaggaccgggagatgatcgaggagcggctgaagacctacgcccacctgttcgacgacaaggtgatgaagcagctgaagcggcggcggtacaccggctggggccggctgtcccggaagctgatcaacggcatccgggacaagcagtccggcaagaccatcctggacttcctgaagtccgacggcttcgccaaccggaacttcatgcagctgatccacgacgactccctgaccttcaaggaggacatccagaaggcccaggtgtccggccagggcgactccctgcacgagcacatcgccaacctggccggctcccccgccatcaagaagggcatcctgcagaccgtgaaggtggtggacgagctggtgaaggtgatgggccggcacaagcccgagaacatcgtgatcgagatggcccgggagaaccagaccacccagaagggccagaagaactcccgggagcggatgaagcggatcgaggagggcatcaaggagctgggctcccagatcctgaaggagcaccccgtggagaacacccagctgcagaacgagaagctgtacctgtactacctgcagaacggccgggacatgtacgtggaccaggagctggacatcaaccggctgtccgactacgacgtggacgccatcgtgccccagtccttcctgaaggacgactccatcgacaacaaggtgctgacccggtccgacaaggcccggggcaagtccgacaacgtgccctccgaggaggtggtgaagaagatgaagaactactggcggcagctgctgaacgccaagctgatcacccagcggaagttcgacaacctgaccaaggccgagcggggcggcctgtccgagctggacaaggccggcttcatcaagcggcagctggtggagacccggcagatcaccaagcacgtggcccagatcctggactcccggatgaacaccaagtacgacgagaacgacaagctgatccgggaggtgaaggtgatcaccctgaagtccaagctggtgtccgacttccggaaggacttccagttctacaaggtgcgggagatcaacaactaccaccacgcccacgacgcctacctgaacgccgtggtgggcaccgccctgatcaagaagtaccccaagctggagtccgagttcgtgtacggcgactacaaggtgtacgacgtgcggaagatgatcgccaagtccgagcaggagatcggcaaggccaccgccaagtacttcttctactccaacatcatgaacttcttcaagaccgagatcaccctggccaacggcgagatccggaagcggcccctgatcgagaccaacggcgagaccggcgagatcgtgtgggacaagggccgggacttcgccaccgtgcggaaggtgctgtccatgccccaggtgaacatcgtgaagaagaccgaggtgcagaccggcggcttctccaaggagtccatcctgcccaagcggaactccgacaagctgatcgcccggaagaaggactgggaccccaagaagtacggcggcttcgactcccccaccgtggcctactccgtgctggtggtggccaaggtggagaagggcaagtccaagaagctgaagtccgtgaaggagctgctgggcatcaccatcatggagcggtcctccttcgagaagaaccccatcgacttcctggaggccaagggctacaaggaggtgaagaaggacctgatcatcaagctgcccaagtactccctgttcgagctggagaacggccggaagcggatgctggcctccgccggcgagctgcagaagggcaacgagctggccctgccctccaagtacgtgaacttcctgtacctggcctcccactacgagaagctgaagggctcccccgaggacaacgagcagaagcagctgttcgtggagcagcacaagcactacctggacgagatcatcgagcagatctccgagttctccaagcgggtgatcctggccgacgccaacctggacaaggtgctgtccgcctacaacaagcaccgggacaagcccatccgggagcaggccgagaacatcatccacctgttcaccctgaccaacctgggcgcccccgccgccttcaagtacttcgacaccaccatcgaccggaagcggtacacctccaccaaggaggtgctggacgccaccctgatccaccagtccatcaccggcctgtacgagacccggatcgacctgtcccagctgggcggcgacggcgcccccgagtccgccaccgagtccggcggcacctccaccgagtccgagggctccgccggccccaagaagaagcggaaggtgacctccaccgagtccgagggctccgccggctccgccggctccacctccggctcctcctccggcatgaagatcgccgtggtggacaaggccctgaacaacacccggtacgacaagcacttccagctgtacggcgaggaggtggacgtgttccacatgtgcaacgagaagctgtccggccggctgctgaagaagcacatcaccatcggcacccccgagaaccccttcgaccccaacgactacgacttcgtgatcctggtgggcgccgagcccttcctgtacttcgccggcaagaagggcatcggcgactacaccggcaagcgggtggagtacaacggctacgccaactggatcgcctccatctcccccgcccagctgcacttcaagcccgagatgaagcccgtgttcgacgccaccgtggagaacatccacgacatcatcaacggccgggagaagatcgccaaggccggcgactaccggcccatcaccgaccccgacgaggccgaggagtacatcaagatggtgtacaacatggtgatcggccccgtggccttcgcctccgccacctccgccctgtactgccgggacggctacctgctgggcgtgtccatctcccaccaggagtaccagggcgtgtacatcgactccgactgcctgaccgaggtggccgtgtactacctgcagaagatcctggactccgagaaccacaccatcgtgttccacaacctgaagttcgacatgcacttctacaagtaccacctgggcctgaccttcgacaaggcccacaaggagcggcggctgcacgacaccatgctgcagcactacgtgctggacgagcggcggggcacccacggcctgaagtccctggccatgaagtacaccgacatgggcgactacgacttcgagctggacaagttcaaggacgactactgcaaggcccacaagatcaagaaggaggacttcacctacgacctgatccccttcgacatcatgtggccctacgccgccaaggacaccgacgccaccatccggctgcacaacttcttcctgcccaagatcgagaagaacgagaagctgtgctccctgtactacgacgtgctgatgcccggctgcgtgttcctgcagcgggtggaggaccggggcgtgcccatctccatcgaccggctgaaggaggcccagtaccagctgacccacaacctgaacaaggcccgggagaagctgtacacctaccccgaggtgaagcagctggagcaggaccagaacgaggccttcaaccccaactccgtgaagcagctgcgggtgctgctgttcgactacgtgggcctgacccccaccggcaagctgaccgacaccggcgccgactccaccgacgccgaggccctgaacgagctggccacccagcaccccatcgccaagaccctgctggagatccggaagctgaccaagctgatctccacctacgtggagaagatcctgctgtccatcgacgccgacggctgcatccggaccggcttccacgagcacatgaccacctccggccggctgtcctcctccggcaagctgaacctgcagcagctgccccgggacgagtccatcatcaagggctgcgtggtggccccccccggctaccgggtgatcgcctgggacctgaccaccgccgaggtgtactacgccgccgtgctgtccggcgaccggaacatgcagcaggtgttcatcaacatgcggaacgagcccgacaagtaccccgacttccactccaacatcgcccacatggtgttcaagctgcagtgcgagccccgggacgtgaagaagctgttccccgccctgcggcaggccgccaaggccatcaccttcggcatcctgtacggctccggccccgccaaggtggcccactccgtgaacgaggccctgctggagcaggccgccaagaccggcgagcccttcgtggagtgcaccgtggccgacgccaaggagtacatcgagacctacttcggccagttcccccagctgaagcggtggatcgacaagtgccacgaccagatcaagaaccacggcttcatctactcccacttcggccggaagcggcggctgcacaacatccactccgaggaccggggcgtgcagggcgaggagatccggtccggcttcaacgccatcatccagtccgcctcctccgactccctgctgctgggcgccgtggacgccgacaacgagatcatctccctgggcctggagcaggagatgaagatcgtgatgctggtgcacgactccgtggtggccatcgtgcgggaggacctgatcgaccagtacaacgagatcctgatccggaacatccagaaggaccggggcatctccatccccggctgccccatcggcatcgactccgactccgaggccggcggctcccgggactactcctgcggcaagatgaagaagcagcacccctccatcgcctgcatcgacgacgacgagtacacccggtacgtgaagggcgtgctgctggacgccgagttcgagtacaagaagctggccgccatggacaaggagcaccccgaccactccaagtacaaggacgacaagttcatcgccgtgtgcaaggacctggacaacgtgaagcggatcctgggcgccggcggcggctccggcaagcggaccgccgacggctccggcggcggctcccccaagaagaagcggaaggtgcctgccgctaagagagtgaagctggactagctagcaccagcctcaagaacacccgaatggagtctctaagctacataataccaacttacactttacaaaatgttgtcccccaaaatgtagccattcgtatctgctcctaataaaaagaaagtttcttcacattctctcgagaaaaaaaaaaaatggaaaaaaaaaaaacggaaaaaaaaaaaaggtaaaaaaaaaaaatataaaaaaaaaaaacataaaaaaaaaaaacgaaaaaaaaaaaacgtaaaaaaaaaaaactcaaaaaaaaaaaagataaaaaaaaaaaacctaaaaaaaaaaaatgtaaaaaaaaaaaagggaaaaaaaaaaaacgcaaaaaaaaaaaacacaaaaaaaaaaaatgcaaaaaaaaaaaatcgaaaaaaaaaaaatctaaaaaaaaaaaacgaaaaaaaaaaaacccaaaaaaaaaaaagacaaaaaaaaaaaatagaaaaaaaaaaagttaaaaaaaaaaaactgaaaaaaaaaaaatttaaaaaaaaaaaatctag

SEQ ID NO: 1934 - DNA, 6966 bp, synthetic construct
  misc_feature 1..6966: note = Synthetic
  source 1..6966: mol_type = other DNA
atgggcaagcggcccgccgccaccaagaaggccggccaggccaagaagaagaaggacaagaagtactccatcggcctggacatcggcaccaactccgtgggctgggccgtgatcaccgacgagtacaaggtgccctccaagaagttcaaggtgctgggcaacaccgaccggcactccatcaagaagaacctgatcggcgccctgctgttcgactccggcgagaccgccgaggccacccggctgaagcggaccgcccggcggcggtacacccggcggaagaaccggatctgctacctgcaggagatcttctccaacgagatggccaaggtggacgactccttcttccaccggctggaggagtccttcctggtggaggaggacaagaagcacgagcggcaccccatcttcggcaacatcgtggacgaggtggcctaccacgagaagtaccccaccatctaccacctgcggaagaagctggtggactccaccgacaaggccgacctgcggctgatctacctggccctggcccacatgatcaagttccggggccacttcctgatcgagggcgacctgaaccccgacaactccgacgtggacaagctgttcatccagctggtgcagacctacaaccagctgttcgaggagaaccccatcaacgcctccggcgtggacgccaaggccatcctgtccgcccggctgtccaagtcccggcggctggagaacctgatcgcccagctgcccggcgagaagaagaacggcctgttcggcaacctgatcgccctgtccctgggcctgacccccaacttcaagtccaacttcgacctggccgaggacgccaagctgcagctgtccaaggacacctacgacgacgacctggacaacctgctggcccagatcggcgaccagtacgccgacctgttcctggccgccaagaacctgtccgacgccatcctgctgtccgacatcctgcgggtgaacaccgagatcaccaaggcccccctgtccgcctccatgatcaagcggtacgacgagcaccaccaggacctgaccctgctgaaggccctggtgcggcagcagctgcccgagaagtacaaggagatcttcttcgaccagtccaagaacggctacgccggctacatcgacggcggcgcctcccaggaggagttctacaagttcatcaagcccatcctggagaagatggacggcaccgaggagctgctggtgaagctgaaccgggaggacctgctgcggaagcagcggaccttcgacaacggctccatcccccaccagatccacctgggcgagctgcacgccatcctgcggcggcaggaggacttctaccccttcctgaaggacaaccgggagaagatcgagaagatcctgaccttccggatcccctactacgtgggccccctggcccggggcaactcccggttcgcctggatgacccggaagtccgaggagaccatcaccccctggaacttcgaggaggtggtggacaagggcgcctccgcccagtccttcatcgagcggatgaccaacttcgacaagaacctgcccaacgagaaggtgctgcccaagcactccctgctgtacgagtacttcaccgtgtacaacgagctgaccaaggtgaagtacgtgaccgagggcatgcggaagcccgccttcctgtccggcgagcagaagaaggccatcgtggacctgctgttcaagaccaaccggaaggtgaccgtgaagcagctgaaggaggactacttcaagaagatcgagtgcttcgactccgtggagatctccggcgtggaggaccggttcaacgcctccctgggcacctaccacgacctgctgaagatcatcaaggacaaggacttcctggacaacgaggagaacgaggacatcctggaggacatcgtgctgaccctgaccctgttcgaggaccgggagatgatcgaggagcggctgaagacctacgcccacctgttcgacgacaaggtgatgaagcagctgaagcggcggcggtacaccggctggggccggctgtcccggaagctgatcaacggcatccgggacaagcagtccggcaagaccatcctggacttcctgaagtccgacggcttcgccaaccggaacttcatgcagctgatccacgacgactccctgaccttcaaggaggacatccagaaggcccaggtgtccggccagggcgactccctgcacgagcacatcgccaacctggccggctcccccgccatcaagaagggcatcctgcagaccgtgaaggtggtggacgagctggtgaaggtgatgggccggcacaagcccgagaacatcgtgatcgagatggcccgggagaaccagaccacccagaagggccagaagaactcccgggagcggatgaagcggatcgaggagggcatcaaggagctgggctcccagatcctgaaggagcaccccgtggagaacacccagctgcagaacgagaagctgtacctgtactacctgcagaacggccgggacatgtacgtggaccaggagctggacatcaaccggctgtccgactacgacgtggacgccatcgtgccccagtccttcctgaaggacgactccatcgacaacaaggtgctgacccggtccgacaaggcccggggcaagtccgacaacgtgccctccgaggaggtggtgaagaagatgaagaactactggcggcagctgctgaacgccaagctgatcacccagcggaagttcgacaacctgaccaaggccgagcggggcggcctgtccgagctggacaaggccggcttcatcaagcggcagctggtggagacccggcagatcaccaagcacgtggcccagatcctggactcccggatgaacaccaagtacgacgagaacgacaagctgatccgggaggtgaaggtgatcaccctgaagtccaagctggtgtccgacttccggaaggacttccagttctacaaggtgcgggagatcaacaactaccaccacgcccacgacgcctacctgaacgccgtggtgggcaccgccctgatcaagaagtaccccaagctggagtccgagttcgtgtacggcgactacaaggtgtacgacgtgcggaagatgatcgccaagtccgagcaggagatcggcaaggccaccgccaagtacttcttctactccaacatcatgaacttcttcaagaccgagatcaccctggccaacggcgagatccggaagcggcccctgatcgagaccaacggcgagaccggcgagatcgtgtgggacaagggccgggacttcgccaccgtgcggaaggtgctgtccatgccccaggtgaacatcgtgaagaagaccgaggtgcagaccggcggcttctccaaggagtccatcctgcccaagcggaactccgacaagctgatcgcccggaagaaggactgggaccccaagaagtacggcggcttcgactcccccaccgtggcctactccgtgctggtggtggccaaggtggagaagggcaagtccaagaagctgaagtccgtgaaggagctgctgggcatcaccatcatggagcggtcctccttcgagaagaaccccatcgacttcctggaggccaagggctacaaggaggtgaagaaggacctgatcatcaagctgcccaagtactccctgttcgagctggagaacggccggaagcggatgctggcctccgccggcgagctgcagaagggcaacgagctggccctgccctccaagtacgtgaacttcctgtacctggcctcccactacgagaagctgaagggctcccccgaggacaacgagcagaagcagctgttcgtggagcagcacaagcactacctggacgagatcatcgagcagatctccgagttctccaagcgggtgatcctggccgacgccaacctggacaaggtgctgtccgcctacaacaagcaccgggacaagcccatccgggagcaggccgagaacatcatccacctgttcaccctgaccaacctgggcgcccccgccgccttcaagtacttcgacaccaccatcgaccggaagcggtacacctccaccaaggaggtgctggacgccaccctgatccaccagtccatcaccggcctgtacgagacccggatcgacctgtcccagctgggcggcgacggcgcccccgagtccgccaccgagtccggcggcacctccaccgagtccgagggctccgccggccccaagaagaagcggaaggtgacctccaccgagtccgagggctccgccggctccgccggctccacctccggctcctcctccggcatgaagatcgccgtggtggacaaggccctgaacaacacccggtacgacaagcacttccagctgtacggcgaggaggtggacgtgttccacatgtgcaacgagaagctgtccggccggctgctgaagaagcacatcaccatcggcacccccgagaaccccttcgaccccaacgactacgacttcgtgatcctggtgggcgccgagcccttcctgtacttcgccggcaagaagggcatcggcgactacaccggcaagcgggtggagtacaacggctacgccaactggatcgcctccatctcccccgcccagctgcacttcaagcccgagatgaagcccgtgttcgacgccaccgtggagaacatccacgacatcatcaacggccgggagaagatcgccaaggccggcgactaccggcccatcaccgaccccgacgaggccgaggagtacatcaagatggtgtacaacatggtgatcggccccgtggccttcgcctccgccacctccgccctgtactgccgggacggctacctgctgggcgtgtccatctcccaccaggagtaccagggcgtgtacatcgactccgactgcctgaccgaggtggccgtgtactacctgcagaagatcctggactccgagaaccacaccatcgtgttccacaacctgaagttcgacatgcacttctacaagtaccacctgggcctgaccttcgacaaggcccacaaggagcggcggctgcacgacaccatgctgcagcactacgtgctggacgagcggcggggcacccacggcctgaagtccctggccatgaagtacaccgacatgggcgactacgacttcgagctggacaagttcaaggacgactactgcaaggcccacaagatcaagaaggaggacttcacctacgacctgatccccttcgacatcatgtggccctacgccgccaaggacaccgacgccaccatccggctgcacaacttcttcctgcccaagatcgagaagaacgagaagctgtgctccctgtactacgacgtgctgatgcccggctgcgtgttcctgcagcgggtggaggaccggggcgtgcccatctccatcgaccggctgaaggaggcccagtaccagctgacccacaacctgaacaaggcccgggagaagctgtacacctaccccgaggtgaagcagctggagcaggaccagaacgaggccttcaaccccaactccgtgaagcagctgcgggtgctgctgttcgactacgtgggcctgacccccaccggcaagctgaccgacaccggcgccgactccaccgacgccgaggccctgaacgagctggccacccagcaccccatcgccaagaccctgctggagatccggaagctgaccaagctgatctccacctacgtggagaagatcctgctgtccatcgacgccgacggctgcatccggaccggcttccacgagcacatgaccacctccggccggctgtcctcctccggcaagctgaacctgcagcagctgccccgggacgagtccatcatcaagggctgcgtggtggccccccccggctaccgggtgatcgcctgggacctgaccaccgccgaggtgtactacgccgccgtgctgtccggcgaccggaacatgcagcaggtgttcatcaacatgcggaacgagcccgacaagtaccccgacttccactccaacatcgcccacatggtgttcaagctgcagtgcgagccccgggacgtgaagaagctgttccccgccctgcggcaggccgccaaggccatcaccttcggcatcctgtacggctccggccccgccaaggtggcccactccgtgaacgaggccctgctggagcaggccgccaagaccggcgagcccttcgtggagtgcaccgtggccgacgccaaggagtacatcgagacctacttcggccagttcccccagctgaagcggtggatcgacaagtgccacgaccagatcaagaaccacggcttcatctactcccacttcggccggaagcggcggctgcacaacatccactccgaggaccggggcgtgcagggcgaggagatccggtccggcttcaacgccatcatccagtccgcctcctccgactccctgctgctgggcgccgtggacgccgacaacgagatcatctccctgggcctggagcaggagatgaagatcgtgatgctggtgcacgactccgtggtggccatcgtgcgggaggacctgatcgaccagtacaacgagatcctgatccggaacatccagaaggaccggggcatctccatccccggctgccccatcggcatcgactccgactccgaggccggcggctcccgggactactcctgcggcaagatgaagaagcagcacccctccatcgcctgcatcgacgacgacgagtacacccggtacgtgaagggcgtgctgctggacgccgagttcgagtacaagaagctggccgccatggacaaggagcaccccgaccactccaagtacaaggacgacaagttcatcgccgtgtgcaaggacctggacaacgtgaagcggatcctgggcgccggcggcggctccggcaagcggaccgccgacggctccggcggcggctcccccaagaagaagcggaaggtgcctgccgctaagagagtgaagctggactag

SEQ ID NO: 1935 - protein, 2321 aa, synthetic construct
  REGION 1..2321: note = Synthetic
MGKRPAATKKAGQAKKKKDKKYSIGLDIGTNSVGWAVITDEYKVPSKKFKVLGNTDRHSIKKNLIGALLFDSGETAEATRLKRTARRRYTRRKNRICYLQEIFSNEMAKVDDSFFHRLEESFLVEEDKKHERHPIFGNIVDEVAYHEKYPTIYHLRKKLVDSTDKADLRLIYLALAHMIKFRGHFLIEGDLNPDNSDVDKLFIQLVQTYNQLFEENPINASGVDAKAILSARLSKSRRLENLIAQLPGEKKNGLFGNLIALSLGLTPNFKSNFDLAEDAKLQLSKDTYDDDLDNLLAQIGDQYADLFLAAKNLSDAILLSDILRVNTEITKAPLSASMIKRYDEHHQDLTLLKALVRQQLPEKYKEIFFDQSKNGYAGYIDGGASQEEFYKFIKPILEKMDGTEELLVKLNREDLLRKQRTFDNGSIPHQIHLGELHAILRRQEDFYPFLKDNREKIEKILTFRIPYYVGPLARGNSRFAWMTRKSEETITPWNFEEVVDKGASAQSFIERMTNFDKNLPNEKVLPKHSLLYEYFTVYNELTKVKYVTEGMRKPAFLSGEQKKAIVDLLFKTNRKVTVKQLKEDYFKKIECFDSVEISGVEDRFNASLGTYHDLLKIIKDKDFLDNEENEDILEDIVLTLTLFEDREMIEERLKTYAHLFDDKVMKQLKRRRYTGWGRLSRKLINGIRDKQSGKTILDFLKSDGFANRNFMQLIHDDSLTFKEDIQKAQVSGQGDSLHEHIANLAGSPAIKKGILQTVKVVDELVKVMGRHKPENIVIEMARENQTTQKGQKNSRERMKRIEEGIKELGSQILKEHPVENTQLQNEKLYLYYLQNGRDMYVDQELDINRLSDYDVDAIVPQSFLKDDSIDNKVLTRSDKARGKSDNVPSEEVVKKMKNYWRQLLNAKLITQRKFDNLTKAERGGLSELDKAGFIKRQLVETRQITKHVAQILDSRMNTKYDENDKLIREVKVITLKSKLVSDFRKDFQFYKVREINNYHHAHDAYLNAVVGTALIKKYPKLESEFVYGDYKVYDVRKMIAKSEQEIGKATAKYFFYSNIMNFFKTEITLANGEIRKRPLIETNGETGEIVWDKGRDFATVRKVLSMPQVNIVKKTEVQTGGFSKESILPKRNSDKLIARKKDWDPKKYGGFDSPTVAYSVLVVAKVEKGKSKKLKSVKELLGITIMERSSFEKNPIDFLEAKGYKEVKKDLIIKLPKYSLFELENGRKRMLASAGELQKGNELALPSKYVNFLYLASHYEKLKGSPEDNEQKQLFVEQHKHYLDEIIEQISEFSKRVILADANLDKVLSAYNKHRDKPIREQAENIIHLFTLTNLGAPAAFKYFDTTIDRKRYTSTKEVLDATLIHQSITGLYETRIDLSQLGGDGAPESATESGGTSTESEGSAGPKKKRKVTSTESEGSAGSAGSTSGSSSGMKIAVVDKALNNTRYDKHFQLYGEEVDVFHMCNEKLSGRLLKKHITIGTPENPFDPNDYDFVILVGAEPFLYFAGKKGIGDYTGKRVEYNGYANWIASISPAQLHFKPEMKPVFDATVENIHDIINGREKIAKAGDYRPITDPDEAEEYIKMVYNMVIGPVAFASATSALYCRDGYLLGVSISHQEYQGVYIDSDCLTEVAVYYLQKILDSENHTIVFHNLKFDMHFYKYHLGLTFDKAHKERRLHDTMLQHYVLDERRGTHGLKSLAMKYTDMGDYDFELDKFKDDYCKAHKIKKEDFTYDLIPFDIMWPYAAKDTDATIRLHNFFLPKIEKNEKLCSLYYDVLMPGCVFLQRVEDRGVPISIDRLKEAQYQLTHNLNKAREKLYTYPEVKQLEQDQNEAFNPNSVKQLRVLLFDYVGLTPTGKLTDTGADSTDAEALNELATQHPIAKTLLEIRKLTKLISTYVEKILLSIDADGCIRTGFHEHMTTSGRLSSSGKLNLQQLPRDESIIKGCVVAPPGYRVIAWDLTTAEVYYAAVLSGDRNMQQVFINMRNEPDKYPDFHSNIAHMVFKLQCEPRDVKKLFPALRQAAKAITFGILYGSGPAKVAHSVNEALLEQAAKTGEPFVECTVADAKEYIETYFGQFPQLKRWIDKCHDQIKNHGFIYSHFGRKRRLHNIHSEDRGVQGEEIRSGFNAIIQSASSDSLLLGAVDADNEIISLGLEQEMKIVMLVHDSVVAIVREDLIDQYNEILIRNIQKDRGISIPGCPIGIDSDSEAGGSRDYSCGKMKKQHPSIACIDDDEYTRYVKGVLLDAEFEYKKLAAMDKEHPDHSKYKDDKFIAVCKDLDNVKRILGAGGGSGKRTADGSGGGSPKKKRKVPAAKRVKLD

SEQ ID NO: 1936 - DNA, 7565 bp, synthetic construct
  misc_feature 1..7565: note = Synthetic
  source 1..7565: mol_type = other DNA
aggactcactatttgttttcgcgcccagttgcaaaaagtgtcgaagctcagaataaacgctcaactttggccggatctgccaccatgggcaagcggcccgccgccaccaagaaggccggccaggccaagaagaagaaggacaagaagtactccatcggcctggacatcggcaccaactccgtgggctgggccgtgatcaccgacgagtacaaggtgccctccaagaagttcaaggtgctgggcaacaccgaccggcactccatcaagaagaacctgatcggcgccctgctgttcgactccggcgagaccgccgaggccacccggctgaagcggaccgcccggcggcggtacacccggcggaagaaccggatctgctacctgcaggagatcttctccaacgagatggccaaggtggacgactccttcttccaccggctggaggagtccttcctggtggaggaggacaagaagcacgagcggcaccccatcttcggcaacatcgtggacgaggtggcctaccacgagaagtaccccaccatctaccacctgcggaagaagctggtggactccaccgacaaggccgacctgcggctgatctacctggccctggcccacatgatcaagttccggggccacttcctgatcgagggcgacctgaaccccgacaactccgacgtggacaagctgttcatccagctggtgcagacctacaaccagctgttcgaggagaaccccatcaacgcctccggcgtggacgccaaggccatcctgtccgcccggctgtccaagtcccggcggctggagaacctgatcgcccagctgcccggcgagaagaagaacggcctgttcggcaacctgatcgccctgtccctgggcctgacccccaacttcaagtccaacttcgacctggccgaggacgccaagctgcagctgtccaaggacacctacgacgacgacctggacaacctgctggcccagatcggcgaccagtacgccgacctgttcctggccgccaagaacctgtccgacgccatcctgctgtccgacatcctgcgggtgaacaccgagatcaccaaggcccccctgtccgcctccatgatcaagcggtacgacgagcaccaccaggacctgaccctgctgaaggccctggtgcggcagcagctgcccgagaagtacaaggagatcttcttcgaccagtccaagaacggctacgccggctacatcgacggcggcgcctcccaggaggagttctacaagttcatcaagcccatcctggagaagatggacggcaccgaggagctgctggtgaagctgaaccgggaggacctgctgcggaagcagcggaccttcgacaacggctccatcccccaccagatccacctgggcgagctgcacgccatcctgcggcggcaggaggacttctaccccttcctgaaggacaaccgggagaagatcgagaagatcctgaccttccggatcccctactacgtgggccccctggcccggggcaactcccggttcgcctggatgacccggaagtccgaggagaccatcaccccctggaacttcgaggaggtggtggacaagggcgcctccgcccagtccttcatcgagcggatgaccaacttcgacaagaacctgcccaacgagaaggtgctgcccaagcactccctgctgtacgagtacttcaccgtgtacaacgagctgaccaaggtgaagtacgtgaccgagggcatgcggaagcccgccttcctgtccggcgagcagaagaaggccatcgtggacctgctgttcaagaccaaccggaaggtgaccgtgaagcagctgaaggaggactacttcaagaagatcgagtgcttcgactccgtggagatctccggcgtggaggaccggttcaacgcctccctgggcacctaccacgacctgctgaagatcatcaaggacaaggacttcctggacaacgaggagaacgaggacatcctggaggacatcgtgctgaccctgaccctgttcgaggaccgggagatgatcgaggagcggctgaagacctacgcccacctgttcgacgacaaggtgatgaagcagctgaagcggcggcggtacaccggctggggccggctgtcccggaagctgatcaacggcatccgggacaagcagtccggcaagaccatcctggacttcctgaagtccgacggcttcgccaaccggaacttcatgcagctgatccacgacgactccctgaccttcaaggaggacatccagaaggcccaggtgtccggccagggcgactccctgcacgagcacatcgccaacctggccggctcccccgccatcaagaagggcatcctgcagaccgtgaaggtggtggacgagctggtgaaggtgatgggccggcacaagcccgagaacatcgtgatcgagatggcccgggagaaccagaccacccagaagggccagaagaactcccgggagcggatgaagcggatcgaggagggcatcaaggagctgggctcccagatcctgaaggagcaccccgtggagaacacccagctgcagaacgagaagctgtacctgtactacctgcagaacggccgggacatgtacgtggaccaggagctggacatcaaccggctgtccgactacgacgtggacgccatcgtgccccagtccttcctgaaggacgactccatcgacgccaaggtgctgacccggtccgacaagaaccggggcaagtccgacaacgtgccctccgaggaggtggtgaagaagatgaagaactactggcggcagctgctgaacgccaagctgatcacccagcggaagttcgacaacctgaccaaggccgagcggggcggcctgtccgagctggacaaggccggcttcatcaagcggcagctggtggagacccggcagatcaccaagcacgtggcccagatcctggactcccggatgaacaccaagtacgacgagaacgacaagctgatccgggaggtgaaggtgatcaccctgaagtccaagctggtgtccgacttccggaaggacttccagttctacaaggtgcgggagatcaacaactaccaccacgcccacgacgcctacctgaacgccgtggtgggcaccgccctgatcaagaagtaccccaagctggagtccgagttcgtgtacggcgactacaaggtgtacgacgtgcggaagatgatcgccaagtccgagcaggagatcggcaaggccaccgccaagtacttcttctactccaacatcatgaacttcttcaagaccgagatcaccctggccaacggcgagatccggaagcggcccctgatcgagaccaacggcgagaccggcgagatcgtgtgggacaagggccgggacttcgccaccgtgcggaaggtgctgtccatgccccaggtgaacatcgtgaagaagaccgaggtgcagaccggcggcttctccaaggagtccatcctgcccaagcggaactccgacaagctgatcgcccggaagaaggactgggaccccaagaagtacggcggcttcgactcccccaccgtggcctactccgtgctggtggtggccaaggtggagaagggcaagtccaagaagctgaagtccgtgaaggagctgctgggcatcaccatcatggagcggtcctccttcgagaagaaccccatcgacttcctggaggccaagggctacaaggaggtgaagaaggacctgatcatcaagctgcccaagtactccctgttcgagctggagaacggccggaagcggatgctggcctccgccggcgagctgcagaagggcaacgagctggccctgccctccaagtacgtgaacttcctgtacctggcctcccactacgagaagctgaagggctcccccgaggacaacgagcagaagcagctgttcgtggagcagcacaagcactacctggacgagatcatcgagcagatctccgagttctccaagcgggtgatcctggccgacgccaacctggacaaggtgctgtccgcctacaacaagcaccgggacaagcccatccgggagcaggccgagaacatcatccacctgttcaccctgaccaacctgggcgcccccgccgccttcaagtacttcgacaccaccatcgaccggaagcggtacacctccaccaaggaggtgctggacgccaccctgatccaccagtccatcaccggcctgtacgagacccggatcgacctgtcccagctgggcggcgacggcgcccccgagtccgccaccgagtccggcggcacctccaccgagtccgagggctccgccggccccaagaagaagcggaaggtgacctccaccgagtccgagggctccgccggctccgccggctccacctccggctcctcctccggcatgaagatcgccgtggtggacaaggccctgaacaacacccggtacgacaagcacttccagctgtacggcgaggaggtggacgtgttccacatgtgcaacgagaagctgtccggccggctgctgaagaagcacatcaccatcggcacccccgagaaccccttcgaccccaacgactacgacttcgtgatcctggtgggcgccgagcccttcctgtacttcgccggcaagaagggcatcggcgactacaccggcaagcgggtggagtacaacggctacgccaactggatcgcctccatctcccccgcccagctgcacttcaagcccgagatgaagcccgtgttcgacgccaccgtggagaacatccacgacatcatcaacggccgggagaagatcgccaaggccggcgactaccggcccatcaccgaccccgacgaggccgaggagtacatcaagatggtgtacaacatggtgatcggccccgtggccttcgcctccgccacctccgccctgtactgccgggacggctacctgctgggcgtgtccatctcccaccaggagtaccagggcgtgtacatcgactccgactgcctgaccgaggtggccgtgtactacctgcagaagatcctggactccgagaaccacaccatcgtgttccacaacctgaagttcgacatgcacttctacaagtaccacctgggcctgaccttcgacaaggcccacaaggagcggcggctgcacgacaccatgctgcagcactacgtgctggacgagcggcggggcacccacggcctgaagtccctggccatgaagtacaccgacatgggcgactacgacttcgagctggacaagttcaaggacgactactgcaaggcccacaagatcaagaaggaggacttcacctacgacctgatccccttcgacatcatgtggccctacgccgccaaggacaccgacgccaccatccggctgcacaacttcttcctgcccaagatcgagaagaacgagaagctgtgctccctgtactacgacgtgctgatgcccggctgcgtgttcctgcagcgggtggaggaccggggcgtgcccatctccatcgaccggctgaaggaggcccagtaccagctgacccacaacctgaacaaggcccgggagaagctgtacacctaccccgaggtgaagcagctggagcaggaccagaacgaggccttcaaccccaactccgtgaagcagctgcgggtgctgctgttcgactacgtgggcctgacccccaccggcaagctgaccgacaccggcgccgactccaccgacgccgaggccctgaacgagctggccacccagcaccccatcgccaagaccctgctggagatccggaagctgaccaagctgatctccacctacgtggagaagatcctgctgtccatcgacgccgacggctgcatccggaccggcttccacgagcacatgaccacctccggccggctgtcctcctccggcaagctgaacctgcagcagctgccccgggacgagtccatcatcaagggctgcgtggtggccccccccggctaccgggtgatcgcctgggacctgaccaccgccgaggtgtactacgccgccgtgctgtccggcgaccggaacatgcagcaggtgttcatcaacatgcggaacgagcccgacaagtaccccgacttccactccaacatcgcccacatggtgttcaagctgcagtgcgagccccgggacgtgaagaagctgttccccgccctgcggcaggccgccaaggccatcaccttcggcatcctgtacggctccggccccgccaaggtggcccactccgtgaacgaggccctgctggagcaggccgccaagaccggcgagcccttcgtggagtgcaccgtggccgacgccaaggagtacatcgagacctacttcggccagttcccccagctgaagcggtggatcgacaagtgccacgaccagatcaagaaccacggcttcatctactcccacttcggccggaagcggcggctgcacaacatccactccgaggaccggggcgtgcagggcgaggagatccggtccggcttcaacgccatcatccagtccgcctcctccgactccctgctgctgggcgccgtggacgccgacaacgagatcatctccctgggcctggagcaggagatgaagatcgtgatgctggtgcacgactccgtggtggccatcgtgcgggaggacctgatcgaccagtacaacgagatcctgatccggaacatccagaaggaccggggcatctccatccccggctgccccatcggcatcgactccgactccgaggccggcggctcccgggactactcctgcggcaagatgaagaagcagcacccctccatcgcctgcatcgacgacgacgagtacacccggtacgtgaagggcgtgctgctggacgccgagttcgagtacaagaagctggccgccatggacaaggagcaccccgaccactccaagtacaaggacgacaagttcatcgccgtgtgcaaggacctggacaacgtgaagcggatcctgggcgccggcggcggctccggcaagcggaccgccgacggctccggcggcggctcccccaagaagaagcggaaggtgcctgccgctaagagagtgaagctggactagctagcaccagcctcaagaacacccgaatggagtctctaagctacataataccaacttacactttacaaaatgttgtcccccaaaatgtagccattcgtatctgctcctaataaaaagaaagtttcttcacattctctcgagaaaaaaaaaaaatggaaaaaaaaaaaacggaaaaaaaaaaaaggtaaaaaaaaaaaatataaaaaaaaaaaacataaaaaaaaaaaacgaaaaaaaaaaaacgtaaaaaaaaaaaactcaaaaaaaaaaaagataaaaaaaaaaaacctaaaaaaaaaaaatgtaaaaaaaaaaaagggaaaaaaaaaaaacgcaaaaaaaaaaaacacaaaaaaaaaaaatgcaaaaaaaaaaaatcgaaaaaaaaaaaatctaaaaaaaaaaaacgaaaaaaaaaaaacccaaaaaaaaaaaagacaaaaaaaaaaaatagaaaaaaaaaaagttaaaaaaaaaaaactgaaaaaaaaaaaatttaaaaaaaaaaaatctag

SEQ ID NO: 1937 - DNA, 6966 bp, synthetic construct
  misc_feature 1..6966: note = Synthetic
  source 1..6966: mol_type = other DNA
atgggcaagcggcccgccgccaccaagaaggccggccaggccaagaagaagaaggacaagaagtactccatcggcctggacatcggcaccaactccgtgggctgggccgtgatcaccgacgagtacaaggtgccctccaagaagttcaaggtgctgggcaacaccgaccggcactccatcaagaagaacctgatcggcgccctgctgttcgactccggcgagaccgccgaggccacccggctgaagcggaccgcccggcggcggtacacccggcggaagaaccggatctgctacctgcaggagatcttctccaacgagatggccaaggtggacgactccttcttccaccggctggaggagtccttcctggtggaggaggacaagaagcacgagcggcaccccatcttcggcaacatcgtggacgaggtggcctaccacgagaagtaccccaccatctaccacctgcggaagaagctggtggactccaccgacaaggccgacctgcggctgatctacctggccctggcccacatgatcaagttccggggccacttcctgatcgagggcgacctgaaccccgacaactccgacgtggacaagctgttcatccagctggtgcagacctacaaccagctgttcgaggagaaccccatcaacgcctccggcgtggacgccaaggccatcctgtccgcccggctgtccaagtcccggcggctggagaacctgatcgcccagctgcccggcgagaagaagaacggcctgttcggcaacctgatcgccctgtccctgggcctgacccccaacttcaagtccaacttcgacctggccgaggacgccaagctgcagctgtccaaggacacctacgacgacgacctggacaacctgctggcccagatcggcgaccagtacgccgacctgttcctggccgccaagaacctgtccgacgccatcctgctgtccgacatcctgcgggtgaacaccgagatcaccaaggcccccctgtccgcctccatgatcaagcggtacgacgagcaccaccaggacctgaccctgctgaaggccctggtgcggcagcagctgcccgagaagtacaaggagatcttcttcgaccagtccaagaacggctacgccggctacatcgacggcggcgcctcccaggaggagttctacaagttcatcaagcccatcctggagaagatggacggcaccgaggagctgctggtgaagctgaaccgggaggacctgctgcggaagcagcggaccttcgacaacggctccatcccccaccagatccacctgggcgagctgcacgccatcctgcggcggcaggaggacttctaccccttcctgaaggacaaccgggagaagatcgagaagatcctgaccttccggatcccctactacgtgggccccctggcccggggcaactcccggttcgcctggatgacccggaagtccgaggagaccatcaccccctggaacttcgaggaggtggtggacaagggcgcctccgcccagtccttcatcgagcggatgaccaacttcgacaagaacctgcccaacgagaaggtgctgcccaagcactccctgctgtacgagtacttcaccgtgtacaacgagctgaccaaggtgaagtacgtgaccgagggcatgcggaagcccgccttcctgtccggcgagcagaagaaggccatcgtggacctgctgttcaagaccaaccggaaggtgaccgtgaagcagctgaaggaggactacttcaagaagatcgagtgcttcgactccgtggagatctccggcgtggaggaccggttcaacgcctccctgggcacctaccacgacctgctgaagatcatcaaggacaaggacttcctggacaacgaggagaacgaggacatcctggaggacatcgtgctgaccctgaccctgttcgaggaccgggagatgatcgaggagcggctgaagacctacgcccacctgttcgacgacaaggtgatgaagcagctgaagcggcggcggtacaccggctggggccggctgtcccggaagctgatcaacggcatccgggacaagcagtccggcaagaccatcctggacttcctgaagtccgacggcttcgccaaccggaacttcatgcagctgatccacgacgactccctgaccttcaaggaggacatccagaaggcccaggtgtccggccagggcgactccctgcacgagcacatcgccaacctggccggctcccccgccatcaagaagggcatcctgcagaccgtgaaggtggtggacgagctggtgaaggtgatgggccggcacaagcccgagaacatcgtgatcgagatggcccgggagaaccagaccacccagaagggccagaagaactcccgggagcggatgaagcggatcgaggagggcatcaaggagctgggctcccagatcctgaaggagcaccccgtggagaacacccagctgcagaacgagaagctgtacctgtactacctgcagaacggccgggacatgtacgtggaccaggagctggacatcaaccggctgtccgactacgacgtggacgccatcgtgccccagtccttcctgaaggacgactccatcgacgccaaggtgctgacccggtccgacaagaaccggggcaagtccgacaacgtgccctccgaggaggtggtgaagaagatgaagaactactggcggcagctgctgaacgccaagctgatcacccagcggaagttcgacaacctgaccaaggccgagcggggcggcctgtccgagctggacaaggccggcttcatcaagcggcagctggtggagacccggcagatcaccaagcacgtggcccagatcctggactcccggatgaacaccaagtacgacgagaacgacaagctgatccgggaggtgaaggtgatcaccctgaagtccaagctggtgtccgacttccggaaggacttccagttctacaaggtgcgggagatcaacaactaccaccacgcccacgacgcctacctgaacgccgtggtgggcaccgccctgatcaagaagtaccccaagctggagtccgagttcgtgtacggcgactacaaggtgtacgacgtgcggaagatgatcgccaagtccgagcaggagatcggcaaggccaccgccaagtacttcttctactccaacatcatgaacttcttcaagaccgagatcaccctggccaacggcgagatccggaagcggcccctgatcgagaccaacggcgagaccggcgagatcgtgtgggacaagggccgggacttcgccaccgtgcggaaggtgctgtccatgccccaggtgaacatcgtgaagaagaccgaggtgcagaccggcggcttctccaaggagtccatcctgcccaagcggaactccgacaagctgatcgcccggaagaaggactgggaccccaagaagtacggcggcttcgactcccccaccgtggcctactccgtgctggtggtggccaaggtggagaagggcaagtccaagaagctgaagtccgtgaaggagctgctgggcatcaccatcatggagcggtcctccttcgagaagaaccccatcgacttcctggaggccaagggctacaaggaggtgaagaaggacctgatcatcaagctgcccaagtactccctgttcgagctggagaacggccggaagcggatgctggcctccgccggcgagctgcagaagggcaacgagctggccctgccctccaagtacgtgaacttcctgtacctggcctcccactacgagaagctgaagggctcccccgaggacaacgagcagaagcagctgttcgtggagcagcacaagcactacctggacgagatcatcgagcagatctccgagttctccaagcgggtgatcctggccgacgccaacctggacaaggtgctgtccgcctacaacaagcaccgggacaagcccatccgggagcaggccgagaacatcatccacctgttcaccctgaccaacctgggcgcccccgccgccttcaagtacttcgacaccaccatcgaccggaagcggtacacctccaccaaggaggtgctggacgccaccctgatccaccagtccatcaccggcctgtacgagacccggatcgacctgtcccagctgggcggcgacggcgcccccgagtccgccaccgagtccggcggcacctccaccgagtccgagggctccgccggccccaagaagaagcggaaggtgacctccaccgagtccgagggctccgccggctccgccggctccacctccggctcctcctccggcatgaagatcgccgtggtggacaaggccctgaacaacacccggtacgacaagcacttccagctgtacggcgaggaggtggacgtgttccacatgtgcaacgagaagctgtccggccggctgctgaagaagcacatcaccatcggcacccccgagaaccccttcgaccccaacgactacgacttcgtgatcctggtgggcgccgagcccttcctgtacttcgccggcaagaagggcatcggcgactacaccggcaagcgggtggagtacaacggctacgccaactggatcgcctccatctcccccgcccagctgcacttcaagcccgagatgaagcccgtgttcgacgccaccgtggagaacatccacgacatcatcaacggccgggagaagatcgccaaggccggcgactaccggcccatcaccgaccccgacgaggccgaggagtacatcaagatggtgtacaacatggtgatcggccccgtggccttcgcctccgccacctccgccctgtactgccgggacggctacctgctgggcgtgtccatctcccaccaggagtaccagggcgtgtacatcgactccgactgcctgaccgaggtggccgtgtactacctgcagaagatcctggactccgagaaccacaccatcgtgttccacaacctgaagttcgacatgcacttctacaagtaccacctgggcctgaccttcgacaaggcccacaaggagcggcggctgcacgacaccatgctgcagcactacgtgctggacgagcggcggggcacccacggcctgaagtccctggccatgaagtacaccgacatgggcgactacgacttcgagctggacaagttcaaggacgactactgcaaggcccacaagatcaagaaggaggacttcacctacgacctgatccccttcgacatcatgtggccctacgccgccaaggacaccgacgccaccatccggctgcacaacttcttcctgcccaagatcgagaagaacgagaagctgtgctccctgtactacgacgtgctgatgcccggctgcgtgttcctgcagcgggtggaggaccggggcgtgcccatctccatcgaccggctgaaggaggcccagtaccagctgacccacaacctgaacaaggcccgggagaagctgtacacctaccccgaggtgaagcagctggagcaggaccagaacgaggccttcaaccccaactccgtgaagcagctgcgggtgctgctgttcgactacgtgggcctgacccccaccggcaagctgaccgacaccggcgccgactccaccgacgccgaggccctgaacgagctggccacccagcaccccatcgccaagaccctgctggagatccggaagctgaccaagctgatctccacctacgtggagaagatcctgctgtccatcgacgccgacggctgcatccggaccggcttccacgagcacatgaccacctccggccggctgtcctcctccggcaagctgaacctgcagcagctgccccgggacgagtccatcatcaagggctgcgtggtggccccccccggctaccgggtgatcgcctgggacctgaccaccgccgaggtgtactacgccgccgtgctgtccggcgaccggaacatgcagcaggtgttcatcaacatgcggaacgagcccgacaagtaccccgacttccactccaacatcgcccacatggtgttcaagctgcagtgcgagccccgggacgtgaagaagctgttccccgccctgcggcaggccgccaaggccatcaccttcggcatcctgtacggctccggccccgccaaggtggcccactccgtgaacgaggccctgctggagcaggccgccaagaccggcgagcccttcgtggagtgcaccgtggccgacgccaaggagtacatcgagacctacttcggccagttcccccagctgaagcggtggatcgacaagtgccacgaccagatcaagaaccacggcttcatctactcccacttcggccggaagcggcggctgcacaacatccactccgaggaccggggcgtgcagggcgaggagatccggtccggcttcaacgccatcatccagtccgcctcctccgactccctgctgctgggcgccgtggacgccgacaacgagatcatctccctgggcctggagcaggagatgaagatcgtgatgctggtgcacgactccgtggtggccatcgtgcgggaggacctgatcgaccagtacaacgagatcctgatccggaacatccagaaggaccggggcatctccatccccggctgccccatcggcatcgactccgactccgaggccggcggctcccgggactactcctgcggcaagatgaagaagcagcacccctccatcgcctgcatcgacgacgacgagtacacccggtacgtgaagggcgtgctgctggacgccgagttcgagtacaagaagctggccgccatggacaaggagcaccccgaccactccaagtacaaggacgacaagttcatcgccgtgtgcaaggacctggacaacgtgaagcggatcctgggcgccggcggcggctccggcaagcggaccgccgacggctccggcggcggctcccccaagaagaagcggaaggtgcctgccgctaagagagtgaagctggactag

SEQ ID NO: 1938 - protein, 2321 aa, synthetic construct
  REGION 1..2321: note = Synthetic
MGKRPAATKKAGQAKKKKDKKYSIGLDIGTNSVGWAVITDEYKVPSKKFKVLGNTDRHSIKKNLIGALLFDSGETAEATRLKRTARRRYTRRKNRICYLQEIFSNEMAKVDDSFFHRLEESFLVEEDKKHERHPIFGNIVDEVAYHEKYPTIYHLRKKLVDSTDKADLRLIYLALAHMIKFRGHFLIEGDLNPDNSDVDKLFIQLVQTYNQLFEENPINASGVDAKAILSARLSKSRRLENLIAQLPGEKKNGLFGNLIALSLGLTPNFKSNFDLAEDAKLQLSKDTYDDDLDNLLAQIGDQYADLFLAAKNLSDAILLSDILRVNTEITKAPLSASMIKRYDEHHQDLTLLKALVRQQLPEKYKEIFFDQSKNGYAGYIDGGASQEEFYKFIKPILEKMDGTEELLVKLNREDLLRKQRTFDNGSIPHQIHLGELHAILRRQEDFYPFLKDNREKIEKILTFRIPYYVGPLARGNSRFAWMTRKSEETITPWNFEEVVDKGASAQSFIERMTNFDKNLPNEKVLPKHSLLYEYFTVYNELTKVKYVTEGMRKPAFLSGEQKKAIVDLLFKTNRKVTVKQLKEDYFKKIECFDSVEISGVEDRFNASLGTYHDLLKIIKDKDFLDNEENEDILEDIVLTLTLFEDREMIEERLKTYAHLFDDKVMKQLKRRRYTGWGRLSRKLINGIRDKQSGKTILDFLKSDGFANRNFMQLIHDDSLTFKEDIQKAQVSGQGDSLHEHIANLAGSPAIKKGILQTVKVVDELVKVMGRHKPENIVIEMARENQTTQKGQKNSRERMKRIEEGIKELGSQILKEHPVENTQLQNEKLYLYYLQNGRDMYVDQELDINRLSDYDVDAIVPQSFLKDDSIDAKVLTRSDKNRGKSDNVPSEEVVKKMKNYWRQLLNAKLITQRKFDNLTKAERGGLSELDKAGFIKRQLVETRQITKHVAQILDSRMNTKYDENDKLIREVKVITLKSKLVSDFRKDFQFYKVREINNYHHAHDAYLNAVVGTALIKKYPKLESEFVYGDYKVYDVRKMIAKSEQEIGKATAKYFFYSNIMNFFKTEITLANGEIRKRPLIETNGETGEIVWDKGRDFATVRKVLSMPQVNIVKKTEVQTGGFSKESILPKRNSDKLIARKKDWDPKKYGGFDSPTVAYSVLVVAKVEKGKSKKLKSVKELLGITIMERSSFEKNPIDFLEAKGYKEVKKDLIIKLPKYSLFELENGRKRMLASAGELQKGNELALPSKYVNFLYLASHYEKLKGSPEDNEQKQLFVEQHKHYLDEIIEQISEFSKRVILADANLDKVLSAYNKHRDKPIREQAENIIHLFTLTNLGAPAAFKYFDTTIDRKRYTSTKEVLDATLIHQSITGLYETRIDLSQLGGDGAPESATESGGTSTESEGSAGPKKKRKVTSTESEGSAGSAGSTSGSSSGMKIAVVDKALNNTRYDKHFQLYGEEVDVFHMCNEKLSGRLLKKHITIGTPENPFDPNDYDFVILVGAEPFLYFAGKKGIGDYTGKRVEYNGYANWIASISPAQLHFKPEMKPVFDATVENIHDIINGREKIAKAGDYRPITDPDEAEEYIKMVYNMVIGPVAFASATSALYCRDGYLLGVSISHQEYQGVYIDSDCLTEVAVYYLQKILDSENHTIVFHNLKFDMHFYKYHLGLTFDKAHKERRLHDTMLQHYVLDERRGTHGLKSLAMKYTDMGDYDFELDKFKDDYCKAHKIKKEDFTYDLIPFDIMWPYAAKDTDATIRLHNFFLPKIEKNEKLCSLYYDVLMPGCVFLQRVEDRGVPISIDRLKEAQYQLTHNLNKAREKLYTYPEVKQLEQDQNEAFNPNSVKQLRVLLFDYVGLTPTGKLTDTGADSTDAEALNELATQHPIAKTLLEIRKLTKLISTYVEKILLSIDADGCIRTGFHEHMTTSGRLSSSGKLNLQQLPRDESIIKGCVVAPPGYRVIAWDLTTAEVYYAAVLSGDRNMQQVFINMRNEPDKYPDFHSNIAHMVFKLQCEPRDVKKLFPALRQAAKAITFGILYGSGPAKVAHSVNEALLEQAAKTGEPFVECTVADAKEYIETYFGQFPQLKRWIDKCHDQIKNHGFIYSHFGRKRRLHNIHSEDRGVQGEEIRSGFNAIIQSASSDSLLLGAVDADNEIISLGLEQEMKIVMLVHDSVVAIVREDLIDQYNEILIRNIQKDRGISIPGCPIGIDSDSEAGGSRDYSCGKMKKQHPSIACIDDDEYTRYVKGVLLDAEFEYKKLAAMDKEHPDHSKYKDDKFIAVCKDLDNVKRILGAGGGSGKRTADGSGGGSPKKKRKVPAAKRVKLD

SEQ ID NO: 1939 - RNA, 3137 nt, synthetic construct
  misc_feature 1..3137: note = Synthetic
  source 1..3137: mol_type = other RNA
aggactcactatttgttttcgcgcccagttgcaaaaagtgtcgaagctcagaataaacgctcaactttggccggatctgccaccatgggctccggcggcggctccaagcggcccgccgccaccaagaaggccggccaggccaagaagaagaagggcggctccggcggcggcgacaagaagtactccatcggcctggacatcggcaccaactccgtgggctgggccgtgatcaccgacgagtacaaggtgccctccaagaagttcaaggtgctgggcaacaccgaccggcactccatcaagaagaacctgatcggcgccctgctgttcgactccggcgagaccgccgaggccacccggctgaagcggaccgcccggcggcggtacacccggcggaagaaccggatctgctacctgcaggagatcttctccaacgagatggccaaggtggacgactccttcttccaccggctggaggagtccttcctggtggaggaggacaagaagcacgagcggcaccccatcttcggcaacatcgtggacgaggtggcctaccacgagaagtaccccaccatctaccacctgcggaagaagctggtggactccaccgacaaggccgacctgcggctgatctacctggccctggcccacatgatcaagttccggggccacttcctgatcgagggcgacctgaaccccgacaactccgacgtggacaagctgttcatccagctggtgcagacctacaaccagctgttcgaggagaaccccatcaacgcctccggcgtggacgccaaggccatcctgtccgcccggctgtccaagtcccggcggctggagaacctgatcgcccagctgcccggcgagaagaagaacggcctgttcggcaacctgatcgccctgtccctgggcctgacccccaacttcaagtccaacttcgacctggccgaggacgccaagctgcagctgtccaaggacacctacgacgacgacctggacaacctgctggcccagatcggcgaccagtacgccgacctgttcctggccgccaagaacctgtccgacgccatcctgctgtccgacatcctgcgggtgaacaccgagatcaccaaggcccccctgtccgcctccatgatcaagcggtacgacgagcaccaccaggacctgaccctgctgaaggccctggtgcggcagcagctgcccgagaagtacaaggagatcttcttcgaccagtccaagaacggctacgccggctacatcgacggcggcgcctcccaggaggagttctacaagttcatcaagcccatcctggagaagatggacggcaccgaggagctgctggtgaagctgaaccgggaggacctgctgcggaagcagcggaccttcgacaacggctccatcccccaccagatccacctgggcgagctgcacgccatcctgcggcggcaggaggacttctaccccttcctgaaggacaaccgggagaagatcgagaagatcctgaccttccggatcccctactacgtgggccccctggcccggggcaactcccggttcgcctggatgacccggaagtccgaggagaccatcaccccctggaacttcgaggaggtggtggacaagggcgcctccgcccagtccttcatcgagcggatgaccaacttcgacaagaacctgcccaacgagaaggtgctgcccaagcactccctgctgtacgagtacttcaccgtgtacaacgagctgaccaaggtgaagtacgtgaccgagggcatgcggaagcccgccttcctgtccggcgagcagaagaaggccatcgtggacctgctgttcaagaccaaccggaaggtgaccgtgaagcagctgaaggaggactacttcaagaagatcgagtgcttcgactccgtggagatctccggcgtggaggaccggttcaacgcctccctgggcacctaccacgacctgctgaagatcatcaaggacaaggacttcctggacaacgaggagaacgaggacatcctggaggacatcgtgctgaccctgaccctgttcgaggaccgggagatgatcgaggagcggctgaagacctacgcccacctgttcgacgacaaggtgatgaagcagctgaagcggcggcggtacaccggctggggccggctgtcccggaagctgatcaacggcatccgggacaagcagtccggcaagaccatcctggacttcctgaagtccgacggcttcgccaaccggaacttcatgcagctgatccacgacgactccctgaccttcaaggaggacatccagaaggcccaggtgcggggcaagtgcctgtcctacgacaccgagatcctgaccgtggagtacggcttcctgcccatcggcaagatcgtggaggagcggatcgagtgcaccgtgtacaccgtggacaagaacggcttcgtgtacacccagcccatcgcccagtggcacaaccgcggcgagcaggaggtgttcgagtactgcctggaggacggctccatcatccgcgccaccaaggaccacaagttcatgaccaccgacggccagatgctgcccatcgacgagatcttcgagcgcggcctggacctgaagcaggtggacggcctgccctagctagcaccagcctcaagaacacccgaatggagtctctaagctacataataccaacttacactttacaaaatgttgtcccccaaaatgtagccattcgtatctgctcctaataaaaagaaagtttcttcacattctctcgagaaaaaaaaaaaatggaaaaaaaaaaaacggaaaaaaaaaaaaggtaaaaaaaaaaaatataaaaaaaaaaaacataaaaaaaaaaaacgaaaaaaaaaaaacgtaaaaaaaaaaaactcaaaaaaaaaaaagataaaaaaaaaaaacctaaaaaaaaaaaatgtaaaaaaaaaaaagggaaaaaaaaaaaacgcaaaaaaaaaaaacacaaaaaaaaaaaatgcaaaaaaaaaaaatcgaaaaaaaaaaaatctaaaaaaaaaaaacgaaaaaaaaaaaacccaaaaaaaaaaaagacaaaaaaaaaaaatagaaaaaaaaaaagttaaaaaaaaaaaactgaaaaaaaaaaaatttaaaaaaaaaaaatctag

SEQ ID NO: 1940 - DNA, 2538 bp, synthetic construct
  misc_feature 1..2538: note = Synthetic
  source 1..2538: mol_type = other DNA
atgggctccggcggcggctccaagcggcccgccgccaccaagaaggccggccaggccaagaagaagaagggcggctccggcggcggcgacaagaagtactccatcggcctggacatcggcaccaactccgtgggctgggccgtgatcaccgacgagtacaaggtgccctccaagaagttcaaggtgctgggcaacaccgaccggcactccatcaagaagaacctgatcggcgccctgctgttcgactccggcgagaccgccgaggccacccggctgaagcggaccgcccggcggcggtacacccggcggaagaaccggatctgctacctgcaggagatcttctccaacgagatggccaaggtggacgactccttcttccaccggctggaggagtccttcctggtggaggaggacaagaagcacgagcggcaccccatcttcggcaacatcgtggacgaggtggcctaccacgagaagtaccccaccatctaccacctgcggaagaagctggtggactccaccgacaaggccgacctgcggctgatctacctggccctggcccacatgatcaagttccggggccacttcctgatcgagggcgacctgaaccccgacaactccgacgtggacaagctgttcatccagctggtgcagacctacaaccagctgttcgaggagaaccccatcaacgcctccggcgtggacgccaaggccatcctgtccgcccggctgtccaagtcccggcggctggagaacctgatcgcccagctgcccggcgagaagaagaacggcctgttcggcaacctgatcgccctgtccctgggcctgacccccaacttcaagtccaacttcgacctggccgaggacgccaagctgcagctgtccaaggacacctacgacgacgacctggacaacctgctggcccagatcggcgaccagtacgccgacctgttcctggccgccaagaacctgtccgacgccatcctgctgtccgacatcctgcgggtgaacaccgagatcaccaaggcccccctgtccgcctccatgatcaagcggtacgacgagcaccaccaggacctgaccctgctgaaggccctggtgcggcagcagctgcccgagaagtacaaggagatcttcttcgaccagtccaagaacggctacgccggctacatcgacggcggcgcctcccaggaggagttctacaagttcatcaagcccatcctggagaagatggacggcaccgaggagctgctggtgaagctgaaccgggaggacctgctgcggaagcagcggaccttcgacaacggctccatcccccaccagatccacctgggcgagctgcacgccatcctgcggcggcaggaggacttctaccccttcctgaaggacaaccgggagaagatcgagaagatcctgaccttccggatcccctactacgtgggccccctggcccggggcaactcccggttcgcctggatgacccggaagtccgaggagaccatcaccccctggaacttcgaggaggtggtggacaagggcgcctccgcccagtccttcatcgagcggatgaccaacttcgacaagaacctgcccaacgagaaggtgctgcccaagcactccctgctgtacgagtacttcaccgtgtacaacgagctgaccaaggtgaagtacgtgaccgagggcatgcggaagcccgccttcctgtccggcgagcagaagaaggccatcgtggacctgctgttcaagaccaaccggaaggtgaccgtgaagcagctgaaggaggactacttcaagaagatcgagtgcttcgactccgtggagatctccggcgtggaggaccggttcaacgcctccctgggcacctaccacgacctgctgaagatcatcaaggacaaggacttcctggacaacgaggagaacgaggacatcctggaggacatcgtgctgaccctgaccctgttcgaggaccgggagatgatcgaggagcggctgaagacctacgcccacctgttcgacgacaaggtgatgaagcagctgaagcggcggcggtacaccggctggggccggctgtcccggaagctgatcaacggcatccgggacaagcagtccggcaagaccatcctggacttcctgaagtccgacggcttcgccaaccggaacttcatgcagctgatccacgacgactccctgaccttcaaggaggacatccagaaggcccaggtgcggggcaagtgcctgtcctacgacaccgagatcctgaccgtggagtacggcttcctgcccatcggcaagatcgtggaggagcggatcgagtgcaccgtgtacaccgtggacaagaacggcttcgtgtacacccagcccatcgcccagtggcacaaccgcggcgagcaggaggtgttcgagtactgcctggaggacggctccatcatccgcgccaccaaggaccacaagttcatgaccaccgacggccagatgctgcccatcgacgagatcttcgagcgcggcctggacctgaagcaggtggacggcctgccctag

SEQ ID NO: 1941 - protein, 845 aa, synthetic construct
  REGION 1..845: note = Synthetic
MGSGGGSKRPAATKKAGQAKKKKGGSGGGDKKYSIGLDIGTNSVGWAVITDEYKVPSKKFKVLGNTDRHSIKKNLIGALLFDSGETAEATRLKRTARRRYTRRKNRICYLQEIFSNEMAKVDDSFFHRLEESFLVEEDKKHERHPIFGNIVDEVAYHEKYPTIYHLRKKLVDSTDKADLRLIYLALAHMIKFRGHFLIEGDLNPDNSDVDKLFIQLVQTYNQLFEENPINASGVDAKAILSARLSKSRRLENLIAQLPGEKKNGLFGNLIALSLGLTPNFKSNFDLAEDAKLQLSKDTYDDDLDNLLAQIGDQYADLFLAAKNLSDAILLSDILRVNTEITKAPLSASMIKRYDEHHQDLTLLKALVRQQLPEKYKEIFFDQSKNGYAGYIDGGASQEEFYKFIKPILEKMDGTEELLVKLNREDLLRKQRTFDNGSIPHQIHLGELHAILRRQEDFYPFLKDNREKIEKILTFRIPYYVGPLARGNSRFAWMTRKSEETITPWNFEEVVDKGASAQSFIERMTNFDKNLPNEKVLPKHSLLYEYFTVYNELTKVKYVTEGMRKPAFLSGEQKKAIVDLLFKTNRKVTVKQLKEDYFKKIECFDSVEISGVEDRFNASLGTYHDLLKIIKDKDFLDNEENEDILEDIVLTLTLFEDREMIEERLKTYAHLFDDKVMKQLKRRRYTGWGRLSRKLINGIRDKQSGKTILDFLKSDGFANRNFMQLIHDDSLTFKEDIQKAQVRGKCLSYDTEILTVEYGFLPIGKIVEERIECTVYTVDKNGFVYTQPIAQWHNRGEQEVFEYCLEDGSIIRATKDHKFMTTDGQMLPIDEIFERGLDLKQVDGLP

SEQ ID NO: 1942 - RNA, 3800 nt, synthetic construct
  misc_feature 1..3800: note = Synthetic
  source 1..3800: mol_type = other RNA
aggactcactatttgttttcgcgcccagttgcaaaaagtgtcgaagctcagaataaacgctcaactttggccggatctgccaccatgggcaagcggcccgccgccaccaagaaggccggccaggccaagaagaagaagtccggctccgagacccccggcacctccgagtccgccacccccgagtccggcaagggcgaccccaagaagccccggggcaagatgtcctcctacgccttcttcgtgcagacctgccgggaggagcacaagaagaagcaccccgacgcctccgtgaacttctccgagttctccaagaagtgctccgagcggtggaagaccatgtccgccaaggagaagggcaagttcgaggacatggccaaggccgacaaggcccggtacgagcgggagatgaagacctacatcccccccaagggcgagaccaagaagaagttcaaggaccccaacgcccccaagcggcccccctccgccttcttcctgttctgctccgagtaccggcccaagatcaagggcgagcaccccggcctgtccatcggcgacgtggccaagaagctgggcgagatgtggaacaacaccgccgccgacgacaagcagccctacgagaagaaggccgccaagctgaaggagaagtacgagaaggacatcgccgcctaccgggccaagggcaagcccgacgccgccaagaagggcgtggtgaaggccgagaagtccaagaagaagaagggcaccaaggactccaccaaggacatccccgagaccccctccaaggacggcaccaaggactccaccaaggacatccccgagaccccctccaaggacgacaagaagtactccatcggcctggacatcggcaccaactccgtgggctgggccgtgatcaccgacgagtacaaggtgccctccaagaagttcaaggtgctgggcaacaccgaccggcactccatcaagaagaacctgatcggcgccctgctgttcgactccggcgagaccgccgaggccacccggctgaagcggaccgcccggcggcggtacacccggcggaagaaccggatctgctacctgcaggagatcttctccaacgagatggccaaggtggacgactccttcttccaccggctggaggagtccttcctggtggaggaggacaagaagcacgagcggcaccccatcttcggcaacatcgtggacgaggtggcctaccacgagaagtaccccaccatctaccacctgcggaagaagctggtggactccaccgacaaggccgacctgcggctgatctacctggccctggcccacatgatcaagttccggggccacttcctgatcgagggcgacctgaaccccgacaactccgacgtggacaagctgttcatccagctggtgcagacctacaaccagctgttcgaggagaaccccatcaacgcctccggcgtggacgccaaggccatcctgtccgcccggctgtccaagtcccggcggctggagaacctgatcgcccagctgcccggcgagaagaagaacggcctgttcggcaacctgatcgccctgtccctgggcctgacccccaacttcaagtccaacttcgacctggccgaggacgccaagctgcagctgtccaaggacacctacgacgacgacctggacaacctgctggcccagatcggcgaccagtacgccgacctgttcctggccgccaagaacctgtccgacgccatcctgctgtccgacatcctgcgggtgaacaccgagatcaccaaggcccccctgtccgcctccatgatcaagcggtacgacgagcaccaccaggacctgaccctgctgaaggccctggtgcggcagcagctgcccgagaagtacaaggagatcttcttcgaccagtccaagaacggctacgccggctacatcgacggcggcgcctcccaggaggagttctacaagttcatcaagcccatcctggagaagatggacggcaccgaggagctgctggtgaagctgaaccgggaggacctgctgcggaagcagcggaccttcgacaacggctccatcccccaccagatccacctgggcgagctgcacgccatcctgcggcggcaggaggacttctaccccttcctgaaggacaaccgggagaagatcgagaagatcctgaccttccggatcccctactacgtgggccccctggcccggggcaactcccggttcgcctggatgacccggaagtccgaggagaccatcaccccctggaacttcgaggaggtggtggacaagggcgcctccgcccagtccttcatcgagcggatgaccaacttcgacaagaacctgcccaacgagaaggtgctgcccaagcactccctgctgtacgagtacttcaccgtgtacaacgagctgaccaaggtgaagtacgtgaccgagggcatgcggaagcccgccttcctgtccggcgagcagaagaaggccatcgtggacctgctgttcaagaccaaccggaaggtgaccgtgaagcagctgaaggaggactacttcaagaagatcgagtgcttcgactccgtggagatctccggcgtggaggaccggttcaacgcctccctgggcacctaccacgacctgctgaagatcatcaaggacaaggacttcctggacaacgaggagaacgaggacatcctggaggacatcgtgctgaccctgaccctgttcgaggaccgggagatgatcgaggagcggctgaagacctacgcccacctgttcgacgacaaggtgatgaagcagctgaagcggcggcggtacaccggctggggccggctgtcccggaagctgatcaacggcatccgggacaagcagtccggcaagaccatcctggacttcctgaagtccgacggcttcgccaaccggaacttcatgcagctgatccacgacgactccctgaccttcaaggaggacatccagaaggcccaggtgcggggcaagtgcctgtcctacgacaccgagatcctgaccgtggagtacggcttcctgcccatcggcaagatcgtggaggagcggatcgagtgcaccgtgtacaccgtggacaagaacggcttcgtgtacacccagcccatcgcccagtggcacaaccgcggcgagcaggaggtgttcgagtactgcctggaggacggctccatcatccgcgccaccaaggaccacaagttcatgaccaccgacggccagatgctgcccatcgacgagatcttcgagcgcggcctggacctgaagcaggtggacggcctgccctagctagcaccagcctcaagaacacccgaatggagtctctaagctacataataccaacttacactttacaaaatgttgtcccccaaaatgtagccattcgtatctgctcctaataaaaagaaagtttcttcacattctctcgagaaaaaaaaaaaatggaaaaaaaaaaaacggaaaaaaaaaaaaggtaaaaaaaaaaaatataaaaaaaaaaaacataaaaaaaaaaaacgaaaaaaaaaaaacgtaaaaaaaaaaaactcaaaaaaaaaaaagataaaaaaaaaaaacctaaaaaaaaaaaatgtaaaaaaaaaaaagggaaaaaaaaaaaacgcaaaaaaaaaaaacacaaaaaaaaaaaatgcaaaaaaaaaaaatcgaaaaaaaaaaaatctaaaaaaaaaaaacgaaaaaaaaaaaacccaaaaaaaaaaaagacaaaaaaaaaaaatagaaaaaaaaaaagttaaaaaaaaaaaactgaaaaaaaaaaaatttaaaaaaaaaaaatctag

SEQ ID NO: 1943 - DNA, 3201 bp, synthetic construct
  misc_feature 1..3201: note = Synthetic
  source 1..3201: mol_type = other DNA
atgggcaagcggcccgccgccaccaagaaggccggccaggccaagaagaagaagtccggctccgagacccccggcacctccgagtccgccacccccgagtccggcaagggcgaccccaagaagccccggggcaagatgtcctcctacgccttcttcgtgcagacctgccgggaggagcacaagaagaagcaccccgacgcctccgtgaacttctccgagttctccaagaagtgctccgagcggtggaagaccatgtccgccaaggagaagggcaagttcgaggacatggccaaggccgacaaggcccggtacgagcgggagatgaagacctacatcccccccaagggcgagaccaagaagaagttcaaggaccccaacgcccccaagcggcccccctccgccttcttcctgttctgctccgagtaccggcccaagatcaagggcgagcaccccggcctgtccatcggcgacgtggccaagaagctgggcgagatgtggaacaacaccgccgccgacgacaagcagccctacgagaagaaggccgccaagctgaaggagaagtacgagaaggacatcgccgcctaccgggccaagggcaagcccgacgccgccaagaagggcgtggtgaaggccgagaagtccaagaagaagaagggcaccaaggactccaccaaggacatccccgagaccccctccaaggacggcaccaaggactccaccaaggacatccccgagaccccctccaaggacgacaagaagtactccatcggcctggacatcggcaccaactccgtgggctgggccgtgatcaccgacgagtacaaggtgccctccaagaagttcaaggtgctgggcaacaccgaccggcactccatcaagaagaacctgatcggcgccctgctgttcgactccggcgagaccgccgaggccacccggctgaagcggaccgcccggcggcggtacacccggcggaagaaccggatctgctacctgcaggagatcttctccaacgagatggccaaggtggacgactccttcttccaccggctggaggagtccttcctggtggaggaggacaagaagcacgagcggcaccccatcttcggcaacatcgtggacgaggtggcctaccacgagaagtaccccaccatctaccacctgcggaagaagctggtggactccaccgacaaggccgacctgcggctgatctacctggccctggcccacatgatcaagttccggggccacttcctgatcgagggcgacctgaaccccgacaactccgacgtggacaagctgttcatccagctggtgcagacctacaaccagctgttcgaggagaaccccatcaacgcctccggcgtggacgccaaggccatcctgtccgcccggctgtccaagtcccggcggctggagaacctgatcgcccagctgcccggcgagaagaagaacggcctgttcggcaacctgatcgccctgtccctgggcctgacccccaacttcaagtccaacttcgacctggccgaggacgccaagctgcagctgtccaaggacacctacgacgacgacctggacaacctgctggcccagatcggcgaccagtacgccgacctgttcctggccgccaagaacctgtccgacgccatcctgctgtccgacatcctgcgggtgaacaccgagatcaccaaggcccccctgtccgcctccatgatcaagcggtacgacgagcaccaccaggacctgaccctgctgaaggccctggtgcggcagcagctgcccgagaagtacaaggagatcttcttcgaccagtccaagaacggctacgccggctacatcgacggcggcgcctcccaggaggagttctacaagttcatcaagcccatcctggagaagatggacggcaccgaggagctgctggtgaagctgaaccgggaggacctgctgcggaagcagcggaccttcgacaacggctccatcccccaccagatccacctgggcgagctgcacgccatcctgcggcggcaggaggacttctaccccttcctgaaggacaaccgggagaagatcgagaagatcctgaccttccggatcccctactacgtgggccccctggcccggggcaactcccggttcgcctggatgacccggaagtccgaggagaccatcaccccctggaacttcgaggaggtggtggacaagggcgcctccgcccagtccttcatcgagcggatgaccaacttcgacaagaacctgcccaacgagaaggtgctgcccaagcactccctgctgtacgagtacttcaccgtgtacaacgagctgaccaaggtgaagtacgtgaccgagggcatgcggaagcccgccttcctgtccggcgagcagaagaaggccatcgtggacctgctgttcaagaccaaccggaaggtgaccgtgaagcagctgaaggaggactacttcaagaagatcgagtgcttcgactccgtggagatctccggcgtggaggaccggttcaacgcctccctgggcacctaccacgacctgctgaagatcatcaaggacaaggacttcctggacaacgaggagaacgaggacatcctggaggacatcgtgctgaccctgaccctgttcgaggaccgggagatgatcgaggagcggctgaagacctacgcccacctgttcgacgacaaggtgatgaagcagctgaagcggcggcggtacaccggctggggccggctgtcccggaagctgatcaacggcatccgggacaagcagtccggcaagaccatcctggacttcctgaagtccgacggcttcgccaaccggaacttcatgcagctgatccacgacgactccctgaccttcaaggaggacatccagaaggcccaggtgcggggcaagtgcctgtcctacgacaccgagatcctgaccgtggagtacggcttcctgcccatcggcaagatcgtggaggagcggatcgagtgcaccgtgtacaccgtggacaagaacggcttcgtgtacacccagcccatcgcccagtggcacaaccgcggcgagcaggaggtgttcgagtactgcctggaggacggctccatcatccgcgccaccaaggaccacaagttcatgaccaccgacggccagatgctgcccatcgacgagatcttcgagcgcggcctggacctgaagcaggtggacggcctgccctag

SEQ ID NO: 1944 - protein, 1066 aa, synthetic construct
  REGION 1..1066: note = Synthetic
MGKRPAATKKAGQAKKKKSGSETPGTSESATPESGKGDPKKPRGKMSSYAFFVQTCREEHKKKHPDASVNFSEFSKKCSERWKTMSAKEKGKFEDMAKADKARYEREMKTYIPPKGETKKKFKDPNAPKRPPSAFFLFCSEYRPKIKGEHPGLSIGDVAKKLGEMWNNTAADDKQPYEKKAAKLKEKYEKDIAAYRAKGKPDAAKKGVVKAEKSKKKKGTKDSTKDIPETPSKDGTKDSTKDIPETPSKDDKKYSIGLDIGTNSVGWAVITDEYKVPSKKFKVLGNTDRHSIKKNLIGALLFDSGETAEATRLKRTARRRYTRRKNRICYLQEIFSNEMAKVDDSFFHRLEESFLVEEDKKHERHPIFGNIVDEVAYHEKYPTIYHLRKKLVDSTDKADLRLIYLALAHMIKFRGHFLIEGDLNPDNSDVDKLFIQLVQTYNQLFEENPINASGVDAKAILSARLSKSRRLENLIAQLPGEKKNGLFGNLIALSLGLTPNFKSNFDLAEDAKLQLSKDTYDDDLDNLLAQIGDQYADLFLAAKNLSDAILLSDILRVNTEITKAPLSASMIKRYDEHHQDLTLLKALVRQQLPEKYKEIFFDQSKNGYAGYIDGGASQEEFYKFIKPILEKMDGTEELLVKLNREDLLRKQRTFDNGSIPHQIHLGELHAILRRQEDFYPFLKDNREKIEKILTFRIPYYVGPLARGNSRFAWMTRKSEETITPWNFEEVVDKGASAQSFIERMTNFDKNLPNEKVLPKHSLLYEYFTVYNELTKVKYVTEGMRKPAFLSGEQKKAIVDLLFKTNRKVTVKQLKEDYFKKIECFDSVEISGVEDRFNASLGTYHDLLKIIKDKDFLDNEENEDILEDIVLTLTLFEDREMIEERLKTYAHLFDDKVMKQLKRRRYTGWGRLSRKLINGIRDKQSGKTILDFLKSDGFANRNFMQLIHDDSLTFKEDIQKAQVRGKCLSYDTEILTVEYGFLPIGKIVEERIECTVYTVDKNGFVYTQPIAQWHNRGEQEVFEYCLEDGSIIRATKDHKFMTTDGQMLPIDEIFERGLDLKQVDGLP

SEQ ID NO: 1945 - RNA, 4463 nt, synthetic construct
  misc_feature 1..4463: note = Synthetic
  source 1..4463: mol_type = other RNA
aggactcactatttgttttcgcgcccagttgcaaaaagtgtcgaagctcagaataaacgctcaactttggccggatctgccaccatgggcgtgaagatcatctcccgcaagtccctgggcacccagaacgtgtacgacatcggcgtggagaaggaccacaacttcctgctgaagaacggcctggtggcctccaactgcttcaactccggccagggcgactccctgcacgagcacatcgccaacctggccggctcccccgccatcaagaagggcatcctgcagaccgtgaaggtggtggacgagctggtgaaggtgatgggccggcacaagcccgagaacatcgtgatcgagatggcccgggagaaccagaccacccagaagggccagaagaactcccgggagcggatgaagcggatcgaggagggcatcaaggagctgggctcccagatcctgaaggagcaccccgtggagaacacccagctgcagaacgagaagctgtacctgtactacctgcagaacggccgggacatgtacgtggaccaggagctggacatcaaccggctgtccgactacgacgtggacgccatcgtgccccagtccttcctgaaggacgactccatcgacaacaaggtgctgacccggtccgacaagaaccggggcaagtccgacaacgtgccctccgaggaggtggtgaagaagatgaagaactactggcggcagctgctgaacgccaagctgatcacccagcggaagttcgacaacctgaccaaggccgagcggggcggcctgtccgagctggacaaggccggcttcatcaagcggcagctggtggagacccggcagatcaccaagcacgtggcccagatcctggactcccggatgaacaccaagtacgacgagaacgacaagctgatccgggaggtgaaggtgatcaccctgaagtccaagctggtgtccgacttccggaaggacttccagttctacaaggtgcgggagatcaacaactaccaccacgcccacgacgcctacctgaacgccgtggtgggcaccgccctgatcaagaagtaccccaagctggagtccgagttcgtgtacggcgactacaaggtgtacgacgtgcggaagatgatcgccaagtccgagcaggagatcggcaaggccaccgccaagtacttcttctactccaacatcatgaacttcttcaagaccgagatcaccctggccaacggcgagatccggaagcggcccctgatcgagaccaacggcgagaccggcgagatcgtgtgggacaagggccgggacttcgccaccgtgcggaaggtgctgtccatgccccaggtgaacatcgtgaagaagaccgaggtgcagaccggcggcttctccaaggagtccatcctgcccaagcggaactccgacaagctgatcgcccggaagaaggactgggaccccaagaagtacggcggcttcgactcccccaccgtggcctactccgtgctggtggtggccaaggtggagaagggcaagtccaagaagctgaagtccgtgaaggagctgctgggcatcaccatcatggagcggtcctccttcgagaagaaccccatcgacttcctggaggccaagggctacaaggaggtgaagaaggacctgatcatcaagctgcccaagtactccctgttcgagctggagaacggccggaagcggatgctggcctccgccggcgagctgcagaagggcaacgagctggccctgccctccaagtacgtgaacttcctgtacctggcctcccactacgagaagctgaagggctcccccgaggacaacgagcagaagcagctgttcgtggagcagcacaagcactacctggacgagatcatcgagcagatctccgagttctccaagcgggtgatcctggccgacgccaacctggacaaggtgctgtccgcctacaacaagcaccgggacaagcccatccgggagcaggccgagaacatcatccacctgttcaccctgaccaacctgggcgcccccgccgccttcaagtacttcgacaccaccatcgaccggaagcggtacacctccaccaaggaggtgctggacgccaccctgatccaccagtccatcaccggcctgtacgagacccggatcgacctgtcccagctgggcggcgactccggcggctcctccggcggctccaagcggaccgccgacggctccgagttcgagtcccccaagaagaagcggaaggtgtccggcggctcctccggcggctccatggactccaccaaggagaagtgcgactcctacaaggacgacctgctgctgcggatgggcctgaacgacaacaaggccggcatggagggcctggacaaggagaagatcaacaagatcatcatggaggccaccaagggctcccggttctacggcaacgagctgaagaaggagaagcaggtgaaccagcggatcgagaacatgatgcagcagaaggcccagatcacctcccagcagctgcggaaggcccagctgcaggtggaccggttcgccatggagctggagcagtcccggaacctgtccaacaccatcgtgcacatcgacatggacgccttctacgccgccgtggagatgcgggacaaccccgagctgaaggacaagcccatcgccgtgggctccatgtccatgctgtccacctccaactaccacgcccggcggttcggcgtgcgggccgccatgcccggcttcatcgccaagcggctgtgcccccagctgatcatcgtgccccccaacttcgacaagtaccgggccgtgtccaaggaggtgaaggagatcctggccgactacgaccccaacttcatggccatgtccctggacgaggcctacctgaacatcaccaagcacctggaggagcggcagaactggcccgaggacaagcggcggtacttcatcaagatgggctcctccgtggagaacgacaaccccggcaaggaggtgaacaagctgtccgagcacgagcggtccatctcccccctgctgttcgaggagtccccctccgacgtgcagccccccggcgaccccttccaggtgaacttcgaggagcagaacaacccccagatcctgcagaactccgtggtgttcggcacctccgcccaggaggtggtgaaggagatccggttccggatcgagcagaagaccaccctgaccgcctccgccggcatcgcccccaacaccatgctggccaaggtgtgctccgacaagaacaagcccaacggccagtaccagatcctgcccaaccggcaggccgtgatggacttcatcaaggacctgcccatccggaaggtgtccggcatcggcaaggtgaccgagaagatgctgaaggccctgggcatcatcacctgcaccgagctgtaccagcagcgggccctgctgtccctgctgttctccgagacctcctggcactacttcctgcacatctccctgggcctgggctccacccacctgacccgggaccgggtgcggaagtccatgtccgtggagcggaccttctccgagatcaacaaggccgaggagcagtactccctgtgccaggagctgtgctccgagctggcccaggacctgcagaaggagcggctgaagggccggaccgtgaccatcaagctgaagaacgtgaacttcgaggtgaagacccgggcctccaccgtgtcctccgtggtgtccaccgccgaggagatcttcgccatcgccaaggagctgctgaagaccgagatcgacgccgacttcccccaccccctgcggctgcggctgatgggcgtgcggatctcctccttccccaacgaggaggaccggaagcaccagcagggcggcggctccggcaagcggaccgccgacggctccggcggcggctcccccaagaagaagcggaaggtgcccgccgccaagcgcgtgaagctggactagctagcaccagcctcaagaacacccgaatggagtctctaagctacataataccaacttacactttacaaaatgttgtcccccaaaatgtagccattcgtatctgctcctaataaaaagaaagtttcttcacattctctcgagaaaaaaaaaaaatggaaaaaaaaaaaacggaaaaaaaaaaaaggtaaaaaaaaaaaatataaaaaaaaaaaacataaaaaaaaaaaacgaaaaaaaaaaaacgtaaaaaaaaaaaactcaaaaaaaaaaaagataaaaaaaaaaaacctaaaaaaaaaaaatgtaaaaaaaaaaaagggaaaaaaaaaaaacgcaaaaaaaaaaaacacaaaaaaaaaaaatgcaaaaaaaaaaaatcgaaaaaaaaaaaatctaaaaaaaaaaaacgaaaaaaaaaaaacccaaaaaaaaaaaagacaaaaaaaaaaaatagaaaaaaaaaaagttaaaaaaaaaaaactgaaaaaaaaaaaatttaaaaaaaaaaaatctag

SEQ ID NO: 1946 - DNA, 3864 bp, synthetic construct
  misc_feature 1..3864: note = Synthetic
  source 1..3864: mol_type = other DNA
atgggcgtgaagatcatctcccgcaagtccctgggcacccagaacgtgtacgacatcggcgtggagaaggaccacaacttcctgctgaagaacggcctggtggcctccaactgcttcaactccggccagggcgactccctgcacgagcacatcgccaacctggccggctcccccgccatcaagaagggcatcctgcagaccgtgaaggtggtggacgagctggtgaaggtgatgggccggcacaagcccgagaacatcgtgatcgagatggcccgggagaaccagaccacccagaagggccagaagaactcccgggagcggatgaagcggatcgaggagggcatcaaggagctgggctcccagatcctgaaggagcaccccgtggagaacacccagctgcagaacgagaagctgtacctgtactacctgcagaacggccgggacatgtacgtggaccaggagctggacatcaaccggctgtccgactacgacgtggacgccatcgtgccccagtccttcctgaaggacgactccatcgacaacaaggtgctgacccggtccgacaagaaccggggcaagtccgacaacgtgccctccgaggaggtggtgaagaagatgaagaactactggcggcagctgctgaacgccaagctgatcacccagcggaagttcgacaacctgaccaaggccgagcggggcggcctgtccgagctggacaaggccggcttcatcaagcggcagctggtggagacccggcagatcaccaagcacgtggcccagatcctggactcccggatgaacaccaagtacgacgagaacgacaagctgatccgggaggtgaaggtgatcaccctgaagtccaagctggtgtccgacttccggaaggacttccagttctacaaggtgcgggagatcaacaactaccaccacgcccacgacgcctacctgaacgccgtggtgggcaccgccctgatcaagaagtaccccaagctggagtccgagttcgtgtacggcgactacaaggtgtacgacgtgcggaagatgatcgccaagtccgagcaggagatcggcaaggccaccgccaagtacttcttctactccaacatcatgaacttcttcaagaccgagatcaccctggccaacggcgagatccggaagcggcccctgatcgagaccaacggcgagaccggcgagatcgtgtgggacaagggccgggacttcgccaccgtgcggaaggtgctgtccatgccccaggtgaacatcgtgaagaagaccgaggtgcagaccggcggcttctccaaggagtccatcctgcccaagcggaactccgacaagctgatcgcccggaagaaggactgggaccccaagaagtacggcggcttcgactcccccaccgtggcctactccgtgctggtggtggccaaggtggagaagggcaagtccaagaagctgaagtccgtgaaggagctgctgggcatcaccatcatggagcggtcctccttcgagaagaaccccatcgacttcctggaggccaagggctacaaggaggtgaagaaggacctgatcatcaagctgcccaagtactccctgttcgagctggagaacggccggaagcggatgctggcctccgccggcgagctgcagaagggcaacgagctggccctgccctccaagtacgtgaacttcctgtacctggcctcccactacgagaagctgaagggctcccccgaggacaacgagcagaagcagctgttcgtggagcagcacaagcactacctggacgagatcatcgagcagatctccgagttctccaagcgggtgatcctggccgacgccaacctggacaaggtgctgtccgcctacaacaagcaccgggacaagcccatccgggagcaggccgagaacatcatccacctgttcaccctgaccaacctgggcgcccccgccgccttcaagtacttcgacaccaccatcgaccggaagcggtacacctccaccaaggaggtgctggacgccaccctgatccaccagtccatcaccggcctgtacgagacccggatcgacctgtcccagctgggcggcgactccggcggctcctccggcggctccaagcggaccgccgacggctccgagttcgagtcccccaagaagaagcggaaggtgtccggcggctcctccggcggctccatggactccaccaaggagaagtgcgactcctacaaggacgacctgctgctgcggatgggcctgaacgacaacaaggccggcatggagggcctggacaaggagaagatcaacaagatcatcatggaggccaccaagggctcccggttctacggcaacgagctgaagaaggagaagcaggtgaaccagcggatcgagaacatgatgcagcagaaggcccagatcacctcccagcagctgcggaaggcccagctgcaggtggaccggttcgccatggagctggagcagtcccggaacctgtccaacaccatcgtgcacatcgacatggacgccttctacgccgccgtggagatgcgggacaaccccgagctgaaggacaagcccatcgccgtgggctccatgtccatgctgtccacctccaactaccacgcccggcggttcggcgtgcgggccgccatgcccggcttcatcgccaagcggctgtgcccccagctgatcatcgtgccccccaacttcgacaagtaccgggccgtgtccaaggaggtgaaggagatcctggccgactacgaccccaacttcatggccatgtccctggacgaggcctacctgaacatcaccaagcacctggaggagcggcagaactggcccgaggacaagcggcggtacttcatcaagatgggctcctccgtggagaacgacaaccccggcaaggaggtgaacaagctgtccgagcacgagcggtccatctcccccctgctgttcgaggagtccccctccgacgtgcagccccccggcgaccccttccaggtgaacttcgaggagcagaacaacccccagatcctgcagaactccgtggtgttcggcacctccgcccaggaggtggtgaaggagatccggttccggatcgagcagaagaccaccctgaccgcctccgccggcatcgcccccaacaccatgctggccaaggtgtgctccgacaagaacaagcccaacggccagtaccagatcctgcccaaccggcaggccgtgatggacttcatcaaggacctgcccatccggaaggtgtccggcatcggcaaggtgaccgagaagatgctgaaggccctgggcatcatcacctgcaccgagctgtaccagcagcgggccctgctgtccctgctgttctccgagacctcctggcactacttcctgcacatctccctgggcctgggctccacccacctgacccgggaccgggtgcggaagtccatgtccgtggagcggaccttctccgagatcaacaaggccgaggagcagtactccctgtgccaggagctgtgctccgagctggcccaggacctgcagaaggagcggctgaagggccggaccgtgaccatcaagctgaagaacgtgaacttcgaggtgaagacccgggcctccaccgtgtcctccgtggtgtccaccgccgaggagatcttcgccatcgccaaggagctgctgaagaccgagatcgacgccgacttcccccaccccctgcggctgcggctgatgggcgtgcggatctcctccttccccaacgaggaggaccggaagcaccagcagggcggcggctccggcaagcggaccgccgacggctccggcggcggctcccccaagaagaagcggaaggtgcccgccgccaagcgcgtgaagctggactag

SEQ ID NO: 1947 - protein, 1287 aa, synthetic construct
  REGION 1..1287: note = Synthetic
MGVKIISRKSLGTQNVYDIGVEKDHNFLLKNGLVASNCFNSGQGDSLHEHIANLAGSPAIKKGILQTVKVVDELVKVMGRHKPENIVIEMARENQTTQKGQKNSRERMKRIEEGIKELGSQILKEHPVENTQLQNEKLYLYYLQNGRDMYVDQELDINRLSDYDVDAIVPQSFLKDDSIDNKVLTRSDKNRGKSDNVPSEEVVKKMKNYWRQLLNAKLITQRKFDNLTKAERGGLSELDKAGFIKRQLVETRQITKHVAQILDSRMNTKYDENDKLIREVKVITLKSKLVSDFRKDFQFYKVREINNYHHAHDAYLNAVVGTALIKKYPKLESEFVYGDYKVYDVRKMIAKSEQEIGKATAKYFFYSNIMNFFKTEITLANGEIRKRPLIETNGETGEIVWDKGRDFATVRKVLSMPQVNIVKKTEVQTGGFSKESILPKRNSDKLIARKKDWDPKKYGGFDSPTVAYSVLVVAKVEKGKSKKLKSVKELLGITIMERSSFEKNPIDFLEAKGYKEVKKDLIIKLPKYSLFELENGRKRMLASAGELQKGNELALPSKYVNFLYLASHYEKLKGSPEDNEQKQLFVEQHKHYLDEIIEQISEFSKRVILADANLDKVLSAYNKHRDKPIREQAENIIHLFTLTNLGAPAAFKYFDTTIDRKRYTSTKEVLDATLIHQSITGLYETRIDLSQLGGDSGGSSGGSKRTADGSEFESPKKKRKVSGGSSGGSMDSTKEKCDSYKDDLLLRMGLNDNKAGMEGLDKEKINKIIMEATKGSRFYGNELKKEKQVNQRIENMMQQKAQITSQQLRKAQLQVDRFAMELEQSRNLSNTIVHIDMDAFYAAVEMRDNPELKDKPIAVGSMSMLSTSNYHARRFGVRAAMPGFIAKRLCPQLIIVPPNFDKYRAVSKEVKEILADYDPNFMAMSLDEAYLNITKHLEERQNWPEDKRRYFIKMGSSVENDNPGKEVNKLSEHERSISPLLFEESPSDVQPPGDPFQVNFEEQNNPQILQNSVVFGTSAQEVVKEIRFRIEQKTTLTASAGIAPNTMLAKVCSDKNKPNGQYQILPNRQAVMDFIKDLPIRKVSGIGKVTEKMLKALGIITCTELYQQRALLSLLFSETSWHYFLHISLGLGSTHLTRDRVRKSMSVERTFSEINKAEEQYSLCQELCSELAQDLQKERLKGRTVTIKLKNVNFEVKTRASTVSSVVSTAEEIFAIAKELLKTEIDADFPHPLRLRLMGVRISSFPNEEDRKHQQGGGSGKRTADGSGGGSPKKKRKVPAAKRVKLD

SEQ ID NO: 1948 - RNA, 4592 nt, synthetic construct
  misc_feature 1..4592: note = Synthetic
  source 1..4592: mol_type = other RNA
aggactcactatttgttttcgcgcccagttgcaaaaagtgtcgaagctcagaataaacgctcaactttggccggatctgccaccatgggcgtgaagatcatctcccgcaagtccctgggcacccagaacgtgtacgacatcggcgtggagaaggaccacaacttcctgctgaagaacggcctggtggcctccaactgcttcaactccggccagggcgactccctgcacgagcacatcgccaacctggccggctcccccgccatcaagaagggcatcctgcagaccgtgaaggtggtggacgagctggtgaaggtgatgggccggcacaagcccgagaacatcgtgatcgagatggcccgggagaaccagaccacccagaagggccagaagaactcccgggagcggatgaagcggatcgaggagggcatcaaggagctgggctcccagatcctgaaggagcaccccgtggagaacacccagctgcagaacgagaagctgtacctgtactacctgcagaacggccgggacatgtacgtggaccaggagctggacatcaaccggctgtccgactacgacgtggacgccatcgtgccccagtccttcctgaaggacgactccatcgacaacaaggtgctgacccggtccgacaagaaccggggcaagtccgacaacgtgccctccgaggaggtggtgaagaagatgaagaactactggcggcagctgctgaacgccaagctgatcacccagcggaagttcgacaacctgaccaaggccgagcggggcggcctgtccgagctggacaaggccggcttcatcaagcggcagctggtggagacccggcagatcaccaagcacgtggcccagatcctggactcccggatgaacaccaagtacgacgagaacgacaagctgatccgggaggtgaaggtgatcaccctgaagtccaagctggtgtccgacttccggaaggacttccagttctacaaggtgcgggagatcaacaactaccaccacgcccacgacgcctacctgaacgccgtggtgggcaccgccctgatcaagaagtaccccaagctggagtccgagttcgtgtacggcgactacaaggtgtacgacgtgcggaagatgatcgccaagtccgagcaggagatcggcaaggccaccgccaagtacttcttctactccaacatcatgaacttcttcaagaccgagatcaccctggccaacggcgagatccggaagcggcccctgatcgagaccaacggcgagaccggcgagatcgtgtgggacaagggccgggacttcgccaccgtgcggaaggtgctgtccatgccccaggtgaacatcgtgaagaagaccgaggtgcagaccggcggcttctccaaggagtccatcctgcccaagcggaactccgacaagctgatcgcccggaagaaggactgggaccccaagaagtacggcggcttcgactcccccaccgtggcctactccgtgctggtggtggccaaggtggagaagggcaagtccaagaagctgaagtccgtgaaggagctgctgggcatcaccatcatggagcggtcctccttcgagaagaaccccatcgacttcctggaggccaagggctacaaggaggtgaagaaggacctgatcatcaagctgcccaagtactccctgttcgagctggagaacggccggaagcggatgctggcctccgccggcgagctgcagaagggcaacgagctggccctgccctccaagtacgtgaacttcctgtacctggcctcccactacgagaagctgaagggctcccccgaggacaacgagcagaagcagctgttcgtggagcagcacaagcactacctggacgagatcatcgagcagatctccgagttctccaagcgggtgatcctggccgacgccaacctggacaaggtgctgtccgcctacaacaagcaccgggacaagcccatccgggagcaggccgagaacatcatccacctgttcaccctgaccaacctgggcgcccccgccgccttcaagtacttcgacaccaccatcgaccggaagcggtacacctccaccaaggaggtgctggacgccaccctgatccaccagtccatcaccggcctgtacgagacccggatcgacctgtcccagctgggcggcgactccggcggctcctccggcggctccaagcggaccgccgacggctccgagttcgagtcccccaagaagaagcggaaggtgtccggcggctcctccggcggctccatggactccaccaaggagaagtgcgactcctacaaggacgacctgctgctgcggatgggcctgaacgacaacaaggccggcatggagggcctggacaaggagaagatcaacaagatcatcatggaggccaccaagggctcccggttctacggcaacgagctgaagaaggagaagcaggtgaaccagcggatcgagaacatgatgcagcagaaggcccagatcacctcccagcagctgcggaaggcccagctgcaggtggaccggttcgccatggagctggagcagtcccggaacctgtccaacaccatcgtgcacatcgacatggacgccttctacgccgccgtggagatgcgggacaaccccgagctgaaggacaagcccatcgccgtgggctccatgtccatgctgtccacctccaactaccacgcccggcggttcggcgtgcgggccgccatgcccggcttcatcgccaagcggctgtgcccccagctgatcatcgtgccccccaacttcgacaagtaccgggccgtgtccaaggaggtgaaggagatcctggccgactacgaccccaacttcatggccatgtccctggacgaggcctacctgaacatcaccaagcacctggaggagcggcagaactggcccgaggacaagcggcggtacttcatcaagatgggctcctccgtggagaacgacaaccccggcaaggaggtgaacaagctgtccgagcacgagcggtccatctcccccctgctgttcgaggagtccccctccgacgtgcagccccccggcgaccccttccaggtgaacttcgaggagcagaacaacccccagatcctgcagaactccgtggtgttcggcacctccgcccaggaggtggtgaaggagatccggttccggatcgagcagaagaccaccctgaccgcctccgccggcatcgcccccaacaccatgctggccaaggtgtgctccgacaagaacaagcccaacggccagtaccagatcctgcccaaccggcaggccgtgatggacttcatcaaggacctgcccatccggaaggtgtccggcatcggcaaggtgaccgagaagatgctgaaggccctgggcatcatcacctgcaccgagctgtaccagcagcgggccctgctgtccctgctgttctccgagacctcctggcactacttcctgcacatctccctgggcctgggctccacccacctgacccgggaccgggtgcggaagtccatgtccgtggagcggaccttctccgagatcaacaaggccgaggagcagtactccctgtgccaggagctgtgctccgagctggcccaggacctgcagaaggagcggctgaagggccggaccgtgaccatcaagctgaagaacgtgaacttcgaggtgaagacccgggcctccaccgtgtcctccgtggtgtccaccgccgaggagatcttcgccatcgccaaggagctgctgaagaccgagatcgacgccgacttcccccaccccctgcggctgcggctgatgggcgtgcggatctcctccttccccaacgaggaggaccggaagcaccagcagggcggcggctccggcaagcggaccgccgacggctccggcggcggctcccccaagaagaagcggaaggtgcccgccgccaagcgcgtgaagctggactccggctccgagacccccggcacctccgagtccgccacccccgagtccatcgccgccctggagaaggagatcgccgccctggagaaggagaacgccgccctggagtgggagatcgccgccctggagaagtagctagcaccagcctcaagaacacccgaatggagtctctaagctacataataccaacttacactttacaaaatgttgtcccccaaaatgtagccattcgtatctgctcctaataaaaagaaagtttcttcacattctctcgagaaaaaaaaaaaatggaaaaaaaaaaaacggaaaaaaaaaaaaggtaaaaaaaaaaaatataaaaaaaaaaaacataaaaaaaaaaaacgaaaaaaaaaaaacgtaaaaaaaaaaaactcaaaaaaaaaaaagataaaaaaaaaaaacctaaaaaaaaaaaatgtaaaaaaaaaaaagggaaaaaaaaaaaacgcaaaaaaaaaaaacacaaaaaaaaaaaatgcaaaaaaaaaaaatcgaaaaaaaaaaaatctaaaaaaaaaaaacgaaaaaaaaaaaacccaaaaaaaaaaaagacaaaaaaaaaaaatagaaaaaaaaaaagttaaaaaaaaaaaactgaaaaaaaaaaaatttaaaaaaaaaaaatctag

SEQ ID NO: 1949 - DNA, 3993 bp, synthetic construct
  misc_feature 1..3993: note = Synthetic
  source 1..3993: mol_type = other DNA
atgggcgtgaagatcatctcccgcaagtccctgggcacccagaacgtgtacgacatcggcgtggagaaggaccacaacttcctgctgaagaacggcctggtggcctccaactgcttcaactccggccagggcgactccctgcacgagcacatcgccaacctggccggctcccccgccatcaagaagggcatcctgcagaccgtgaaggtggtggacgagctggtgaaggtgatgggccggcacaagcccgagaacatcgtgatcgagatggcccgggagaaccagaccacccagaagggccagaagaactcccgggagcggatgaagcggatcgaggagggcatcaaggagctgggctcccagatcctgaaggagcaccccgtggagaacacccagctgcagaacgagaagctgtacctgtactacctgcagaacggccgggacatgtacgtggaccaggagctggacatcaaccggctgtccgactacgacgtggacgccatcgtgccccagtccttcctgaaggacgactccatcgacaacaaggtgctgacccggtccgacaagaaccggggcaagtccgacaacgtgccctccgaggaggtggtgaagaagatgaagaactactggcggcagctgctgaacgccaagctgatcacccagcggaagttcgacaacctgaccaaggccgagcggggcggcctgtccgagctggacaaggccggcttcatcaagcggcagctggtggagacccggcagatcaccaagcacgtggcccagatcctggactcccggatgaacaccaagtacgacgagaacgacaagctgatccgggaggtgaaggtgatcaccctgaagtccaagctggtgtccgacttccggaaggacttccagttctacaaggtgcgggagatcaacaactaccaccacgcccacgacgcctacctgaacgccgtggtgggcaccgccctgatcaagaagtaccccaagctggagtccgagttcgtgtacggcgactacaaggtgtacgacgtgcggaagatgatcgccaagtccgagcaggagatcggcaaggccaccgccaagtacttcttctactccaacatcatgaacttcttcaagaccgagatcaccctggccaacggcgagatccggaagcggcccctgatcgagaccaacggcgagaccggcgagatcgtgtgggacaagggccgggacttcgccaccgtgcggaaggtgctgtccatgccccaggtgaacatcgtgaagaagaccgaggtgcagaccggcggcttctccaaggagtccatcctgcccaagcggaactccgacaagctgatcgcccggaagaaggactgggaccccaagaagtacggcggcttcgactcccccaccgtggcctactccgtgctggtggtggccaaggtggagaagggcaagtccaagaagctgaagtccgtgaaggagctgctgggcatcaccatcatggagcggtcctccttcgagaagaaccccatcgacttcctggaggccaagggctacaaggaggtgaagaaggacctgatcatcaagctgcccaagtactccctgttcgagctggagaacggccggaagcggatgctggcctccgccggcgagctgcagaagggcaacgagctggccctgccctccaagtacgtgaacttcctgtacctggcctcccactacgagaagctgaagggctcccccgaggacaacgagcagaagcagctgttcgtggagcagcacaagcactacctggacgagatcatcgagcagatctccgagttctccaagcgggtgatcctggccgacgccaacctggacaaggtgctgtccgcctacaacaagcaccgggacaagcccatccgggagcaggccgagaacatcatccacctgttcaccctgaccaacctgggcgcccccgccgccttcaagtacttcgacaccaccatcgaccggaagcggtacacctccaccaaggaggtgctggacgccaccctgatccaccagtccatcaccggcctgtacgagacccggatcgacctgtcccagctgggcggcgactccggcggctcctccggcggctccaagcggaccgccgacggctccgagttcgagtcccccaagaagaagcggaaggtgtccggcggctcctccggcggctccatggactccaccaaggagaagtgcgactcctacaaggacgacctgctgctgcggatgggcctgaacgacaacaaggccggcatggagggcctggacaaggagaagatcaacaagatcatcatggaggccaccaagggctcccggttctacggcaacgagctgaagaaggagaagcaggtgaaccagcggatcgagaacatgatgcagcagaaggcccagatcacctcccagcagctgcggaaggcccagctgcaggtggaccggttcgccatggagctggagcagtcccggaacctgtccaacaccatcgtgcacatcgacatggacgccttctacgccgccgtggagatgcgggacaaccccgagctgaaggacaagcccatcgccgtgggctccatgtccatgctgtccacctccaactaccacgcccggcggttcggcgtgcgggccgccatgcccggcttcatcgccaagcggctgtgcccccagctgatcatcgtgccccccaacttcgacaagtaccgggccgtgtccaaggaggtgaaggagatcctggccgactacgaccccaacttcatggccatgtccctggacgaggcctacctgaacatcaccaagcacctggaggagcggcagaactggcccgaggacaagcggcggtacttcatcaagatgggctcctccgtggagaacgacaaccccggcaaggaggtgaacaagctgtccgagcacgagcggtccatctcccccctgctgttcgaggagtccccctccgacgtgcagccccccggcgaccccttccaggtgaacttcgaggagcagaacaacccccagatcctgcagaactccgtggtgttcggcacctccgcccaggaggtggtgaaggagatccggttccggatcgagcagaagaccaccctgaccgcctccgccggcatcgcccccaacaccatgctggccaaggtgtgctccgacaagaacaagcccaacggccagtaccagatcctgcccaaccggcaggccgtgatggacttcatcaaggacctgcccatccggaaggtgtccggcatcggcaaggtgaccgagaagatgctgaaggccctgggcatcatcacctgcaccgagctgtaccagcagcgggccctgctgtccctgctgttctccgagacctcctggcactacttcctgcacatctccctgggcctgggctccacccacctgacccgggaccgggtgcggaagtccatgtccgtggagcggaccttctccgagatcaacaaggccgaggagcagtactccctgtgccaggagctgtgctccgagctggcccaggacctgcagaaggagcggctgaagggccggaccgtgaccatcaagctgaagaacgtgaacttcgaggtgaagacccgggcctccaccgtgtcctccgtggtgtccaccgccgaggagatcttcgccatcgccaaggagctgctgaagaccgagatcgacgccgacttcccccaccccctgcggctgcggctgatgggcgtgcggatctcctccttccccaacgaggaggaccggaagcaccagcagggcggcggctccggcaagcggaccgccgacggctccggcggcggctcccccaagaagaagcggaaggtgcccgccgccaagcgcgtgaagctggactccggctccgagacccccggcacctccgagtccgccacccccgagtccatcgccgccctggagaaggagatcgccgccctggagaaggagaacgccgccctggagtgggagatcgccgccctggagaagtag

SEQ ID NO: 1950 - protein, 1330 aa, synthetic construct
  REGION 1..1330: note = Synthetic
MGVKIISRKSLGTQNVYDIGVEKDHNFLLKNGLVASNCFNSGQGDSLHEHIANLAGSPAIKKGILQTVKVVDELVKVMGRHKPENIVIEMARENQTTQKGQKNSRERMKRIEEGIKELGSQILKEHPVENTQLQNEKLYLYYLQNGRDMYVDQELDINRLSDYDVDAIVPQSFLKDDSIDNKVLTRSDKNRGKSDNVPSEEVVKKMKNYWRQLLNAKLITQRKFDNLTKAERGGLSELDKAGFIKRQLVETRQITKHVAQILDSRMNTKYDENDKLIREVKVITLKSKLVSDFRKDFQFYKVREINNYHHAHDAYLNAVVGTALIKKYPKLESEFVYGDYKVYDVRKMIAKSEQEIGKATAKYFFYSNIMNFFKTEITLANGEIRKRPLIETNGETGEIVWDKGRDFATVRKVLSMPQVNIVKKTEVQTGGFSKESILPKRNSDKLIARKKDWDPKKYGGFDSPTVAYSVLVVAKVEKGKSKKLKSVKELLGITIMERSSFEKNPIDFLEAKGYKEVKKDLIIKLPKYSLFELENGRKRMLASAGELQKGNELALPSKYVNFLYLASHYEKLKGSPEDNEQKQLFVEQHKHYLDEIIEQISEFSKRVILADANLDKVLSAYNKHRDKPIREQAENIIHLFTLTNLGAPAAFKYFDTTIDRKRYTSTKEVLDATLIHQSITGLYETRIDLSQLGGDSGGSSGGSKRTADGSEFESPKKKRKVSGGSSGGSMDSTKEKCDSYKDDLLLRMGLNDNKAGMEGLDKEKINKIIMEATKGSRFYGNELKKEKQVNQRIENMMQQKAQITSQQLRKAQLQVDRFAMELEQSRNLSNTIVHIDMDAFYAAVEMRDNPELKDKPIAVGSMSMLSTSNYHARRFGVRAAMPGFIAKRLCPQLIIVPPNFDKYRAVSKEVKEILADYDPNFMAMSLDEAYLNITKHLEERQNWPEDKRRYFIKMGSSVENDNPGKEVNKLSEHERSISPLLFEESPSDVQPPGDPFQVNFEEQNNPQILQNSVVFGTSAQEVVKEIRFRIEQKTTLTASAGIAPNTMLAKVCSDKNKPNGQYQILPNRQAVMDFIKDLPIRKVSGIGKVTEKMLKALGIITCTELYQQRALLSLLFSETSWHYFLHISLGLGSTHLTRDRVRKSMSVERTFSEINKAEEQYSLCQELCSELAQDLQKERLKGRTVTIKLKNVNFEVKTRASTVSSVVSTAEEIFAIAKELLKTEIDADFPHPLRLRLMGVRISSFPNEEDRKHQQGGGSGKRTADGSGGGSPKKKRKVPAAKRVKLDSGSETPGTSESATPESIAALEKEIAALEKENAALEWEIAALEK

SEQ ID NO: 1951 - RNA, 5450 nt, synthetic construct
  misc_feature 1..5450: note = Synthetic
  source 1..5450: mol_type = other RNA
aggactcactatttgttttcgcgcccagttgcaaaaagtgtcgaagctcagaataaacgctcaactttggccggatctgccaccatgggcgtgaagatcatctcccgcaagtccctgggcacccagaacgtgtacgacatcggcgtggagaaggaccacaacttcctgctgaagaacggcctggtggcctccaactgcttcaactccggccagggcgactccctgcacgagcacatcgccaacctggccggctcccccgccatcaagaagggcatcctgcagaccgtgaaggtggtggacgagctggtgaaggtgatgggccggcacaagcccgagaacatcgtgatcgagatggcccgggagaaccagaccacccagaagggccagaagaactcccgggagcggatgaagcggatcgaggagggcatcaaggagctgggctcccagatcctgaaggagcaccccgtggagaacacccagctgcagaacgagaagctgtacctgtactacctgcagaacggccgggacatgtacgtggaccaggagctggacatcaaccggctgtccgactacgacgtggacgccatcgtgccccagtccttcctgaaggacgactccatcgacaacaaggtgctgacccggtccgacaagaaccggggcaagtccgacaacgtgccctccgaggaggtggtgaagaagatgaagaactactggcggcagctgctgaacgccaagctgatcacccagcggaagttcgacaacctgaccaaggccgagcggggcggcctgtccgagctggacaaggccggcttcatcaagcggcagctggtggagacccggcagatcaccaagcacgtggcccagatcctggactcccggatgaacaccaagtacgacgagaacgacaagctgatccgggaggtgaaggtgatcaccctgaagtccaagctggtgtccgacttccggaaggacttccagttctacaaggtgcgggagatcaacaactaccaccacgcccacgacgcctacctgaacgccgtggtgggcaccgccctgatcaagaagtaccccaagctggagtccgagttcgtgtacggcgactacaaggtgtacgacgtgcggaagatgatcgccaagtccgagcaggagatcggcaaggccaccgccaagtacttcttctactccaacatcatgaacttcttcaagaccgagatcaccctggccaacggcgagatccggaagcggcccctgatcgagaccaacggcgagaccggcgagatcgtgtgggacaagggccgggacttcgccaccgtgcggaaggtgctgtccatgccccaggtgaacatcgtgaagaagaccgaggtgcagaccggcggcttctccaaggagtccatcctgcccaagcggaactccgacaagctgatcgcccggaagaaggactgggaccccaagaagtacggcggcttcgactcccccaccgtggcctactccgtgctggtggtggccaaggtggagaagggcaagtccaagaagctgaagtccgtgaaggagctgctgggcatcaccatcatggagcggtcctccttcgagaagaaccccatcgacttcctggaggccaagggctacaaggaggtgaagaaggacctgatcatcaagctgcccaagtactccctgttcgagctggagaacggccggaagcggatgctggcctccgccggcgagctgcagaagggcaacgagctggccctgccctccaagtacgtgaacttcctgtacctggcctcccactacgagaagctgaagggctcccccgaggacaacgagcagaagcagctgttcgtggagcagcacaagcactacctggacgagatcatcgagcagatctccgagttctccaagcgggtgatcctggccgacgccaacctggacaaggtgctgtccgcctacaacaagcaccgggacaagcccatccgggagcaggccgagaacatcatccacctgttcaccctgaccaacctgggcgcccccgccgccttcaagtacttcgacaccaccatcgaccggaagcggtacacctccaccaaggaggtgctggacgccaccctgatccaccagtccatcaccggcctgtacgagacccggatcgacctgtcccagctgggcggcgactccggcggctcctccggcggctccaagcggaccgccgacggctccgagttcgagtcccccaagaagaagcggaaggtgtccggcggctcctccggcggctccatgaagatcgccgtggtggacaaggccctgaacaacacccggtacgacaagcacttccagctgtacggcgaggaggtggacgtgttccacatgtgcaacgagaagctgtccggccggctgctgaagaagcacatcaccatcggcacccccgagaaccccttcgaccccaacgactacgacttcgtgatcctggtgggcgccgagcccttcctgtacttcgccggcaagaagggcatcggcgactacaccggcaagcgggtggagtacaacggctacgccaactggatcgcctccatctcccccgcccagctgcacttcaagcccgagatgaagcccgtgttcgacgccaccgtggagaacatccacgacatcatcaacggccgggagaagatcgccaaggccggcgactaccggcccatcaccgaccccgacgaggccgaggagtacatcaagatggtgtacaacatggtgatcggccccgtggccttcgcctccgccacctccgccctgtactgccgggacggctacctgctgggcgtgtccatctcccaccaggagtaccagggcgtgtacatcgactccgactgcctgaccgaggtggccgtgtactacctgcagaagatcctggactccgagaaccacaccatcgtgttccacaacctgaagttcgacatgcacttctacaagtaccacctgggcctgaccttcgacaaggcccacaaggagcggcggctgcacgacaccatgctgcagcactacgtgctggacgagcggcggggcacccacggcctgaagtccctggccatgaagtacaccgacatgggcgactacgacttcgagctggacaagttcaaggacgactactgcaaggcccacaagatcaagaaggaggacttcacctacgacctgatccccttcgacatcatgtggccctacgccgccaaggacaccgacgccaccatccggctgcacaacttcttcctgcccaagatcgagaagaacgagaagctgtgctccctgtactacgacgtgctgatgcccggctgcgtgttcctgcagcgggtggaggaccggggcgtgcccatctccatcgaccggctgaaggaggcccagtaccagctgacccacaacctgaacaaggcccgggagaagctgtacacctaccccgaggtgaagcagctggagcaggaccagaacgaggccttcaaccccaactccgtgaagcagctgcgggtgctgctgttcgactacgtgggcctgacccccaccggcaagctgaccgacaccggcgccgactccaccgacgccgaggccctgaacgagctggccacccagcaccccatcgccaagaccctgctggagatccggaagctgaccaagctgatctccacctacgtggagaagatcctgctgtccatcgacgccgacggctgcatccggaccggcttccacgagcacatgaccacctccggccggctgtcctcctccggcaagctgaacctgcagcagctgccccgggacgagtccatcatcaagggctgcgtggtggccccccccggctaccgggtgatcgcctgggacctgaccaccgccgaggtgtactacgccgccgtgctgtccggcgaccggaacatgcagcaggtgttcatcaacatgcggaacgagcccgacaagtaccccgacttccactccaacatcgcccacatggtgttcaagctgcagtgcgagccccgggacgtgaagaagctgttccccgccctgcggcaggccgccaaggccatcaccttcggcatcctgtacggctccggccccgccaaggtggcccactccgtgaacgaggccctgctggagcaggccgccaagaccggcgagcccttcgtggagtgcaccgtggccgacgccaaggagtacatcgagacctacttcggccagttcccccagctgaagcggtggatcgacaagtgccacgaccagatcaagaaccacggcttcatctactcccacttcggccggaagcggcggctgcacaacatccactccgaggaccggggcgtgcagggcgaggagatccggtccggcttcaacgccatcatccagtccgcctcctccgactccctgctgctgggcgccgtggacgccgacaacgagatcatctccctgggcctggagcaggagatgaagatcgtgatgctggtgcacgactccgtggtggccatcgtgcgggaggacctgatcgaccagtacaacgagatcctgatccggaacatccagaaggaccggggcatctccatccccggctgccccatcggcatcgactccgactccgaggccggcggctcccgggactactcctgcggcaagatgaagaagcagcacccctccatcgcctgcatcgacgacgacgagtacacccggtacgtgaagggcgtgctgctggacgccgagttcgagtacaagaagctggccgccatggacaaggagcaccccgaccactccaagtacaaggacgacaagttcatcgccgtgtgcaaggacctggacaacgtgaagcggatcctgggcgccggcggcggctccggcaagcggaccgccgacggctccggcggcggctcccccaagaagaagcggaaggtgcccgccgccaagcgcgtgaagctggactagctagcaccagcctcaagaacacccgaatggagtctctaagctacataataccaacttacactttacaaaatgttgtcccccaaaatgtagccattcgtatctgctcctaataaaaagaaagtttcttcacattctctcgagaaaaaaaaaaaatggaaaaaaaaaaaacggaaaaaaaaaaaaggtaaaaaaaaaaaatataaaaaaaaaaaacataaaaaaaaaaaacgaaaaaaaaaaaacgtaaaaaaaaaaaactcaaaaaaaaaaaagataaaaaaaaaaaacctaaaaaaaaaaaatgtaaaaaaaaaaaagggaaaaaaaaaaaacgcaaaaaaaaaaaacacaaaaaaaaaaaatgcaaaaaaaaaaaatcgaaaaaaaaaaaatctaaaaaaaaaaaacgaaaaaaaaaaaacccaaaaaaaaaaaagacaaaaaaaaaaaatagaaaaaaaaaaagttaaaaaaaaaaaactgaaaaaaaaaaaatttaaaaaaaaaaaatctag

SEQ ID NO: 1952 - DNA, 4851 bp, synthetic construct
  misc_feature 1..4851: note = Synthetic
  source 1..4851: mol_type = other DNA
atgggcgtgaagatcatctcccgcaagtccctgggcacccagaacgtgtacgacatcggcgtggagaaggaccacaacttcctgctgaagaacggcctggtggcctccaactgcttcaactccggccagggcgactccctgcacgagcacatcgccaacctggccggctcccccgccatcaagaagggcatcctgcagaccgtgaaggtggtggacgagctggtgaaggtgatgggccggcacaagcccgagaacatcgtgatcgagatggcccgggagaaccagaccacccagaagggccagaagaactcccgggagcggatgaagcggatcgaggagggcatcaaggagctgggctcccagatcctgaaggagcaccccgtggagaacacccagctgcagaacgagaagctgtacctgtactacctgcagaacggccgggacatgtacgtggaccaggagctggacatcaaccggctgtccgactacgacgtggacgccatcgtgccccagtccttcctgaaggacgactccatcgacaacaaggtgctgacccggtccgacaagaaccggggcaagtccgacaacgtgccctccgaggaggtggtgaagaagatgaagaactactggcggcagctgctgaacgccaagctgatcacccagcggaagttcgacaacctgaccaaggccgagcggggcggcctgtccgagctggacaaggccggcttcatcaagcggcagctggtggagacccggcagatcaccaagcacgtggcccagatcctggactcccggatgaacaccaagtacgacgagaacgacaagctgatccgggaggtgaaggtgatcaccctgaagtccaagctggtgtccgacttccggaaggacttccagttctacaaggtgcgggagatcaacaactaccaccacgcccacgacgcctacctgaacgccgtggtgggcaccgccctgatcaagaagtaccccaagctggagtccgagttcgtgtacggcgactacaaggtgtacgacgtgcggaagatgatcgccaagtccgagcaggagatcggcaaggccaccgccaagtacttcttctactccaacatcatgaacttcttcaagaccgagatcaccctggccaacggcgagatccggaagcggcccctgatcgagaccaacggcgagaccggcgagatcgtgtgggacaagggccgggacttcgccaccgtgcggaaggtgctgtccatgccccaggtgaacatcgtgaagaagaccgaggtgcagaccggcggcttctccaaggagtccatcctgcccaagcggaactccgacaagctgatcgcccggaagaaggactgggaccccaagaagtacggcggcttcgactcccccaccgtggcctactccgtgctggtggtggccaaggtggagaagggcaagtccaagaagctgaagtccgtgaaggagctgctgggcatcaccatcatggagcggtcctccttcgagaagaaccccatcgacttcctggaggccaagggctacaaggaggtgaagaaggacctgatcatcaagctgcccaagtactccctgttcgagctggagaacggccggaagcggatgctggcctccgccggcgagctgcagaagggcaacgagctggccctgccctccaagtacgtgaacttcctgtacctggcctcccactacgagaagctgaagggctcccccgaggacaacgagcagaagcagctgttcgtggagcagcacaagcactacctggacgagatcatcgagcagatctccgagttctccaagcgggtgatcctggccgacgccaacctggacaaggtgctgtccgcctacaacaagcaccgggacaagcccatccgggagcaggccgagaacatcatccacctgttcaccctgaccaacctgggcgcccccgccgccttcaagtacttcgacaccaccatcgaccggaagcggtacacctccaccaaggaggtgctggacgccaccctgatccaccagtccatcaccggcctgtacgagacccggatcgacctgtcccagctgggcggcgactccggcggctcctccggcggctccaagcggaccgccgacggctccgagttcgagtcccccaagaagaagcggaaggtgtccggcggctcctccggcggctccatgaagatcgccgtggtggacaaggccctgaacaacacccggtacgacaagcacttccagctgtacggcgaggaggtggacgtgttccacatgtgcaacgagaagctgtccggccggctgctgaagaagcacatcaccatcggcacccccgagaaccccttcgaccccaacgactacgacttcgtgatcctggtgggcgccgagcccttcctgtacttcgccggcaagaagggcatcggcgactacaccggcaagcgggtggagtacaacggctacgccaactggatcgcctccatctcccccgcccagctgcacttcaagcccgagatgaagcccgtgttcgacgccaccgtggagaacatccacgacatcatcaacggccgggagaagatcgccaaggccggcgactaccggcccatcaccgaccccgacgaggccgaggagtacatcaagatggtgtacaacatggtgatcggccccgtggccttcgcctccgccacctccgccctgtactgccgggacggctacctgctgggcgtgtccatctcccaccaggagtaccagggcgtgtacatcgactccgactgcctgaccgaggtggccgtgtactacctgcagaagatcctggactccgagaaccacaccatcgtgttccacaacctgaagttcgacatgcacttctacaagtaccacctgggcctgaccttcgacaaggcccacaaggagcggcggctgcacgacaccatgctgcagcactacgtgctggacgagcggcggggcacccacggcctgaagtccctggccatgaagtacaccgacatgggcgactacgacttcgagctggacaagttcaaggacgactactgcaaggcccacaagatcaagaaggaggacttcacctacgacctgatccccttcgacatcatgtggccctacgccgccaaggacaccgacgccaccatccggctgcacaacttcttcctgcccaagatcgagaagaacgagaagctgtgctccctgtactacgacgtgctgatgcccggctgcgtgttcctgcagcgggtggaggaccggggcgtgcccatctccatcgaccggctgaaggaggcccagtaccagctgacccacaacctgaacaaggcccgggagaagctgtacacctaccccgaggtgaagcagctggagcaggaccagaacgaggccttcaaccccaactccgtgaagcagctgcgggtgctgctgttcgactacgtgggcctgacccccaccggcaagctgaccgacaccggcgccgactccaccgacgccgaggccctgaacgagctggccacccagcaccccatcgccaagaccctgctggagatccggaagctgaccaagctgatctccacctacgtggagaagatcctgctgtccatcgacgccgacggctgcatccggaccggcttccacgagcacatgaccacctccggccggctgtcctcctccggcaagctgaacctgcagcagctgccccgggacgagtccatcatcaagggctgcgtggtggccccccccggctaccgggtgatcgcctgggacctgaccaccgccgaggtgtactacgccgccgtgctgtccggcgaccggaacatgcagcaggtgttcatcaacatgcggaacgagcccgacaagtaccccgacttccactccaacatcgcccacatggtgttcaagctgcagtgcgagccccgggacgtgaagaagctgttccccgccctgcggcaggccgccaaggccatcaccttcggcatcctgtacggctccggccccgccaaggtggcccactccgtgaacgaggccctgctggagcaggccgccaagaccggcgagcccttcgtggagtgcaccgtggccgacgccaaggagtacatcgagacctacttcggccagttcccccagctgaagcggtggatcgacaagtgccacgaccagatcaagaaccacggcttcatctactcccacttcggccggaagcggcggctgcacaacatccactccgaggaccggggcgtgcagggcgaggagatccggtccggcttcaacgccatcatccagtccgcctcctccgactccctgctgctgggcgccgtggacgccgacaacgagatcatctccctgggcctggagcaggagatgaagatcgtgatgctggtgcacgactccgtggtggccatcgtgcgggaggacctgatcgaccagtacaacgagatcctgatccggaacatccagaaggaccggggcatctccatccccggctgccccatcggcatcgactccgactccgaggccggcggctcccgggactactcctgcggcaagatgaagaagcagcacccctccatcgcctgcatcgacgacgacgagtacacccggtacgtgaagggcgtgctgctggacgccgagttcgagtacaagaagctggccgccatggacaaggagcaccccgaccactccaagtacaaggacgacaagttcatcgccgtgtgcaaggacctggacaacgtgaagcggatcctgggcgccggcggcggctccggcaagcggaccgccgacggctccggcggcggctcccccaagaagaagcggaaggtgcccgccgccaagcgcgtgaagctggactag

SEQ ID NO: 1953 - protein, 1616 aa, synthetic construct
  REGION 1..1616: note = Synthetic
MGVKIISRKSLGTQNVYDIGVEKDHNFLLKNGLVASNCFNSGQGDSLHEHIANLAGSPAIKKGILQTVKVVDELVKVMGRHKPENIVIEMARENQTTQKGQKNSRERMKRIEEGIKELGSQILKEHPVENTQLQNEKLYLYYLQNGRDMYVDQELDINRLSDYDVDAIVPQSFLKDDSIDNKVLTRSDKNRGKSDNVPSEEVVKKMKNYWRQLLNAKLITQRKFDNLTKAERGGLSELDKAGFIKRQLVETRQITKHVAQILDSRMNTKYDENDKLIREVKVITLKSKLVSDFRKDFQFYKVREINNYHHAHDAYLNAVVGTALIKKYPKLESEFVYGDYKVYDVRKMIAKSEQEIGKATAKYFFYSNIMNFFKTEITLANGEIRKRPLIETNGETGEIVWDKGRDFATVRKVLSMPQVNIVKKTEVQTGGFSKESILPKRNSDKLIARKKDWDPKKYGGFDSPTVAYSVLVVAKVEKGKSKKLKSVKELLGITIMERSSFEKNPIDFLEAKGYKEVKKDLIIKLPKYSLFELENGRKRMLASAGELQKGNELALPSKYVNFLYLASHYEKLKGSPEDNEQKQLFVEQHKHYLDEIIEQISEFSKRVILADANLDKVLSAYNKHRDKPIREQAENIIHLFTLTNLGAPAAFKYFDTTIDRKRYTSTKEVLDATLIHQSITGLYETRIDLSQLGGDSGGSSGGSKRTADGSEFESPKKKRKVSGGSSGGSMKIAVVDKALNNTRYDKHFQLYGEEVDVFHMCNEKLSGRLLKKHITIGTPENPFDPNDYDFVILVGAEPFLYFAGKKGIGDYTGKRVEYNGYANWIASISPAQLHFKPEMKPVFDATVENIHDIINGREKIAKAGDYRPITDPDEAEEYIKMVYNMVIGPVAFASATSALYCRDGYLLGVSISHQEYQGVYIDSDCLTEVAVYYLQKILDSENHTIVFHNLKFDMHFYKYHLGLTFDKAHKERRLHDTMLQHYVLDERRGTHGLKSLAMKYTDMGDYDFELDKFKDDYCKAHKIKKEDFTYDLIPFDIMWPYAAKDTDATIRLHNFFLPKIEKNEKLCSLYYDVLMPGCVFLQRVEDRGVPISIDRLKEAQYQLTHNLNKAREKLYTYPEVKQLEQDQNEAFNPNSVKQLRVLLFDYVGLTPTGKLTDTGADSTDAEALNELATQHPIAKTLLEIRKLTKLISTYVEKILLSIDADGCIRTGFHEHMTTSGRLSSSGKLNLQQLPRDESIIKGCVVAPPGYRVIAWDLTTAEVYYAAVLSGDRNMQQVFINMRNEPDKYPDFHSNIAHMVFKLQCEPRDVKKLFPALRQAAKAITFGILYGSGPAKVAHSVNEALLEQAAKTGEPFVECTVADAKEYIETYFGQFPQLKRWIDKCHDQIKNHGFIYSHFGRKRRLHNIHSEDRGVQGEEIRSGFNAIIQSASSDSLLLGAVDADNEIISLGLEQEMKIVMLVHDSVVAIVREDLIDQYNEILIRNIQKDRGISIPGCPIGIDSDSEAGGSRDYSCGKMKKQHPSIACIDDDEYTRYVKGVLLDAEFEYKKLAAMDKEHPDHSKYKDDKFIAVCKDLDNVKRILGAGGGSGKRTADGSGGGSPKKKRKVPAAKRVKLD

SEQ ID NO: 1954 - RNA, 5579 nt, synthetic construct
  misc_feature 1..5579: note = Synthetic
  source 1..5579: mol_type = other RNA
aggactcactatttgttttcgcgcccagttgcaaaaagtgtcgaagctcagaataaacgctcaactttggccggatctgccaccatgggcgtgaagatcatctcccgcaagtccctgggcacccagaacgtgtacgacatcggcgtggagaaggaccacaacttcctgctgaagaacggcctggtggcctccaactgcttcaactccggccagggcgactccctgcacgagcacatcgccaacctggccggctcccccgccatcaagaagggcatcctgcagaccgtgaaggtggtggacgagctggtgaaggtgatgggccggcacaagcccgagaacatcgtgatcgagatggcccgggagaaccagaccacccagaagggccagaagaactcccgggagcggatgaagcggatcgaggagggcatcaaggagctgggctcccagatcctgaaggagcaccccgtggagaacacccagctgcagaacgagaagctgtacctgtactacctgcagaacggccgggacatgtacgtggaccaggagctggacatcaaccggctgtccgactacgacgtggacgccatcgtgccccagtccttcctgaaggacgactccatcgacaacaaggtgctgacccggtccgacaagaaccggggcaagtccgacaacgtgccctccgaggaggtggtgaagaagatgaagaactactggcggcagctgctgaacgccaagctgatcacccagcggaagttcgacaacctgaccaaggccgagcggggcggcctgtccgagctggacaaggccggcttcatcaagcggcagctggtggagacccggcagatcaccaagcacgtggcccagatcctggactcccggatgaacaccaagtacgacgagaacgacaagctgatccgggaggtgaaggtgatcaccctgaagtccaagctggtgtccgacttccggaaggacttccagttctacaaggtgcgggagatcaacaactaccaccacgcccacgacgcctacctgaacgccgtggtgggcaccgccctgatcaagaagtaccccaagctggagtccgagttcgtgtacggcgactacaaggtgtacgacgtgcggaagatgatcgccaagtccgagcaggagatcggcaaggccaccgccaagtacttcttctactccaacatcatgaacttcttcaagaccgagatcaccctggccaacggcgagatccggaagcggcccctgatcgagaccaacggcgagaccggcgagatcgtgtgggacaagggccgggacttcgccaccgtgcggaaggtgctgtccatgccccaggtgaacatcgtgaagaagaccgaggtgcagaccggcggcttctccaaggagtccatcctgcccaagcggaactccgacaagctgatcgcccggaagaaggactgggaccccaagaagtacggcggcttcgactcccccaccgtggcctactccgtgctggtggtggccaaggtggagaagggcaagtccaagaagctgaagtccgtgaaggagctgctgggcatcaccatcatggagcggtcctccttcgagaagaaccccatcgacttcctggaggccaagggctacaaggaggtgaagaaggacctgatcatcaagctgcccaagtactccctgttcgagctggagaacggccggaagcggatgctggcctccgccggcgagctgcagaagggcaacgagctggccctgccctccaagtacgtgaacttcctgtacctggcctcccactacgagaagctgaagggctcccccgaggacaacgagcagaagcagctgttcgtggagcagcacaagcactacctggacgagatcatcgagcagatctccgagttctccaagcgggtgatcctggccgacgccaacctggacaaggtgctgtccgcctacaacaagcaccgggacaagcccatccgggagcaggccgagaacatcatccacctgttcaccctgaccaacctgggcgcccccgccgccttcaagtacttcgacaccaccatcgaccggaagcggtacacctccaccaaggaggtgctggacgccaccctgatccaccagtccatcaccggcctgtacgagacccggatcgacctgtcccagctgggcggcgactccggcggctcctccggcggctccaagcggaccgccgacggctccgagttcgagtcccccaagaagaagcggaaggtgtccggcggctcctccggcggctccatgaagatcgccgtggtggacaaggccctgaacaacacccggtacgacaagcacttccagctgtacggcgaggaggtggacgtgttccacatgtgcaacgagaagctgtccggccggctgctgaagaagcacatcaccatcggcacccccgagaaccccttcgaccccaacgactacgacttcgtgatcctggtgggcgccgagcccttcctgtacttcgccggcaagaagggcatcggcgactacaccggcaagcgggtggagtacaacggctacgccaactggatcgcctccatctcccccgcccagctgcacttcaagcccgagatgaagcccgtgttcgacgccaccgtggagaacatccacgacatcatcaacggccgggagaagatcgccaaggccggcgactaccggcccatcaccgaccccgacgaggccgaggagtacatcaagatggtgtacaacatggtgatcggccccgtggccttcgcctccgccacctccgccctgtactgccgggacggctacctgctgggcgtgtccatctcccaccaggagtaccagggcgtgtacatcgactccgactgcctgaccgaggtggccgtgtactacctgcagaagatcctggactccgagaaccacaccatcgtgttccacaacctgaagttcgacatgcacttctacaagtaccacctgggcctgaccttcgacaaggcccacaaggagcggcggctgcacgacaccatgctgcagcactacgtgctggacgagcggcggggcacccacggcctgaagtccctggccatgaagtacaccgacatgggcgactacgacttcgagctggacaagttcaaggacgactactgcaaggcccacaagatcaagaaggaggacttcacctacgacctgatccccttcgacatcatgtggccctacgccgccaaggacaccgacgccaccatccggctgcacaacttcttcctgcccaagatcgagaagaacgagaagctgtgctccctgtactacgacgtgctgatgcccggctgcgtgttcctgcagcgggtggaggaccggggcgtgcccatctccatcgaccggctgaaggaggcccagtaccagctgacccacaacctgaacaaggcccgggagaagctgtacacctaccccgaggtgaagcagctggagcaggaccagaacgaggccttcaaccccaactccgtgaagcagctgcgggtgctgctgttcgactacgtgggcctgacccccaccggcaagctgaccgacaccggcgccgactccaccgacgccgaggccctgaacgagctggccacccagcaccccatcgccaagaccctgctggagatccggaagctgaccaagctgatctccacctacgtggagaagatcctgctgtccatcgacgccgacggctgcatccggaccggcttccacgagcacatgaccacctccggccggctgtcctcctccggcaagctgaacctgcagcagctgccccgggacgagtccatcatcaagggctgcgtggtggccccccccggctaccgggtgatcgcctgggacctgaccaccgccgaggtgtactacgccgccgtgctgtccggcgaccggaacatgcagcaggtgttcatcaacatgcggaacgagcccgacaagtaccccgacttccactccaacatcgcccacatggtgttcaagctgcagtgcgagccccgggacgtgaagaagctgttccccgccctgcggcaggccgccaaggccatcaccttcggcatcctgtacggctccggccccgccaaggtggcccactccgtgaacgaggccctgctggagcaggccgccaagaccggcgagcccttcgtggagtgcaccgtggccgacgccaaggagtacatcgagacctacttcggccagttcccccagctgaagcggtggatcgacaagtgccacgaccagatcaagaaccacggcttcatctactcccacttcggccggaagcggcggctgcacaacatccactccgaggaccggggcgtgcagggcgaggagatccggtccggcttcaacgccatcatccagtccgcctcctccgactccctgctgctgggcgccgtggacgccgacaacgagatcatctccctgggcctggagcaggagatgaagatcgtgatgctggtgcacgactccgtggtggccatcgtgcgggaggacctgatcgaccagtacaacgagatcctgatccggaacatccagaaggaccggggcatctccatccccggctgccccatcggcatcgactccgactccgaggccggcggctcccgggactactcctgcggcaagatgaagaagcagcacccctccatcgcctgcatcgacgacgacgagtacacccggtacgtgaagggcgtgctgctggacgccgagttcgagtacaagaagctggccgccatggacaaggagcaccccgaccactccaagtacaaggacgacaagttcatcgccgtgtgcaaggacctggacaacgtgaagcggatcctgggcgccggcggcggctccggcaagcggaccgccgacggctccggcggcggctcccccaagaagaagcggaaggtgcccgccgccaagcgcgtgaagctggactccggctccgagacccccggcacctccgagtccgccacccccgagtccatcgccgccctggagaaggagatcgccgccctggagaaggagaacgccgccctggagtgggagatcgccgccctggagaagtagctagcaccagcctcaagaacacccgaatggagtctctaagctacataataccaacttacactttacaaaatgttgtcccccaaaatgtagccattcgtatctgctcctaataaaaagaaagtttcttcacattctctcgagaaaaaaaaaaaatggaaaaaaaaaaaacggaaaaaaaaaaaaggtaaaaaaaaaaaatataaaaaaaaaaaacataaaaaaaaaaaacgaaaaaaaaaaaacgtaaaaaaaaaaaactcaaaaaaaaaaaagataaaaaaaaaaaacctaaaaaaaaaaaatgtaaaaaaaaaaaagggaaaaaaaaaaaacgcaaaaaaaaaaaacacaaaaaaaaaaaatgcaaaaaaaaaaaatcgaaaaaaaaaaaatctaaaaaaaaaaaacgaaaaaaaaaaaacccaaaaaaaaaaaagacaaaaaaaaaaaatagaaaaaaaaaaagttaaaaaaaaaaaactgaaaaaaaaaaaatttaaaaaaaaaaaatctag

SEQ ID NO: 1955 - DNA, 4980 bp, synthetic construct
  misc_feature 1..4980: note = Synthetic
  source 1..4980: mol_type = other DNA
atgggcgtgaagatcatctcccgcaagtccctgggcacccagaacgtgtacgacatcggcgtggagaaggaccacaacttcctgctgaagaacggcctggtggcctccaactgcttcaactccggccagggcgactccctgcacgagcacatcgccaacctggccggctcccccgccatcaagaagggcatcctgcagaccgtgaaggtggtggacgagctggtgaaggtgatgggccggcacaagcccgagaacatcgtgatcgagatggcccgggagaaccagaccacccagaagggccagaagaactcccgggagcggatgaagcggatcgaggagggcatcaaggagctgggctcccagatcctgaaggagcaccccgtggagaacacccagctgcagaacgagaagctgtacctgtactacctgcagaacggccgggacatgtacgtggaccaggagctggacatcaaccggctgtccgactacgacgtggacgccatcgtgccccagtccttcctgaaggacgactccatcgacaacaaggtgctgacccggtccgacaagaaccggggcaagtccgacaacgtgccctccgaggaggtggtgaagaagatgaagaactactggcggcagctgctgaacgccaagctgatcacccagcggaagttcgacaacctgaccaaggccgagcggggcggcctgtccgagctggacaaggccggcttcatcaagcggcagctggtggagacccggcagatcaccaagcacgtggcccagatcctggactcccggatgaacaccaagtacgacgagaacgacaagctgatccgggaggtgaaggtgatcaccctgaagtccaagctggtgtccgacttccggaaggacttccagttctacaaggtgcgggagatcaacaactaccaccacgcccacgacgcctacctgaacgccgtggtgggcaccgccctgatcaagaagtaccccaagctggagtccgagttcgtgtacggcgactacaaggtgtacgacgtgcggaagatgatcgccaagtccgagcaggagatcggcaaggccaccgccaagtacttcttctactccaacatcatgaacttcttcaagaccgagatcaccctggccaacggcgagatccggaagcggcccctgatcgagaccaacggcgagaccggcgagatcgtgtgggacaagggccgggacttcgccaccgtgcggaaggtgctgtccatgccccaggtgaacatcgtgaagaagaccgaggtgcagaccggcggcttctccaaggagtccatcctgcccaagcggaactccgacaagctgatcgcccggaagaaggactgggaccccaagaagtacggcggcttcgactcccccaccgtggcctactccgtgctggtggtggccaaggtggagaagggcaagtccaagaagctgaagtccgtgaaggagctgctgggcatcaccatcatggagcggtcctccttcgagaagaaccccatcgacttcctggaggccaagggctacaaggaggtgaagaaggacctgatcatcaagctgcccaagtactccctgttcgagctggagaacggccggaagcggatgctggcctccgccggcgagctgcagaagggcaacgagctggccctgccctccaagtacgtgaacttcctgtacctggcctcccactacgagaagctgaagggctcccccgaggacaacgagcagaagcagctgttcgtggagcagcacaagcactacctggacgagatcatcgagcagatctccgagttctccaagcgggtgatcctggccgacgccaacctggacaaggtgctgtccgcctacaacaagcaccgggacaagcccatccgggagcaggccgagaacatcatccacctgttcaccctgaccaacctgggcgcccccgccgccttcaagtacttcgacaccaccatcgaccggaagcggtacacctccaccaaggaggtgctggacgccaccctgatccaccagtccatcaccggcctgtacgagacccggatcgacctgtcccagctgggcggcgactccggcggctcctccggcggctccaagcggaccgccgacggctccgagttcgagtcccccaagaagaagcggaaggtgtccggcggctcctccggcggctccatgaagatcgccgtggtggacaaggccctgaacaacacccggtacgacaagcacttccagctgtacggcgaggaggtggacgtgttccacatgtgcaacgagaagctgtccggccggctgctgaagaagcacatcaccatcggcacccccgagaaccccttcgaccccaacgactacgacttcgtgatcctggtgggcgccgagcccttcctgtacttcgccggcaagaagggcatcggcgactacaccggcaagcgggtggagtacaacggctacgccaactggatcgcctccatctcccccgcccagctgcacttcaagcccgagatgaagcccgtgttcgacgccaccgtggagaacatccacgacatcatcaacggccgggagaagatcgccaaggccggcgactaccggcccatcaccgaccccgacgaggccgaggagtacatcaagatggtgtacaacatggtgatcggccccgtggccttcgcctccgccacctccgccctgtactgccgggacggctacctgctgggcgtgtccatctcccaccaggagtaccagggcgtgtacatcgactccgactgcctgaccgaggtggccgtgtactacctgcagaagatcctggactccgagaaccacaccatcgtgttccacaacctgaagttcgacatgcacttctacaagtaccacctgggcctgaccttcgacaaggcccacaaggagcggcggctgcacgacaccatgctgcagcactacgtgctggacgagcggcggggcacccacggcctgaagtccctggccatgaagtacaccgacatgggcgactacgacttcgagctggacaagttcaaggacgactactgcaaggcccacaagatcaagaaggaggacttcacctacgacctgatccccttcgacatcatgtggccctacgccgccaaggacaccgacgccaccatccggctgcacaacttcttcctgcccaagatcgagaagaacgagaagctgtgctccctgtactacgacgtgctgatgcccggctgcgtgttcctgcagcgggtggaggaccggggcgtgcccatctccatcgaccggctgaaggaggcccagtaccagctgacccacaacctgaacaaggcccgggagaagctgtacacctaccccgaggtgaagcagctggagcaggaccagaacgaggccttcaaccccaactccgtgaagcagctgcgggtgctgctgttcgactacgtgggcctgacccccaccggcaagctgaccgacaccggcgccgactccaccgacgccgaggccctgaacgagctggccacccagcaccccatcgccaagaccctgctggagatccggaagctgaccaagctgatctccacctacgtggagaagatcctgctgtccatcgacgccgacggctgcatccggaccggcttccacgagcacatgaccacctccggccggctgtcctcctccggcaagctgaacctgcagcagctgccccgggacgagtccatcatcaagggctgcgtggtggccccccccggctaccgggtgatcgcctgggacctgaccaccgccgaggtgtactacgccgccgtgctgtccggcgaccggaacatgcagcaggtgttcatcaacatgcggaacgagcccgacaagtaccccgacttccactccaacatcgcccacatggtgttcaagctgcagtgcgagccccgggacgtgaagaagctgttccccgccctgcggcaggccgccaaggccatcaccttcggcatcctgtacggctccggccccgccaaggtggcccactccgtgaacgaggccctgctggagcaggccgccaagaccggcgagcccttcgtggagtgcaccgtggccgacgccaaggagtacatcgagacctacttcggccagttcccccagctgaagcggtggatcgacaagtgccacgaccagatcaagaaccacggcttcatctactcccacttcggccggaagcggcggctgcacaacatccactccgaggaccggggcgtgcagggcgaggagatccggtccggcttcaacgccatcatccagtccgcctcctccgactccctgctgctgggcgccgtggacgccgacaacgagatcatctccctgggcctggagcaggagatgaagatcgtgatgctggtgcacgactccgtggtggccatcgtgcgggaggacctgatcgaccagtacaacgagatcctgatccggaacatccagaaggaccggggcatctccatccccggctgccccatcggcatcgactccgactccgaggccggcggctcccgggactactcctgcggcaagatgaagaagcagcacccctccatcgcctgcatcgacgacgacgagtacacccggtacgtgaagggcgtgctgctggacgccgagttcgagtacaagaagctggccgccatggacaaggagcaccccgaccactccaagtacaaggacgacaagttcatcgccgtgtgcaaggacctggacaacgtgaagcggatcctgggcgccggcggcggctccggcaagcggaccgccgacggctccggcggcggctcccccaagaagaagcggaaggtgcccgccgccaagcgcgtgaagctggactccggctccgagacccccggcacctccgagtccgccacccccgagtccatcgccgccctggagaaggagatcgccgccctggagaaggagaacgccgccctggagtgggagatcgccgccctggagaagtag

SEQ ID NO: 1956 - protein, 1659 aa, synthetic construct
  REGION 1..1659: note = Synthetic
MGVKIISRKSLGTQNVYDIGVEKDHNFLLKNGLVASNCFNSGQGDSLHEHIANLAGSPAIKKGILQTVKVVDELVKVMGRHKPENIVIEMARENQTTQKGQKNSRERMKRIEEGIKELGSQILKEHPVENTQLQNEKLYLYYLQNGRDMYVDQELDINRLSDYDVDAIVPQSFLKDDSIDNKVLTRSDKNRGKSDNVPSEEVVKKMKNYWRQLLNAKLITQRKFDNLTKAERGGLSELDKAGFIKRQLVETRQITKHVAQILDSRMNTKYDENDKLIREVKVITLKSKLVSDFRKDFQFYKVREINNYHHAHDAYLNAVVGTALIKKYPKLESEFVYGDYKVYDVRKMIAKSEQEIGKATAKYFFYSNIMNFFKTEITLANGEIRKRPLIETNGETGEIVWDKGRDFATVRKVLSMPQVNIVKKTEVQTGGFSKESILPKRNSDKLIARKKDWDPKKYGGFDSPTVAYSVLVVAKVEKGKSKKLKSVKELLGITIMERSSFEKNPIDFLEAKGYKEVKKDLIIKLPKYSLFELENGRKRMLASAGELQKGNELALPSKYVNFLYLASHYEKLKGSPEDNEQKQLFVEQHKHYLDEIIEQISEFSKRVILADANLDKVLSAYNKHRDKPIREQAENIIHLFTLTNLGAPAAFKYFDTTIDRKRYTSTKEVLDATLIHQSITGLYETRIDLSQLGGDSGGSSGGSKRTADGSEFESPKKKRKVSGGSSGGSMKIAVVDKALNNTRYDKHFQLYGEEVDVFHMCNEKLSGRLLKKHITIGTPENPFDPNDYDFVILVGAEPFLYFAGKKGIGDYTGKRVEYNGYANWIASISPAQLHFKPEMKPVFDATVENIHDIINGREKIAKAGDYRPITDPDEAEEYIKMVYNMVIGPVAFASATSALYCRDGYLLGVSISHQEYQGVYIDSDCLTEVAVYYLQKILDSENHTIVFHNLKFDMHFYKYHLGLTFDKAHKERRLHDTMLQHYVLDERRGTHGLKSLAMKYTDMGDYDFELDKFKDDYCKAHKIKKEDFTYDLIPFDIMWPYAAKDTDATIRLHNFFLPKIEKNEKLCSLYYDVLMPGCVFLQRVEDRGVPISIDRLKEAQYQLTHNLNKAREKLYTYPEVKQLEQDQNEAFNPNSVKQLRVLLFDYVGLTPTGKLTDTGADSTDAEALNELATQHPIAKTLLEIRKLTKLISTYVEKILLSIDADGCIRTGFHEHMTTSGRLSSSGKLNLQQLPRDESIIKGCVVAPPGYRVIAWDLTTAEVYYAAVLSGDRNMQQVFINMRNEPDKYPDFHSNIAHMVFKLQCEPRDVKKLFPALRQAAKAITFGILYGSGPAKVAHSVNEALLEQAAKTGEPFVECTVADAKEYIETYFGQFPQLKRWIDKCHDQIKNHGFIYSHFGRKRRLHNIHSEDRGVQGEEIRSGFNAIIQSASSDSLLLGAVDADNEIISLGLEQEMKIVMLVHDSVVAIVREDLIDQYNEILIRNIQKDRGISIPGCPIGIDSDSEAGGSRDYSCGKMKKQHPSIACIDDDEYTRYVKGVLLDAEFEYKKLAAMDKEHPDHSKYKDDKFIAVCKDLDNVKRILGAGGGSGKRTADGSGGGSPKKKRKVPAAKRVKLDSGSETPGTSESATPESIAALEKEIAALEKENAALEWEIAALEK

SEQ ID NO: 1957 - DNA, 3473 bp, synthetic construct
  misc_feature 1..3473: note = Synthetic
  source 1..3473: mol_type = other DNA
aggactcactatttgttttcgcgcccagttgcaaaaagtgtcgaagctcagaataaacgctcaactttggccggatctgccaccatgggcgtgaagatcatctcccgcaagtccctgggcacccagaacgtgtacgacatcggcgtggagaaggaccacaacttcctgctgaagaacggcctggtggcctccaactgcttcaactccggcggctccaagcggaccgccgacggctccgagttcgagtcccccaagaagaagcggaaggtgtccggcggctcctccggcggctccatgaagatcgccgtggtggacaaggccctgaacaacacccggtacgacaagcacttccagctgtacggcgaggaggtggacgtgttccacatgtgcaacgagaagctgtccggccggctgctgaagaagcacatcaccatcggcacccccgagaaccccttcgaccccaacgactacgacttcgtgatcctggtgggcgccgagcccttcctgtacttcgccggcaagaagggcatcggcgactacaccggcaagcgggtggagtacaacggctacgccaactggatcgcctccatctcccccgcccagctgcacttcaagcccgagatgaagcccgtgttcgacgccaccgtggagaacatccacgacatcatcaacggccgggagaagatcgccaaggccggcgactaccggcccatcaccgaccccgacgaggccgaggagtacatcaagatggtgtacaacatggtgatcggccccgtggccttcgcctccgccacctccgccctgtactgccgggacggctacctgctgggcgtgtccatctcccaccaggagtaccagggcgtgtacatcgactccgactgcctgaccgaggtggccgtgtactacctgcagaagatcctggactccgagaaccacaccatcgtgttccacaacctgaagttcgacatgcacttctacaagtaccacctgggcctgaccttcgacaaggcccacaaggagcggcggctgcacgacaccatgctgcagcactacgtgctggacgagcggcggggcacccacggcctgaagtccctggccatgaagtacaccgacatgggcgactacgacttcgagctggacaagttcaaggacgactactgcaaggcccacaagatcaagaaggaggacttcacctacgacctgatccccttcgacatcatgtggccctacgccgccaaggacaccgacgccaccatccggctgcacaacttcttcctgcccaagatcgagaagaacgagaagctgtgctccctgtactacgacgtgctgatgcccggctgcgtgttcctgcagcgggtggaggaccggggcgtgcccatctccatcgaccggctgaaggaggcccagtaccagctgacccacaacctgaacaaggcccgggagaagctgtacacctaccccgaggtgaagcagctggagcaggaccagaacgaggccttcaaccccaactccgtgaagcagctgcgggtgctgctgttcgactacgtgggcctgacccccaccggcaagctgaccgacaccggcgccgactccaccgacgccgaggccctgaacgagctggccacccagcaccccatcgccaagaccctgctggagatccggaagctgaccaagctgatctccacctacgtggagaagatcctgctgtccatcgacgccgacggctgcatccggaccggcttccacgagcacatgaccacctccggccggctgtcctcctccggcaagctgaacctgcagcagctgccccgggacgagtccatcatcaagggctgcgtggtggccccccccggctaccgggtgatcgcctgggacctgaccaccgccgaggtgtactacgccgccgtgctgtccggcgaccggaacatgcagcaggtgttcatcaacatgcggaacgagcccgacaagtaccccgacttccactccaacatcgcccacatggtgttcaagctgcagtgcgagccccgggacgtgaagaagctgttccccgccctgcggcaggccgccaaggccatcaccttcggcatcctgtacggctccggccccgccaaggtggcccactccgtgaacgaggccctgctggagcaggccgccaagaccggcgagcccttcgtggagtgcaccgtggccgacgccaaggagtacatcgagacctacttcggccagttcccccagctgaagcggtggatcgacaagtgccacgaccagatcaagaaccacggcttcatctactcccacttcggccggaagcggcggctgcacaacatccactccgaggaccggggcgtgcagggcgaggagatccggtccggcttcaacgccatcatccagtccgcctcctccgactccctgctgctgggcgccgtggacgccgacaacgagatcatctccctgggcctggagcaggagatgaagatcgtgatgctggtgcacgactccgtggtggccatcgtgcgggaggacctgatcgaccagtacaacgagatcctgatccggaacatccagaaggaccggggcatctccatccccggctgccccatcggcatcgactccgactccgaggccggcggctcccgggactactcctgcggcaagatgaagaagcagcacccctccatcgcctgcatcgacgacgacgagtacacccggtacgtgaagggcgtgctgctggacgccgagttcgagtacaagaagctggccgccatggacaaggagcaccccgaccactccaagtacaaggacgacaagttcatcgccgtgtgcaaggacctggacaacgtgaagcggatcctgggcgccggcggcggctccggcaagcggaccgccgacggctccggcggcggctcccccaagaagaagcggaaggtgcccgccgccaagcgcgtgaagctggactagctagcaccagcctcaagaacacccgaatggagtctctaagctacataataccaacttacactttacaaaatgttgtcccccaaaatgtagccattcgtatctgctcctaataaaaagaaagtttcttcacattctctcgagaaaaaaaaaaaatggaaaaaaaaaaaacggaaaaaaaaaaaaggtaaaaaaaaaaaatataaaaaaaaaaaacataaaaaaaaaaaacgaaaaaaaaaaaacgtaaaaaaaaaaaactcaaaaaaaaaaaagataaaaaaaaaaaacctaaaaaaaaaaaatgtaaaaaaaaaaaagggaaaaaaaaaaaacgcaaaaaaaaaaaacacaaaaaaaaaaaatgcaaaaaaaaaaaatcgaaaaaaaaaaaatctaaaaaaaaaaaacgaaaaaaaaaaaacccaaaaaaaaaaaagacaaaaaaaaaaaatagaaaaaaaaaaagttaaaaaaaaaaaactgaaaaaaaaaaaatttaaaaaaaaaaaatctag

SEQ ID NO: 1958 - DNA, 2874 bp, synthetic construct
  misc_feature 1..2874: note = Synthetic
  source 1..2874: mol_type = other DNA
atgggcgtgaagatcatctcccgcaagtccctgggcacccagaacgtgtacgacatcggcgtggagaaggaccacaacttcctgctgaagaacggcctggtggcctccaactgcttcaactccggcggctccaagcggaccgccgacggctccgagttcgagtcccccaagaagaagcggaaggtgtccggcggctcctccggcggctccatgaagatcgccgtggtggacaaggccctgaacaacacccggtacgacaagcacttccagctgtacggcgaggaggtggacgtgttccacatgtgcaacgagaagctgtccggccggctgctgaagaagcacatcaccatcggcacccccgagaaccccttcgaccccaacgactacgacttcgtgatcctggtgggcgccgagcccttcctgtacttcgccggcaagaagggcatcggcgactacaccggcaagcgggtggagtacaacggctacgccaactggatcgcctccatctcccccgcccagctgcacttcaagcccgagatgaagcccgtgttcgacgccaccgtggagaacatccacgacatcatcaacggccgggagaagatcgccaaggccggcgactaccggcccatcaccgaccccgacgaggccgaggagtacatcaagatggtgtacaacatggtgatcggccccgtggccttcgcctccgccacctccgccctgtactgccgggacggctacctgctgggcgtgtccatctcccaccaggagtaccagggcgtgtacatcgactccgactgcctgaccgaggtggccgtgtactacctgcagaagatcctggactccgagaaccacaccatcgtgttccacaacctgaagttcgacatgcacttctacaagtaccacctgggcctgaccttcgacaaggcccacaaggagcggcggctgcacgacaccatgctgcagcactacgtgctggacgagcggcggggcacccacggcctgaagtccctggccatgaagtacaccgacatgggcgactacgacttcgagctggacaagttcaaggacgactactgcaaggcccacaagatcaagaaggaggacttcacctacgacctgatccccttcgacatcatgtggccctacgccgccaaggacaccgacgccaccatccggctgcacaacttcttcctgcccaagatcgagaagaacgagaagctgtgctccctgtactacgacgtgctgatgcccggctgcgtgttcctgcagcgggtggaggaccggggcgtgcccatctccatcgaccggctgaaggaggcccagtaccagctgacccacaacctgaacaaggcccgggagaagctgtacacctaccccgaggtgaagcagctggagcaggaccagaacgaggccttcaaccccaactccgtgaagcagctgcgggtgctgctgttcgactacgtgggcctgacccccaccggcaagctgaccgacaccggcgccgactccaccgacgccgaggccctgaacgagctggccacccagcaccccatcgccaagaccctgctggagatccggaagctgaccaagctgatctccacctacgtggagaagatcctgctgtccatcgacgccgacggctgcatccggaccggcttccacgagcacatgaccacctccggccggctgtcctcctccggcaagctgaacctgcagcagctgccccgggacgagtccatcatcaagggctgcgtggtggccccccccggctaccgggtgatcgcctgggacctgaccaccgccgaggtgtactacgccgccgtgctgtccggcgaccggaacatgcagcaggtgttcatcaacatgcggaacgagcccgacaagtaccccgacttccactccaacatcgcccacatggtgttcaagctgcagtgcgagccccgggacgtgaagaagctgttccccgccctgcggcaggccgccaaggccatcaccttcggcatcctgtacggctccggccccgccaaggtggcccactccgtgaacgaggccctgctggagcaggccgccaagaccggcgagcccttcgtggagtgcaccgtggccgacgccaaggagtacatcgagacctacttcggccagttcccccagctgaagcggtggatcgacaagtgccacgaccagatcaagaaccacggcttcatctactcccacttcggccggaagcggcggctgcacaacatccactccgaggaccggggcgtgcagggcgaggagatccggtccggcttcaacgccatcatccagtccgcctcctccgactccctgctgctgggcgccgtggacgccgacaacgagatcatctccctgggcctggagcaggagatgaagatcgtgatgctggtgcacgactccgtggtggccatcgtgcgggaggacctgatcgaccagtacaacgagatcctgatccggaacatccagaaggaccggggcatctccatccccggctgccccatcggcatcgactccgactccgaggccggcggctcccgggactactcctgcggcaagatgaagaagcagcacccctccatcgcctgcatcgacgacgacgagtacacccggtacgtgaagggcgtgctgctggacgccgagttcgagtacaagaagctggccgccatggacaaggagcaccccgaccactccaagtacaaggacgacaagttcatcgccgtgtgcaaggacctggacaacgtgaagcggatcctgggcgccggcggcggctccggcaagcggaccgccgacggctccggcggcggctcccccaagaagaagcggaaggtgcccgccgccaagcgcgtgaagctggactag

SEQ ID NO: 1959 - protein, 957 aa, synthetic construct
  REGION 1..957: note = Synthetic
MGVKIISRKSLGTQNVYDIGVEKDHNFLLKNGLVASNCFNSGGSKRTADGSEFESPKKKRKVSGGSSGGSMKIAVVDKALNNTRYDKHFQLYGEEVDVFHMCNEKLSGRLLKKHITIGTPENPFDPNDYDFVILVGAEPFLYFAGKKGIGDYTGKRVEYNGYANWIASISPAQLHFKPEMKPVFDATVENIHDIINGREKIAKAGDYRPITDPDEAEEYIKMVYNMVIGPVAFASATSALYCRDGYLLGVSISHQEYQGVYIDSDCLTEVAVYYLQKILDSENHTIVFHNLKFDMHFYKYHLGLTFDKAHKERRLHDTMLQHYVLDERRGTHGLKSLAMKYTDMGDYDFELDKFKDDYCKAHKIKKEDFTYDLIPFDIMWPYAAKDTDATIRLHNFFLPKIEKNEKLCSLYYDVLMPGCVFLQRVEDRGVPISIDRLKEAQYQLTHNLNKAREKLYTYPEVKQLEQDQNEAFNPNSVKQLRVLLFDYVGLTPTGKLTDTGADSTDAEALNELATQHPIAKTLLEIRKLTKLISTYVEKILLSIDADGCIRTGFHEHMTTSGRLSSSGKLNLQQLPRDESIIKGCVVAPPGYRVIAWDLTTAEVYYAAVLSGDRNMQQVFINMRNEPDKYPDFHSNIAHMVFKLQCEPRDVKKLFPALRQAAKAITFGILYGSGPAKVAHSVNEALLEQAAKTGEPFVECTVADAKEYIETYFGQFPQLKRWIDKCHDQIKNHGFIYSHFGRKRRLHNIHSEDRGVQGEEIRSGFNAIIQSASSDSLLLGAVDADNEIISLGLEQEMKIVMLVHDSVVAIVREDLIDQYNEILIRNIQKDRGISIPGCPIGIDSDSEAGGSRDYSCGKMKKQHPSIACIDDDEYTRYVKGVLLDAEFEYKKLAAMDKEHPDHSKYKDDKFIAVCKDLDNVKRILGAGGGSGKRTADGSGGGSPKKKRKVPAAKRVKLD

SEQ ID NO: 1960-2500 - skipped (541 entries)

SEQ ID NO: 2501 - DNA, 7579 bp, synthetic construct
  misc_feature 1..7579: note = Synthetic
  source 1..7579: mol_type = other DNA
gggaagctcagaataaacgctcaactttggccggatctgccaccatgaagcggcccgccgccaccaagaaggccggccaggccaagaagaagaaggacaagaagtactccatcggcctggacatcggcaccaactccgtgggctgggccgtgatcaccgacgagtacaaggtgccctccaagaagttcaaggtgctgggcaacaccgaccggcactccatcaagaagaacctgatcggcgccctgctgttcgactccggcgagaccgccgaggccacccggctgaagcggaccgcccggcggcggtacacccggcggaagaaccggatctgctacctgcaggagatcttctccaacgagatggccaaggtggacgactccttcttccaccggctggaggagtccttcctggtggaggaggacaagaagcacgagcggcaccccatcttcggcaacatcgtggacgaggtggcctaccacgagaagtaccccaccatctaccacctgcggaagaagctggtggactccaccgacaaggccgacctgcggctgatctacctggccctggcccacatgatcaagttccggggccacttcctgatcgagggcgacctgaaccccgacaactccgacgtggacaagctgttcatccagctggtgcagacctacaaccagctgttcgaggagaaccccatcaacgcctccggcgtggacgccaaggccatcctgtccgcccggctgtccaagtcccggcggctggagaacctgatcgcccagctgcccggcgagaagaagaacggcctgttcggcaacctgatcgccctgtccctgggcctgacccccaacttcaagtccaacttcgacctggccgaggacgccaagctgcagctgtccaaggacacctacgacgacgacctggacaacctgctggcccagatcggcgaccagtacgccgacctgttcctggccgccaagaacctgtccgacgccatcctgctgtccgacatcctgcgggtgaacaccgagatcaccaaggcccccctgtccgcctccatgatcaagcggtacgacgagcaccaccaggacctgaccctgctgaaggccctggtgcggcagcagctgcccgagaagtacaaggagatcttcttcgaccagtccaagaacggctacgccggctacatcgacggcggcgcctcccaggaggagttctacaagttcatcaagcccatcctggagaagatggacggcaccgaggagctgctggtgaagctgaaccgggaggacctgctgcggaagcagcggaccttcgacaacggctccatcccccaccagatccacctgggcgagctgcacgccatcctgcggcggcaggaggacttctaccccttcctgaaggacaaccgggagaagatcgagaagatcctgaccttccggatcccctactacgtgggccccctggcccggggcaactcccggttcgcctggatgacccggaagtccgaggagaccatcaccccctggaacttcgaggaggtggtggacaagggcgcctccgcccagtccttcatcgagcggatgaccaacttcgacaagaacctgcccaacgagaaggtgctgcccaagcactccctgctgtacgagtacttcaccgtgtacaacgagctgaccaaggtgaagtacgtgaccgagggcatgcggaagcccgccttcctgtccggcgagcagaagaaggccatcgtggacctgctgttcaagaccaaccggaaggtgaccgtgaagcagctgaaggaggactacttcaagaagatcgagtgcttcgactccgtggagatctccggcgtggaggaccggttcaacgcctccctgggcacctaccacgacctgctgaagatcatcaaggacaaggacttcctggacaacgaggagaacgaggacatcctggaggacatcgtgctgaccctgaccctgttcgaggaccgggagatgatcgaggagcggctgaagacctacgcccacctgttcgacgacaaggtgatgaagcagctgaagcggcggcggtacaccggctggggccggctgtcccggaagctgatcaacggcatccgggacaagcagtccggcaagaccatcctggacttcctgaagtccgacggcttcgccaaccggaacttcatgcagctgatccacgacgactccctgaccttcaaggaggacatccagaaggcccaggtgtccggccagggcgactccctgcacgagcacatcgccaacctggccggctcccccgccatcaagaagggcatcctgcagaccgtgaaggtggtggacgagctggtgaaggtgatgggccggcacaagcccgagaacatcgtgatcgagatggcccgggagaaccagaccacccagaagggccagaagaactcccgggagcggatgaagcggatcgaggagggcatcaaggagctgggctcccagatcctgaaggagcaccccgtggagaacacccagctgcagaacgagaagctgtacctgtactacctgcagaacggccgggacatgtacgtggaccaggagctggacatcaaccggctgtccgactacgacgtggacgccatcgtgccccagtccttcctgaaggacgactccatcgacaacaaggtgctgacccggtccgacaagaaccggggcaagtccgacaacgtgccctccgaggaggtggtgaagaagatgaagaactactggcggcagctgctgaacgccaagctgatcacccagcggaagttcgacaacctgaccaaggccgagcggggcggcctgtccgagctggacaaggccggcttcatcaagcggcagctggtggagacccggcagatcaccaagcacgtggcccagatcctggactcccggatgaacaccaagtacgacgagaacgacaagctgatccgggaggtgaaggtgatcaccctgaagtccaagctggtgtccgacttccggaaggacttccagttctacaaggtgcgggagatcaacaactaccaccacgcccacgacgcctacctgaacgccgtggtgggcaccgccctgatcaagaagtaccccaagctggagtccgagttcgtgtacggcgactacaaggtgtacgacgtgcggaagatgatcgccaagtccgagcaggagatcggcaaggccaccgccaagtacttcttctactccaacatcatgaacttcttcaagaccgagatcaccctggccaacggcgagatccggaagcggcccctgatcgagaccaacggcgagaccggcgagatcgtgtgggacaagggccgggacttcgccaccgtgcggaaggtgctgtccatgccccaggtgaacatcgtgaagaagaccgaggtgcagaccggcggcttctccaaggagtccatcctgcccaagcggaactccgacaagctgatcgcccggaagaaggactgggaccccaagaagtacggcggcttcgactcccccaccgtggcctactccgtgctggtggtggccaaggtggagaagggcaagtccaagaagctgaagtccgtgaaggagctgctgggcatcaccatcatggagcggtcctccttcgagaagaaccccatcgacttcctggaggccaagggctacaaggaggtgaagaaggacctgatcatcaagctgcccaagtactccctgttcgagctggagaacggccggaagcggatgctggcctccgccggcgagctgcagaagggcaacgagctggccctgccctccaagtacgtgaacttcctgtacctggcctcccactacgagaagctgaagggctcccccgaggacaacgagcagaagcagctgttcgtggagcagcacaagcactacctggacgagatcatcgagcagatctccgagttctccaagcgggtgatcctggccgacgccaacctggacaaggtgctgtccgcctacaacaagcaccgggacaagcccatccgggagcaggccgagaacatcatccacctgttcaccctgaccaacctgggcgcccccgccgccttcaagtacttcgacaccaccatcgaccggaagcggtacacctccaccaaggaggtgctggacgccaccctgatccaccagtccatcaccggcctgtacgagacccggatcgacctgtcccagctgggcggcgacggcgcccccgagtccgccaccgagtccggcggcacctccaccgagtccgagggctccgccggccccaagaagaagcggaaggtgacctccaccgagtccgagggctccgccggctccgccggctccacctccggctcctcctccggcatgaagatcgccgtggtggacaaggccctgaacaacacccggtacgacaagcacttccagctgtacggcgaggaggtggacgtgttccacatgtgcaacgagaagctgtccggccggctgctgaagaagcacatcaccatcggcacccccgagaaccccttcgaccccaacgactacgacttcgtgatcctggtgggcgccgagcccttcctgtacttcgccggcaagaagggcatcggcgactacaccggcaagcgggtggagtacaacggctacgccaactggatcgcctccatctcccccgcccagctgcacttcaagcccgagatgaagcccgtgttcgacgccaccgtggagaacatccacgacatcatcaacggccgggagaagatcgccaaggccggcgactaccggcccatcaccgaccccgacgaggccgaggagtacatcaagatggtgtacaacatggtgatcggccccgtggccttcgcctccgccacctccgccctgtactgccgggacggctacctgctgggcgtgtccatctcccaccaggagtaccagggcgtgtacatcgactccgactgcctgaccgaggtggccgtgtactacctgcagaagatcctggactccgagaaccacaccatcgtgttccacaacctgaagttcgacatgcacttctacaagtaccacctgggcctgaccttcgacaaggcccacaaggagcggcggctgcacgacaccatgctgcagcactacgtgctggacgagcggcggggcacccacggcctgaagtccctggccatgaagtacaccgacatgggcgactacgacttcgagctggacaagttcaaggacgactactgcaaggcccacaagatcaagaaggaggacttcacctacgacctgatccccttcgacatcatgtggccctacgccgccaaggacaccgacgccaccatccggctgcacaacttcttcctgcccaagatcgagaagaacgagaagctgtgctccctgtactacgacgtgctgatgcccggctgcgtgttcctgcagcgggtggaggaccggggcgtgcccatctccatcgaccggctgaaggaggcccagtaccagctgacccacaacctgaacaaggcccgggagaagctgtacacctaccccgaggtgaagcagctggagcaggaccagaacgaggccttcaaccccaactccgtgaagcagctgcgggtgctgctgttcgactacgtgggcctgacccccaccggcaagctgaccgacaccggcgccgactccaccgacgccgaggccctgaacgagctggccacccagcaccccatcgccaagaccctgctggagatccggaagctgaccaagctgatctccacctacgtggagaagatcctgctgtccatcgacgccgacggctgcatccggaccggcttccacgagcacatgaccacctccggccggctgtcctcctccggcaagctgaacctgcagcagctgccccgggacgagtccatcatcaagggctgcgtggtggccccccccggctaccgggtgatcgcctgggacctgaccaccgccgaggtgtactacgccgccgtgctgtccggcgaccggaacatgcagcaggtgttcatcaacatgcggaacgagcccgacaagtaccccgacttccactccaacatcgcccacatggtgttcaagctgcagtgcgagccccgggacgtgaagaagctgttccccgccctgcggcaggccgccaaggccatcaccttcggcatcctgtacggctccggccccgccaaggtggcccactccgtgaacgaggccctgctggagcaggccgccaagaccggcgagcccttcgtggagtgcaccgtggccgacgccaaggagtacatcgagacctacttcggccagttcccccagctgaagcggtggatcgacaagtgccacgaccagatcaagaaccacggcttcatctactcccacttcggccggaagcggcggctgcacaacatccactccgaggaccggggcgtgcagggcgaggagatccggtccggcttcaacgccatcatccagtccgcctcctccgactccctgctgctgggcgccgtggacgccgacaacgagatcatctccctgggcctggagcaggagatgaagatcgtgatgctggtgcacgactccgtggtggccatcgtgcgggaggacctgatcgaccagtacaacgagatcctgatccggaacatccagaaggaccggggcatctccatccccggctgccccatcggcatcgactccgactccgaggccggcggctcccgggactactcctgcggcaagatgaagaagcagcacccctccatcgcctgcatcgacgacgacgagtacacccggtacgtgaagggcgtgctgctggacgccgagttcgagtacaagaagctggccgccatggacaaggagcaccccgaccactccaagtacaaggacgacaagttcatcgccgtgtgcaaggacctggacaacgtgaagcggatcctgggcgccggcggcggctccggcaagcggaccgccgacggctccggcggcggctcccccaagaagaagcggaaggtgcctgccgctaagagagtgaagctggactccgagtccgccacccccgagtccgtgtccggctggcggctgttcaagaagatctcctagctagcaccagcctcaagaacacccgaatggagtctctaagctacataataccaacttacactttacaaaatgttgtcccccaaaatgtagccattcgtatctgctcctaataaaaagaaagtttcttcacattctctcgagaaaaaaaaaaaatggaaaaaaaaaaaacggaaaaaaaaaaaaggtaaaaaaaaaaaatataaaaaaaaaaaacataaaaaaaaaaaacgaaaaaaaaaaaacgtaaaaaaaaaaaactcaaaaaaaaaaaagataaaaaaaaaaaacctaaaaaaaaaaaatgtaaaaaaaaaaaagggaaaaaaaaaaaacgcaaaaaaaaaaaacacaaaaaaaaaaaatgcaaaaaaaaaaaatcgaaaaaaaaaaaatctaaaaaaaaaaaacgaaaaaaaaaaaacccaaaaaaaaaaaagacaaaaaaaaaaaatagaaaaaaaaaaagttaaaaaaaaaaaactgaaaaaaaaaaaatttaaaaaaaaaaaatctag

SEQ ID NO: 2502 - DNA, 7565 bp, synthetic construct
  misc_feature 1..7565: note = Synthetic
  source 1..7565: mol_type = other DNA
aggactcactatttgttttcgcgcccagttgcaaaaagtgtcgaagctcagaataaacgctcaactttggccggatctgccaccatgggcaagcggcccgccgccaccaagaaggccggccaggccaagaagaagaaggacaagaagtactccatcggcctggacatcggcaccaactccgtgggctgggccgtgatcaccgacgagtacaaggtgccctccaagaagttcaaggtgctgggcaacaccgaccggcactccatcaagaagaacctgatcggcgccctgctgttcgactccggcgagaccgccgaggccacccggctgaagcggaccgcccggcggcggtacacccggcggaagaaccggatctgctacctgcaggagatcttctccaacgagatggccaaggtggacgactccttcttccaccggctggaggagtccttcctggtggaggaggacaagaagcacgagcggcaccccatcttcggcaacatcgtggacgaggtggcctaccacgagaagtaccccaccatctaccacctgcggaagaagctggtggactccaccgacaaggccgacctgcggctgatctacctggccctggcccacatgatcaagttccggggccacttcctgatcgagggcgacctgaaccccgacaactccgacgtggacaagctgttcatccagctggtgcagacctacaaccagctgttcgaggagaaccccatcaacgcctccggcgtggacgccaaggccatcctgtccgcccggctgtccaagtcccggcggctggagaacctgatcgcccagctgcccggcgagaagaagaacggcctgttcggcaacctgatcgccctgtccctgggcctgacccccaacttcaagtccaacttcgacctggccgaggacgccaagctgcagctgtccaaggacacctacgacgacgacctggacaacctgctggcccagatcggcgaccagtacgccgacctgttcctggccgccaagaacctgtccgacgccatcctgctgtccgacatcctgcgggtgaacaccgagatcaccaaggcccccctgtccgcctccatgatcaagcggtacgacgagcaccaccaggacctgaccctgctgaaggccctggtgcggcagcagctgcccgagaagtacaaggagatcttcttcgaccagtccaagaacggctacgccggctacatcgacggcggcgcctcccaggaggagttctacaagttcatcaagcccatcctggagaagatggacggcaccgaggagctgctggtgaagctgaaccgggaggacctgctgcggaagcagcggaccttcgacaacggctccatcccccaccagatccacctgggcgagctgcacgccatcctgcggcggcaggaggacttctaccccttcctgaaggacaaccgggagaagatcgagaagatcctgaccttccggatcccctactacgtgggccccctggcccggggcaactcccggttcgcctggatgacccggaagtccgaggagaccatcaccccctggaacttcgaggaggtggtggacaagggcgcctccgcccagtccttcatcgagcggatgaccaacttcgacaagaacctgcccaacgagaaggtgctgcccaagcactccctgctgtacgagtacttcaccgtgtacaacgagctgaccaaggtgaagtacgtgaccgagggcatgcggaagcccgccttcctgtccggcgagcagaagaaggccatcgtggacctgctgttcaagaccaaccggaaggtgaccgtgaagcagctgaaggaggactacttcaagaagatcgagtgcttcgactccgtggagatctccggcgtggaggaccggttcaacgcctccctgggcacctaccacgacctgctgaagatcatcaaggacaaggacttcctggacaacgaggagaacgaggacatcctggaggacatcgtgctgaccctgaccctgttcgaggaccgggagatgatcgaggagcggctgaagacctacgcccacctgttcgacgacaaggtgatgaagcagctgaagcggcggcggtacaccggctggggccggctgtcccggaagctgatcaacggcatccgggacaagcagtccggcaagaccatcctggacttcctgaagtccgacggcttcgccaaccggaacttcatgcagctgatccacgacgactccctgaccttcaaggaggacatccagaaggcccaggtgtccggccagggcgactccctgcacgagcacatcgccaacctggccggctcccccgccatcaagaagggcatcctgcagaccgtgaaggtggtggacgagctggtgaaggtgatgggccggcacaagcccgagaacatcgtgatcgagatggcccgggagaaccagaccacccagaagggccagaagaactcccgggagcggatgaagcggatcgaggagggcatcaaggagctgggctcccagatcctgaaggagcaccccgtggagaacacccagctgcagaacgagaagctgtacctgtactacctgcagaacggccgggacatgtacgtggaccaggagctggacatcaaccggctgtccgactacgacgtggacgccatcgtgccccagtccttcctgaaggacgactccatcgacaacaaggtgctgacccggtccgacaagaaccggggcaagtccgacaacgtgccctccgaggaggtggtgaagaagatgaagaactactggcggcagctgctgaacgccaagctgatcacccagcggaagttcgacaacctgaccaaggccgagcggggcggcctgtccgagctggacaaggccggcttcatcaagcggcagctggtggagacccggcagatcaccaagcacgtggcccagatcctggactcccggatgaacaccaagtacgacgagaacgacaagctgatccgggaggtgaaggtgatcaccctgaagtccaagctggtgtccgacttccggaaggacttccagttctacaaggtgcgggagatcaacaactaccaccacgcccacgacgcctacctgaacgccgtggtgggcaccgccctgatcaagaagtaccccaagctggagtccgagttcgtgtacggcgactacaaggtgtacgacgtgcggaagatgatcgccaagtccgagcaggagatcggcaaggccaccgccaagtacttcttctactccaacatcatgaacttcttcaagaccgagatcaccctggccaacggcgagatccggaagcggcccctgatcgagaccaacggcgagaccggcgagatcgtgtgggacaagggccgggacttcgccaccgtgcggaaggtgctgtccatgccccaggtgaacatcgtgaagaagaccgaggtgcagaccggcggcttctccaaggagtccatcctgcccaagcggaactccgacaagctgatcgcccggaagaaggactgggaccccaagaagtacggcggcttcgactcccccaccgtggcctactccgtgctggtggtggccaaggtggagaagggcaagtccaagaagctgaagtccgtgaaggagctgctgggcatcaccatcatggagcggtcctccttcgagaagaaccccatcgacttcctggaggccaagggctacaaggaggtgaagaaggacctgatcatcaagctgcccaagtactccctgttcgagctggagaacggccggaagcggatgctggcctccgccggcgagctgcagaagggcaacgagctggccctgccctccaagtacgtgaacttcctgtacctggcctcccactacgagaagctgaagggctcccccgaggacaacgagcagaagcagctgttcgtggagcagcacaagcactacctggacgagatcatcgagcagatctccgagttctccaagcgggtgatcctggccgacgccaacctggacaaggtgctgtccgcctacaacaagcaccgggacaagcccatccgggagcaggccgagaacatcatccacctgttcaccctgaccaacctgggcgcccccgccgccttcaagtacttcgacaccaccatcgaccggaagcggtacacctccaccaaggaggtgctggacgccaccctgatccaccagtccatcaccggcctgtacgagacccggatcgacctgtcccagctgggcggcgacggcgcccccgagtccgccaccgagtccggcggcacctccaccgagtccgagggctccgccggccccaagaagaagcggaaggtgacctccaccgagtccgagggctccgccggctccgccggctccacctccggctcctcctccggcatgaagatcgccgtggtggacaaggccctgaacaacacccggtacgacaagcacttccagctgtacggcgaggaggtggacgtgttccacatgtgcaacgagaagctgtccggccggctgctgaagaagcacatcaccatcggcacccccgagaaccccttcgaccccaacgactacgacttcgtgatcctggtgggcgccgagcccttcctgtacttcgccggcaagaagggcatcggcgactacaccggcaagcgggtggagtacaacggctacgccaactggatcgcctccatctcccccgcccagctgcacttcaagcccgagatgaagcccgtgttcgacgccaccgtggagaacatccacgacatcatcaacggccgggagaagatcgccaaggccggcgactaccggcccatcaccgaccccgacgaggccgaggagtacatcaagatggtgtacaacatggtgatcggccccgtggccttcgcctccgccacctccgccctgtactgccgggacggctacctgctgggcgtgtccatctcccaccaggagtaccagggcgtgtacatcgactccgactgcctgaccgaggtggccgtgtactacctgcagaagatcctggactccgagaaccacaccatcgtgttccacaacctgaagttcgacatgcacttctacaagtaccacctgggcctgaccttcgacaaggcccacaaggagcggcggctgcacgacaccatgctgcagcactacgtgctggacgagcggcggggcacccacggcctgaagtccctggccatgaagtacaccgacatgggcgactacgacttcgagctggacaagttcaaggacgactactgcaaggcccacaagatcaagaaggaggacttcacctacgacctgatccccttcgacatcatgtggccctacgccgccaaggacaccgacgccaccatccggctgcacaacttcttcctgcccaagatcgagaagaacgagaagctgtgctccctgtactacgacgtgctgatgcccggctgcgtgttcctgcagcgggtggaggaccggggcgtgcccatctccatcgaccggctgaaggaggcccagtaccagctgacccacaacctgaacaaggcccgggagaagctgtacacctaccccgaggtgaagcagctggagcaggaccagaacgaggccttcaaccccaactccgtgaagcagctgcgggtgctgctgttcgactacgtgggcctgacccccaccggcaagctgaccgacaccggcgccgactccaccgacgccgaggccctgaacgagctggccacccagcaccccatcgccaagaccctgctggagatccggaagctgaccaagctgatctccacctacgtggagaagatcctgctgtccatcgacgccgacggctgcatccggaccggcttccacgagcacatgaccacctccggccggctgtcctcctccggcaagctgaacctgcagcagctgccccgggacgagtccatcatcaagggctgcgtggtggccccccccggctaccgggtgatcgcctgggacctgaccaccgccgaggtgtactacgccgccgtgctgtccggcgaccggaacatgcagcaggtgttcatcaacatgcggaacgagcccgacaagtaccccgacttccactccaacatcgcccacatggtgttcaagctgcagtgcgagccccgggacgtgaagaagctgttccccgccctgcggcaggccgccaaggccatcaccttcggcatcctgtacggctccggccccgccaaggtggcccactccgtgaacgaggccctgctggagcaggccgccaagaccggcgagcccttcgtggagtgcaccgtggccgacgccaaggagtacatcgagacctacttcggccagttcccccagctgaagcggtggatcgacaagtgccacgaccagatcaagaaccacggcttcatctactcccacttcggccggaagcggcggctgcacaacatccactccgaggaccggggcgtgcagggcgaggagatccggtccggcttcaacgccatcatccagtccgcctcctccgactccctgctgctgggcgccgtggacgccgacaacgagatcatctccctgggcctggagcaggagatgaagatcgtgatgctggtgcacgactccgtggtggccatcgtgcgggaggacctgatcgaccagtacaacgagatcctgatccggaacatccagaaggaccggggcatctccatccccggctgccccatcggcatcgactccgactccgaggccggcggctcccgggactactcctgcggcaagatgaagaagcagcacccctccatcgcctgcatcgacgacgacgagtacacccggtacgtgaagggcgtgctgctggacgccgagttcgagtacaagaagctggccgccatggacaaggagcaccccgaccactccaagtacaaggacgacaagttcatcgccgtgtgcaaggacctggacaacgtgaagcggatcctgggcgccggcggcggctccggcaagcggaccgccgacggctccggcggcggctcccccaagaagaagcggaaggtgcctgccgctaagagagtgaagctggactagctagcaccagcctcaagaacacccgaatggagtctctaagctacataataccaacttacactttacaaaatgttgtcccccaaaatgtagccattcgtatctgctcctaataaaaagaaagtttcttcacattctctcgagaaaaaaaaaaaatggaaaaaaaaaaaacggaaaaaaaaaaaaggtaaaaaaaaaaaatataaaaaaaaaaaacataaaaaaaaaaaacgaaaaaaaaaaaacgtaaaaaaaaaaaactcaaaaaaaaaaaagataaaaaaaaaaaacctaaaaaaaaaaaatgtaaaaaaaaaaaagggaaaaaaaaaaaacgcaaaaaaaaaaaacacaaaaaaaaaaaatgcaaaaaaaaaaaatcgaaaaaaaaaaaatctaaaaaaaaaaaacgaaaaaaaaaaaacccaaaaaaaaaaaagacaaaaaaaaaaaatagaaaaaaaaaaagttaaaaaaaaaaaactgaaaaaaaaaaaatttaaaaaaaaaaaatctag

SEQ ID NO: 2503-2505 - skipped (3 entries)

SEQ ID NO: 2506 - DNA, 7535 bp, synthetic construct
  misc_feature 1..7535: note = Synthetic
  source 1..7535: mol_type = other DNA
aggactcactatttgttttcgcgcccagttgcaaaaagtgtcgaagctcagaataaacgctcaactttggccggatctgccaccatgaagcggcccgccgccaccaagaaggccggccaggccaagaagaagaaggacaagaagtactccatcggcctggacatcggcaccaactccgtgggctgggccgtgatcaccgacgagtacaaggtgccctccaagaagttcaaggtgctgggcaacaccgaccggcactccatcaagaagaacctgatcggcgccctgctgttcgactccggcgagaccgccgaggccacccggctgaagcggaccgcccggcggcggtacacccggcggaagaaccggatctgctacctgcaggagatcttctccaacgagatggccaaggtggacgactccttcttccaccggctggaggagtccttcctggtggaggaggacaagaagcacgagcggcaccccatcttcggcaacatcgtggacgaggtggcctaccacgagaagtaccccaccatctaccacctgcggaagaagctggtggactccaccgacaaggccgacctgcggctgatctacctggccctggcccacatgatcaagttccggggccacttcctgatcgagggcgacctgaaccccgacaactccgacgtggacaagctgttcatccagctggtgcagacctacaaccagctgttcgaggagaaccccatcaacgcctccggcgtggacgccaaggccatcctgtccgcccggctgtccaagtcccggcggctggagaacctgatcgcccagctgcccggcgagaagaagaacggcctgttcggcaacctgatcgccctgtccctgggcctgacccccaacttcaagtccaacttcgacctggccgaggacgccaagctgcagctgtccaaggacacctacgacgacgacctggacaacctgctggcccagatcggcgaccagtacgccgacctgttcctggccgccaagaacctgtccgacgccatcctgctgtccgacatcctgcgggtgaacaccgagatcaccaaggcccccctgtccgcctccatgatcaagcggtacgacgagcaccaccaggacctgaccctgctgaaggccctggtgcggcagcagctgcccgagaagtacaaggagatcttcttcgaccagtccaagaacggctacgccggctacatcgacggcggcgcctcccaggaggagttctacaagttcatcaagcccatcctggagaagatggacggcaccgaggagctgctggtgaagctgaaccgggaggacctgctgcggaagcagcggaccttcgacaacggctccatcccccaccagatccacctgggcgagctgcacgccatcctgcggcggcaggaggacttctaccccttcctgaaggacaaccgggagaagatcgagaagatcctgaccttccggatcccctactacgtgggccccctggcccggggcaactcccggttcgcctggatgacccggaagtccgaggagaccatcaccccctggaacttcgaggaggtggtggacaagggcgcctccgcccagtccttcatcgagcggatgaccaacttcgacaagaacctgcccaacgagaaggtgctgcccaagcactccctgctgtacgagtacttcaccgtgtacaacgagctgaccaaggtgaagtacgtgaccgagggcatgcggaagcccgccttcctgtccggcgagcagaagaaggccatcgtggacctgctgttcaagaccaaccggaaggtgaccgtgaagcagctgaaggaggactacttcaagaagatcgagtgcttcgactccgtggagatctccggcgtggaggaccggttcaacgcctccctgggcacctaccacgacctgctgaagatcatcaaggacaaggacttcctggacaacgaggagaacgaggacatcctggaggacatcgtgctgaccctgaccctgttcgaggaccgggagatgatcgaggagcggctgaagacctacgcccacctgttcgacgacaaggtgatgaagcagctgaagcggcggcggtacaccggctggggccggctgtcccggaagctgatcaacggcatccgggacaagcagtccggcaagaccatcctggacttcctgaagtccgacggcttcgccaaccggaacttcatgcagctgatccacgacgactccctgaccttcaaggaggacatccagaaggcccaggtgtccggccagggcgactccctgcacgagcacatcgccaacctggccggctcccccgccatcaagaagggcatcctgcagaccgtgaaggtggtggacgagctggtgaaggtgatgggccggcacaagcccgagaacatcgtgatcgagatggcccgggagaaccagaccacccagaagggccagaagaactcccgggagcggatgaagcggatcgaggagggcatcaaggagctgggctcccagatcctgaaggagcaccccgtggagaacacccagctgcagaacgagaagctgtacctgtactacctgcagaacggccgggacatgtacgtggaccaggagctggacatcaaccggctgtccgactacgacgtggacgccatcgtgccccagtccttcctgaaggacgactccatcgacaacaaggtgctgacccggtccgacaagaaccggggcaagtccgacaacgtgccctccgaggaggtggtgaagaagatgaagaactactggcggcagctgctgaacgccaagctgatcacccagcggaagttcgacaacctgaccaaggccgagcggggcggcctgtccgagctggacaaggccggcttcatcaagcggcagctggtggagacccggcagatcaccaagcacgtggcccagatcctggactcccggatgaacaccaagtacgacgagaacgacaagctgatccgggaggtgaaggtgatcaccctgaagtccaagctggtgtccgacttccggaaggacttccagttctacaaggtgcgggagatcaacaactaccaccacgcccacgacgcctacctgaacgccgtggtgggcaccgccctgatcaagaagtaccccaagctggagtccgagttcgtgtacggcgactacaaggtgtacgacgtgcggaagatgatcgccaagtccgagcaggagatcggcaaggccaccgccaagtacttcttctactccaacatcatgaacttcttcaagaccgagatcaccctggccaacggcgagatccggaagcggcccctgatcgagaccaacggcgagaccggcgagatcgtgtgggacaagggccgggacttcgccaccgtgcggaaggtgctgtccatgccccaggtgaacatcgtgaagaagaccgaggtgcagaccggcggcttctccaaggagtccatcctgcccaagcggaactccgacaagctgatcgcccggaagaaggactgggaccccaagaagtacggcggcttcgactcccccaccgtggcctactccgtgctggtggtggccaaggtggagaagggcaagtccaagaagctgaagtccgtgaaggagctgctgggcatcaccatcatggagcggtcctccttcgagaagaaccccatcgacttcctggaggccaagggctacaaggaggtgaagaaggacctgatcatcaagctgcccaagtactccctgttcgagctggagaacggccggaagcggatgctggcctccgccggcgagctgcagaagggcaacgagctggccctgccctccaagtacgtgaacttcctgtacctggcctcccactacgagaagctgaagggctcccccgaggacaacgagcagaagcagctgttcgtggagcagcacaagcactacctggacgagatcatcgagcagatctccgagttctccaagcgggtgatcctggccgacgccaacctggacaaggtgctgtccgcctacaacaagcaccgggacaagcccatccgggagcaggccgagaacatcatccacctgttcaccctgaccaacctgggcgcccccgccgccttcaagtacttcgacaccaccatcgaccggaagcggtacacctccaccaaggaggtgctggacgccaccctgatccaccagtccatcaccggcctgtacgagacccggatcgacctgtcccagctgggcggcgacggcgcccccgagtccgccaccgagtccggcggcacctccaccgagtccgagggctccgccggccccaagaagaagcggaaggtgacctccaccgagtccgagggctccgccggctccgccggctccacctccggctcctcctccggcatgaagatcgccgtggtggacaaggccctgaacaacacccggtacgacaagcacttccagctgtacggcgaggaggtggacgtgttccacatgtgcaacgagaagctgtccggccggctgctgaagaagcacatcaccatcggcacccccgagaaccccttcgaccccaacgactacgacttcgtgatcctggtgggcgccgagcccttcctgtacttcgccggcaagaagggcatcggcgactacaccggcaagcgggtggagtacaacggctacgccaactggatcgcctccatctcccccgcccagctgcacttcaagcccgagatgaagcccgtgttcgacgccaccgtggagaacatccacgacatcatcaacggccgggagaagatcgccaaggccggcgactaccggcccatcaccgaccccgacgaggccgaggagtacatcaagatggtgtacaacatggtgatcggccccgtggccttcgcctccgccacctccgccctgtactgccgggacggctacctgctgggcgtgtccatctcccaccaggagtaccagggcgtgtacatcgactccgactgcctgaccgaggtggccgtgtactacctgcagaagatcctggactccgagaaccacaccatcgtgttccacaacctgaagttcgacatgcacttctacaagtaccacctgggcctgaccttcgacaaggcccacaaggagcggcggctgcacgacaccatgctgcagcactacgtgctggacgagcggcggggcacccacggcctgaagtccctggccatgaagtacaccgacatgggcgactacgacttcgagctggacaagttcaaggacgactactgcaaggcccacaagatcaagaaggaggacttcacctacgacctgatccccttcgacatcatgtggccctacgccgccaaggacaccgacgccaccatccggctgcacaacttcttcctgcccaagatcgagaagaacgagaagctgtgctccctgtactacgacgtgctgatgcccggctgcgtgttcctgcagcgggtggaggaccggggcgtgcccatctccatcgaccggctgaaggaggcccagtaccagctgacccacaacctgaacaaggcccgggagaagctgtacacctaccccgaggtgaagcagctggagcaggaccagaacgaggccttcaaccccaactccgtgaagcagctgcgggtgctgctgttcgactacgtgggcctgacccccaccggcaagctgaccgacaccggcgccgactccaccgacgccgaggccctgaacgagctggccacccagcaccccatcgccaagaccctgctggagatccggaagctgaccaagctgatctccacctacgtggagaagatcctgctgtccatcgacgccgacggctgcatccggaccggcttccacgagcacatgaccacctccggccggctgtcctcctccggcaagctgaacctgcagcagctgccccgggacgagtccatcatcaagggctgcgtggtggccccccccggctaccgggtgatcgcctgggacctgaccaccgccgaggtgtactacgccgccgtgctgtccggcgaccggaacatgcagcaggtgttcatcaacatgcggaacgagcccgacaagtaccccgacttccactccaacatcgcccacatggtgttcaagctgcagtgcgagccccgggacgtgaagaagctgttccccgccctgcggcaggccgccaaggccatcaccttcggcatcctgtacggctccggccccgccaaggtggcccactccgtgaacgaggccctgctggagcaggccgccaagaccggcgagcccttcgtggagtgcaccgtggccgacgccaaggagtacatcgagacctacttcggccagttcccccagctgaagcggtggatcgacaagtgccacgaccagatcaagaaccacggcttcatctactcccacttcggccggaagcggcggctgcacaacatccactccgaggaccggggcgtgcagggcgaggagatccggtccggcttcaacgccatcatccagtccgcctcctccgactccctgctgctgggcgccgtggacgccgacaacgagatcatctccctgggcctggagcaggagatgaagatcgtgatgctggtgcacgactccgtggtggccatcgtgcgggaggacctgatcgaccagtacaacgagatcctgatccggaacatccagaaggaccggggcatctccatccccggctgccccatcggcatcgactccgactccgaggccggcggctcccgggactactcctgcggcaagatgaagaagcagcacccctccatcgcctgcatcgacgacgacgagtacacccggtacgtgaagggcgtgctgctggacgccgagttcgagtacaagaagctggccgccatggacaaggagcaccccgaccactccaagtacaaggacgacaagttcatcgccgtgtgcaaggacctggacaacgtgaagcggatcctgggcgcctccggctccgagacccccggcacctccgagtccgccacccccgagtcccccaagaagaagcggaaggtgtagctagcaccagcctcaagaacacccgaatggagtctctaagctacataataccaacttacactttacaaaatgttgtcccccaaaatgtagccattcgtatctgctcctaataaaaagaaagtttcttcacattctctcgagaaaaaaaaaaaatggaaaaaaaaaaaacggaaaaaaaaaaaaggtaaaaaaaaaaaatataaaaaaaaaaaacataaaaaaaaaaaacgaaaaaaaaaaaacgtaaaaaaaaaaaactcaaaaaaaaaaaagataaaaaaaaaaaacctaaaaaaaaaaaatgtaaaaaaaaaaaagggaaaaaaaaaaaacgcaaaaaaaaaaaacacaaaaaaaaaaaatgcaaaaaaaaaaaatcgaaaaaaaaaaaatctaaaaaaaaaaaacgaaaaaaaaaaaacccaaaaaaaaaaaagacaaaaaaaaaaaatagaaaaaaaaaaagttaaaaaaaaaaaactgaaaaaaaaaaaatttaaaaaaaaaaaatctag

SEQ ID NO: 2507 - DNA, 7505 bp, synthetic construct
  misc_feature 1..7505: note = Synthetic
  source 1..7505: mol_type = other DNA
aggactcactatttgttttcgcgcccagttgcaaaaagtgtcgaagctcagaataaacgctcaactttggccggatctgccaccatgaagcggcccgccgccaccaagaaggccggccaggccaagaagaagaaggacaagaagtactccatcggcctggacatcggcaccaactccgtgggctgggccgtgatcaccgacgagtacaaggtgccctccaagaagttcaaggtgctgggcaacaccgaccggcactccatcaagaagaacctgatcggcgccctgctgttcgactccggcgagaccgccgaggccacccggctgaagcggaccgcccggcggcggtacacccggcggaagaaccggatctgctacctgcaggagatcttctccaacgagatggccaaggtggacgactccttcttccaccggctggaggagtccttcctggtggaggaggacaagaagcacgagcggcaccccatcttcggcaacatcgtggacgaggtggcctaccacgagaagtaccccaccatctaccacctgcggaagaagctggtggactccaccgacaaggccgacctgcggctgatctacctggccctggcccacatgatcaagttccggggccacttcctgatcgagggcgacctgaaccccgacaactccgacgtggacaagctgttcatccagctggtgcagacctacaaccagctgttcgaggagaaccccatcaacgcctccggcgtggacgccaaggccatcctgtccgcccggctgtccaagtcccggcggctggagaacctgatcgcccagctgcccggcgagaagaagaacggcctgttcggcaacctgatcgccctgtccctgggcctgacccccaacttcaagtccaacttcgacctggccgaggacgccaagctgcagctgtccaaggacacctacgacgacgacctggacaacctgctggcccagatcggcgaccagtacgccgacctgttcctggccgccaagaacctgtccgacgccatcctgctgtccgacatcctgcgggtgaacaccgagatcaccaaggcccccctgtccgcctccatgatcaagcggtacgacgagcaccaccaggacctgaccctgctgaaggccctggtgcggcagcagctgcccgagaagtacaaggagatcttcttcgaccagtccaagaacggctacgccggctacatcgacggcggcgcctcccaggaggagttctacaagttcatcaagcccatcctggagaagatggacggcaccgaggagctgctggtgaagctgaaccgggaggacctgctgcggaagcagcggaccttcgacaacggctccatcccccaccagatccacctgggcgagctgcacgccatcctgcggcggcaggaggacttctaccccttcctgaaggacaaccgggagaagatcgagaagatcctgaccttccggatcccctactacgtgggccccctggcccggggcaactcccggttcgcctggatgacccggaagtccgaggagaccatcaccccctggaacttcgaggaggtggtggacaagggcgcctccgcccagtccttcatcgagcggatgaccaacttcgacaagaacctgcccaacgagaaggtgctgcccaagcactccctgctgtacgagtacttcaccgtgtacaacgagctgaccaaggtgaagtacgtgaccgagggcatgcggaagcccgccttcctgtccggcgagcagaagaaggccatcgtggacctgctgttcaagaccaaccggaaggtgaccgtgaagcagctgaaggaggactacttcaagaagatcgagtgcttcgactccgtggagatctccggcgtggaggaccggttcaacgcctccctgggcacctaccacgacctgctgaagatcatcaaggacaaggacttcctggacaacgaggagaacgaggacatcctggaggacatcgtgctgaccctgaccctgttcgaggaccgggagatgatcgaggagcggctgaagacctacgcccacctgttcgacgacaaggtgatgaagcagctgaagcggcggcggtacaccggctggggccggctgtcccggaagctgatcaacggcatccgggacaagcagtccggcaagaccatcctggacttcctgaagtccgacggcttcgccaaccggaacttcatgcagctgatccacgacgactccctgaccttcaaggaggacatccagaaggcccaggtgtccggccagggcgactccctgcacgagcacatcgccaacctggccggctcccccgccatcaagaagggcatcctgcagaccgtgaaggtggtggacgagctggtgaaggtgatgggccggcacaagcccgagaacatcgtgatcgagatggcccgggagaaccagaccacccagaagggccagaagaactcccgggagcggatgaagcggatcgaggagggcatcaaggagctgggctcccagatcctgaaggagcaccccgtggagaacacccagctgcagaacgagaagctgtacctgtactacctgcagaacggccgggacatgtacgtggaccaggagctggacatcaaccggctgtccgactacgacgtggacgccatcgtgccccagtccttcctgaaggacgactccatcgacaacaaggtgctgacccggtccgacaagaaccggggcaagtccgacaacgtgccctccgaggaggtggtgaagaagatgaagaactactggcggcagctgctgaacgccaagctgatcacccagcggaagttcgacaacctgaccaaggccgagcggggcggcctgtccgagctggacaaggccggcttcatcaagcggcagctggtggagacccggcagatcaccaagcacgtggcccagatcctggactcccggatgaacaccaagtacgacgagaacgacaagctgatccgggaggtgaaggtgatcaccctgaagtccaagctggtgtccgacttccggaaggacttccagttctacaaggtgcgggagatcaacaactaccaccacgcccacgacgcctacctgaacgccgtggtgggcaccgccctgatcaagaagtaccccaagctggagtccgagttcgtgtacggcgactacaaggtgtacgacgtgcggaagatgatcgccaagtccgagcaggagatcggcaaggccaccgccaagtacttcttctactccaacatcatgaacttcttcaagaccgagatcaccctggccaacggcgagatccggaagcggcccctgatcgagaccaacggcgagaccggcgagatcgtgtgggacaagggccgggacttcgccaccgtgcggaaggtgctgtccatgccccaggtgaacatcgtgaagaagaccgaggtgcagaccggcggcttctccaaggagtccatcctgcccaagcggaactccgacaagctgatcgcccggaagaaggactgggaccccaagaagtacggcggcttcgactcccccaccgtggcctactccgtgctggtggtggccaaggtggagaagggcaagtccaagaagctgaagtccgtgaaggagctgctgggcatcaccatcatggagcggtcctccttcgagaagaaccccatcgacttcctggaggccaagggctacaaggaggtgaagaaggacctgatcatcaagctgcccaagtactccctgttcgagctggagaacggccggaagcggatgctggcctccgccggcgagctgcagaagggcaacgagctggccctgccctccaagtacgtgaacttcctgtacctggcctcccactacgagaagctgaagggctcccccgaggacaacgagcagaagcagctgttcgtggagcagcacaagcactacctggacgagatcatcgagcagatctccgagttctccaagcgggtgatcctggccgacgccaacctggacaaggtgctgtccgcctacaacaagcaccgggacaagcccatccgggagcaggccgagaacatcatccacctgttcaccctgaccaacctgggcgcccccgccgccttcaagtacttcgacaccaccatcgaccggaagcggtacacctccaccaaggaggtgctggacgccaccctgatccaccagtccatcaccggcctgtacgagacccggatcgacctgtcccagctgggcggcgacggtaccaaggacagcaccaaagatatcccggaaaccccgagcaaggaccccaagaagaagcggaaggtgggtaccaaggacagcaccaaagatatcccggaaaccccgagcaaggacatgaagatcgccgtggtggacaaggccctgaacaacacccggtacgacaagcacttccagctgtacggcgaggaggtggacgtgttccacatgtgcaacgagaagctgtccggccggctgctgaagaagcacatcaccatcggcacccccgagaaccccttcgaccccaacgactacgacttcgtgatcctggtgggcgccgagcccttcctgtacttcgccggcaagaagggcatcggcgactacaccggcaagcgggtggagtacaacggctacgccaactggatcgcctccatctcccccgcccagctgcacttcaagcccgagatgaagcccgtgttcgacgccaccgtggagaacatccacgacatcatcaacggccgggagaagatcgccaaggccggcgactaccggcccatcaccgaccccgacgaggccgaggagtacatcaagatggtgtacaacatggtgatcggccccgtggccttcgcctccgccacctccgccctgtactgccgggacggctacctgctgggcgtgtccatctcccaccaggagtaccagggcgtgtacatcgactccgactgcctgaccgaggtggccgtgtactacctgcagaagatcctggactccgagaaccacaccatcgtgttccacaacctgaagttcgacatgcacttctacaagtaccacctgggcctgaccttcgacaaggcccacaaggagcggcggctgcacgacaccatgctgcagcactacgtgctggacgagcggcggggcacccacggcctgaagtccctggccatgaagtacaccgacatgggcgactacgacttcgagctggacaagttcaaggacgactactgcaaggcccacaagatcaagaaggaggacttcacctacgacctgatccccttcgacatcatgtggccctacgccgccaaggacaccgacgccaccatccggctgcacaacttcttcctgcccaagatcgagaagaacgagaagctgtgctccctgtactacgacgtgctgatgcccggctgcgtgttcctgcagcgggtggaggaccggggcgtgcccatctccatcgaccggctgaaggaggcccagtaccagctgacccacaacctgaacaaggcccgggagaagctgtacacctaccccgaggtgaagcagctggagcaggaccagaacgaggccttcaaccccaactccgtgaagcagctgcgggtgctgctgttcgactacgtgggcctgacccccaccggcaagctgaccgacaccggcgccgactccaccgacgccgaggccctgaacgagctggccacccagcaccccatcgccaagaccctgctggagatccggaagctgaccaagctgatctccacctacgtggagaagatcctgctgtccatcgacgccgacggctgcatccggaccggcttccacgagcacatgaccacctccggccggctgtcctcctccggcaagctgaacctgcagcagctgccccgggacgagtccatcatcaagggctgcgtggtggccccccccggctaccgggtgatcgcctgggacctgaccaccgccgaggtgtactacgccgccgtgctgtccggcgaccggaacatgcagcaggtgttcatcaacatgcggaacgagcccgacaagtaccccgacttccactccaacatcgcccacatggtgttcaagctgcagtgcgagccccgggacgtgaagaagctgttccccgccctgcggcaggccgccaaggccatcaccttcggcatcctgtacggctccggccccgccaaggtggcccactccgtgaacgaggccctgctggagcaggccgccaagaccggcgagcccttcgtggagtgcaccgtggccgacgccaaggagtacatcgagacctacttcggccagttcccccagctgaagcggtggatcgacaagtgccacgaccagatcaagaaccacggcttcatctactcccacttcggccggaagcggcggctgcacaacatccactccgaggaccggggcgtgcagggcgaggagatccggtccggcttcaacgccatcatccagtccgcctcctccgactccctgctgctgggcgccgtggacgccgacaacgagatcatctccctgggcctggagcaggagatgaagatcgtgatgctggtgcacgactccgtggtggccatcgtgcgggaggacctgatcgaccagtacaacgagatcctgatccggaacatccagaaggaccggggcatctccatccccggctgccccatcggcatcgactccgactccgaggccggcggctcccgggactactcctgcggcaagatgaagaagcagcacccctccatcgcctgcatcgacgacgacgagtacacccggtacgtgaagggcgtgctgctggacgccgagttcgagtacaagaagctggccgccatggacaaggagcaccccgaccactccaagtacaaggacgacaagttcatcgccgtgtgcaaggacctggacaacgtgaagcggatcctgggcgcctccggctccgagacccccggcacctccgagtccgccacccccgagtcccccaagaagaagcggaaggtgtagctagcaccagcctcaagaacacccgaatggagtctctaagctacataataccaacttacactttacaaaatgttgtcccccaaaatgtagccattcgtatctgctcctaataaaaagaaagtttcttcacattctctcgagaaaaaaaaaaaatggaaaaaaaaaaaacggaaaaaaaaaaaaggtaaaaaaaaaaaatataaaaaaaaaaaacataaaaaaaaaaaacgaaaaaaaaaaaacgtaaaaaaaaaaaactcaaaaaaaaaaaagataaaaaaaaaaaacctaaaaaaaaaaaatgtaaaaaaaaaaaagggaaaaaaaaaaaacgcaaaaaaaaaaaacacaaaaaaaaaaaatgcaaaaaaaaaaaatcgaaaaaaaaaaaatctaaaaaaaaaaaacgaaaaaaaaaaaacccaaaaaaaaaaaagacaaaaaaaaaaaatagaaaaaaaaaaagttaaaaaaaaaaaactgaaaaaaaaaaaatttaaaaaaaaaaaatctag

SEQ ID NO: 2508 - DNA, 7555 bp, synthetic construct
  misc_feature 1..7555: note = Synthetic
  source 1..7555: mol_type = other DNA
aggactcactatttgttttcgcgcccagttgcaaaaagtgtcaaaaaaaaaaaaccaaaaaaaaaaaacaaaaaaaaaaaataattgactaagaagctcagaataaacgctcaactttggccggatctgccaccatgaagcggcccgccgccaccaagaaggccggccaggccaagaagaagaaggacaagaagtactccatcggcctggacatcggcaccaactccgtgggctgggccgtgatcaccgacgagtacaaggtgccctccaagaagttcaaggtgctgggcaacaccgaccggcactccatcaagaagaacctgatcggcgccctgctgttcgactccggcgagaccgccgaggccacccggctgaagcggaccgcccggcggcggtacacccggcggaagaaccggatctgctacctgcaggagatcttctccaacgagatggccaaggtggacgactccttcttccaccggctggaggagtccttcctggtggaggaggacaagaagcacgagcggcaccccatcttcggcaacatcgtggacgaggtggcctaccacgagaagtaccccaccatctaccacctgcggaagaagctggtggactccaccgacaaggccgacctgcggctgatctacctggccctggcccacatgatcaagttccggggccacttcctgatcgagggcgacctgaaccccgacaactccgacgtggacaagctgttcatccagctggtgcagacctacaaccagctgttcgaggagaaccccatcaacgcctccggcgtggacgccaaggccatcctgtccgcccggctgtccaagtcccggcggctggagaacctgatcgcccagctgcccggcgagaagaagaacggcctgttcggcaacctgatcgccctgtccctgggcctgacccccaacttcaagtccaacttcgacctggccgaggacgccaagctgcagctgtccaaggacacctacgacgacgacctggacaacctgctggcccagatcggcgaccagtacgccgacctgttcctggccgccaagaacctgtccgacgccatcctgctgtccgacatcctgcgggtgaacaccgagatcaccaaggcccccctgtccgcctccatgatcaagcggtacgacgagcaccaccaggacctgaccctgctgaaggccctggtgcggcagcagctgcccgagaagtacaaggagatcttcttcgaccagtccaagaacggctacgccggctacatcgacggcggcgcctcccaggaggagttctacaagttcatcaagcccatcctggagaagatggacggcaccgaggagctgctggtgaagctgaaccgggaggacctgctgcggaagcagcggaccttcgacaacggctccatcccccaccagatccacctgggcgagctgcacgccatcctgcggcggcaggaggacttctaccccttcctgaaggacaaccgggagaagatcgagaagatcctgaccttccggatcccctactacgtgggccccctggcccggggcaactcccggttcgcctggatgacccggaagtccgaggagaccatcaccccctggaacttcgaggaggtggtggacaagggcgcctccgcccagtccttcatcgagcggatgaccaacttcgacaagaacctgcccaacgagaaggtgctgcccaagcactccctgctgtacgagtacttcaccgtgtacaacgagctgaccaaggtgaagtacgtgaccgagggcatgcggaagcccgccttcctgtccggcgagcagaagaaggccatcgtggacctgctgttcaagaccaaccggaaggtgaccgtgaagcagctgaaggaggactacttcaagaagatcgagtgcttcgactccgtggagatctccggcgtggaggaccggttcaacgcctccctgggcacctaccacgacctgctgaagatcatcaaggacaaggacttcctggacaacgaggagaacgaggacatcctggaggacatcgtgctgaccctgaccctgttcgaggaccgggagatgatcgaggagcggctgaagacctacgcccacctgttcgacgacaaggtgatgaagcagctgaagcggcggcggtacaccggctggggccggctgtcccggaagctgatcaacggcatccgggacaagcagtccggcaagaccatcctggacttcctgaagtccgacggcttcgccaaccggaacttcatgcagctgatccacgacgactccctgaccttcaaggaggacatccagaaggcccaggtgtccggccagggcgactccctgcacgagcacatcgccaacctggccggctcccccgccatcaagaagggcatcctgcagaccgtgaaggtggtggacgagctggtgaaggtgatgggccggcacaagcccgagaacatcgtgatcgagatggcccgggagaaccagaccacccagaagggccagaagaactcccgggagcggatgaagcggatcgaggagggcatcaaggagctgggctcccagatcctgaaggagcaccccgtggagaacacccagctgcagaacgagaagctgtacctgtactacctgcagaacggccgggacatgtacgtggaccaggagctggacatcaaccggctgtccgactacgacgtggacgccatcgtgccccagtccttcctgaaggacgactccatcgacaacaaggtgctgacccggtccgacaagaaccggggcaagtccgacaacgtgccctccgaggaggtggtgaagaagatgaagaactactggcggcagctgctgaacgccaagctgatcacccagcggaagttcgacaacctgaccaaggccgagcggggcggcctgtccgagctggacaaggccggcttcatcaagcggcagctggtggagacccggcagatcaccaagcacgtggcccagatcctggactcccggatgaacaccaagtacgacgagaacgacaagctgatccgggaggtgaaggtgatcaccctgaagtccaagctggtgtccgacttccggaaggacttccagttctacaaggtgcgggagatcaacaactaccaccacgcccacgacgcctacctgaacgccgtggtgggcaccgccctgatcaagaagtaccccaagctggagtccgagttcgtgtacggcgactacaaggtgtacgacgtgcggaagatgatcgccaagtccgagcaggagatcggcaaggccaccgccaagtacttcttctactccaacatcatgaacttcttcaagaccgagatcaccctggccaacggcgagatccggaagcggcccctgatcgagaccaacggcgagaccggcgagatcgtgtgggacaagggccgggacttcgccaccgtgcggaaggtgctgtccatgccccaggtgaacatcgtgaagaagaccgaggtgcagaccggcggcttctccaaggagtccatcctgcccaagcggaactccgacaagctgatcgcccggaagaaggactgggaccccaagaagtacggcggcttcgactcccccaccgtggcctactccgtgctggtggtggccaaggtggagaagggcaagtccaagaagctgaagtccgtgaaggagctgctgggcatcaccatcatggagcggtcctccttcgagaagaaccccatcgacttcctggaggccaagggctacaaggaggtgaagaaggacctgatcatcaagctgcccaagtactccctgttcgagctggagaacggccggaagcggatgctggcctccgccggcgagctgcagaagggcaacgagctggccctgccctccaagtacgtgaacttcctgtacctggcctcccactacgagaagctgaagggctcccccgaggacaacgagcagaagcagctgttcgtggagcagcacaagcactacctggacgagatcatcgagcagatctccgagttctccaagcgggtgatcctggccgacgccaacctggacaaggtgctgtccgcctacaacaagcaccgggacaagcccatccgggagcaggccgagaacatcatccacctgttcaccctgaccaacctgggcgcccccgccgccttcaagtacttcgacaccaccatcgaccggaagcggtacacctccaccaaggaggtgctggacgccaccctgatccaccagtccatcaccggcctgtacgagacccggatcgacctgtcccagctgggcggcgacggtaccaaggacagcaccaaagatatcccggaaaccccgagcaaggaccccaagaagaagcggaaggtgggtaccaaggacagcaccaaagatatcccggaaaccccgagcaaggacatgaagatcgccgtggtggacaaggccctgaacaacacccggtacgacaagcacttccagctgtacggcgaggaggtggacgtgttccacatgtgcaacgagaagctgtccggccggctgctgaagaagcacatcaccatcggcacccccgagaaccccttcgaccccaacgactacgacttcgtgatcctggtgggcgccgagcccttcctgtacttcgccggcaagaagggcatcggcgactacaccggcaagcgggtggagtacaacggctacgccaactggatcgcctccatctcccccgcccagctgcacttcaagcccgagatgaagcccgtgttcgacgccaccgtggagaacatccacgacatcatcaacggccgggagaagatcgccaaggccggcgactaccggcccatcaccgaccccgacgaggccgaggagtacatcaagatggtgtacaacatggtgatcggccccgtggccttcgcctccgccacctccgccctgtactgccgggacggctacctgctgggcgtgtccatctcccaccaggagtaccagggcgtgtacatcgactccgactgcctgaccgaggtggccgtgtactacctgcagaagatcctggactccgagaaccacaccatcgtgttccacaacctgaagttcgacatgcacttctacaagtaccacctgggcctgaccttcgacaaggcccacaaggagcggcggctgcacgacaccatgctgcagcactacgtgctggacgagcggcggggcacccacggcctgaagtccctggccatgaagtacaccgacatgggcgactacgacttcgagctggacaagttcaaggacgactactgcaaggcccacaagatcaagaaggaggacttcacctacgacctgatccccttcgacatcatgtggccctacgccgccaaggacaccgacgccaccatccggctgcacaacttcttcctgcccaagatcgagaagaacgagaagctgtgctccctgtactacgacgtgctgatgcccggctgcgtgttcctgcagcgggtggaggaccggggcgtgcccatctccatcgaccggctgaaggaggcccagtaccagctgacccacaacctgaacaaggcccgggagaagctgtacacctaccccgaggtgaagcagctggagcaggaccagaacgaggccttcaaccccaactccgtgaagcagctgcgggtgctgctgttcgactacgtgggcctgacccccaccggcaagctgaccgacaccggcgccgactccaccgacgccgaggccctgaacgagctggccacccagcaccccatcgccaagaccctgctggagatccggaagctgaccaagctgatctccacctacgtggagaagatcctgctgtccatcgacgccgacggctgcatccggaccggcttccacgagcacatgaccacctccggccggctgtcctcctccggcaagctgaacctgcagcagctgccccgggacgagtccatcatcaagggctgcgtggtggccccccccggctaccgggtgatcgcctgggacctgaccaccgccgaggtgtactacgccgccgtgctgtccggcgaccggaacatgcagcaggtgttcatcaacatgcggaacgagcccgacaagtaccccgacttccactccaacatcgcccacatggtgttcaagctgcagtgcgagccccgggacgtgaagaagctgttccccgccctgcggcaggccgccaaggccatcaccttcggcatcctgtacggctccggccccgccaaggtggcccactccgtgaacgaggccctgctggagcaggccgccaagaccggcgagcccttcgtggagtgcaccgtggccgacgccaaggagtacatcgagacctacttcggccagttcccccagctgaagcggtggatcgacaagtgccacgaccagatcaagaaccacggcttcatctactcccacttcggccggaagcggcggctgcacaacatccactccgaggaccggggcgtgcagggcgaggagatccggtccggcttcaacgccatcatccagtccgcctcctccgactccctgctgctgggcgccgtggacgccgacaacgagatcatctccctgggcctggagcaggagatgaagatcgtgatgctggtgcacgactccgtggtggccatcgtgcgggaggacctgatcgaccagtacaacgagatcctgatccggaacatccagaaggaccggggcatctccatccccggctgccccatcggcatcgactccgactccgaggccggcggctcccgggactactcctgcggcaagatgaagaagcagcacccctccatcgcctgcatcgacgacgacgagtacacccggtacgtgaagggcgtgctgctggacgccgagttcgagtacaagaagctggccgccatggacaaggagcaccccgaccactccaagtacaaggacgacaagttcatcgccgtgtgcaaggacctggacaacgtgaagcggatcctgggcgcctccggctccgagacccccggcacctccgagtccgccacccccgagtcccccaagaagaagcggaaggtgtagctagcaccagcctcaagaacacccgaatggagtctctaagctacataataccaacttacactttacaaaatgttgtcccccaaaatgtagccattcgtatctgctcctaataaaaagaaagtttcttcacattctctcgagaaaaaaaaaaaatggaaaaaaaaaaaacggaaaaaaaaaaaaggtaaaaaaaaaaaatataaaaaaaaaaaacataaaaaaaaaaaacgaaaaaaaaaaaacgtaaaaaaaaaaaactcaaaaaaaaaaaagataaaaaaaaaaaacctaaaaaaaaaaaatgtaaaaaaaaaaaagggaaaaaaaaaaaacgcaaaaaaaaaaaacacaaaaaaaaaaaatgcaaaaaaaaaaaatcgaaaaaaaaaaaatctaaaaaaaaaaaacgaaaaaaaaaaaacccaaaaaaaaaaaagacaaaaaaaaaaaatagaaaaaaaaaaagttaaaaaaaaaaaactgaaaaaaaaaaaatttaaaaaaaaaaaatctag

SEQ ID NO: 2509 - DNA, 7579 bp, synthetic construct
  misc_feature 1..7579: note = Synthetic
  source 1..7579: mol_type = other DNA
aggaagctcagaataaacgctcaactttggccggatctgccaccatgaagcggcccgccgccaccaagaaggccggccaggccaagaagaagaaggacaagaagtactccatcggcctggacatcggcaccaactccgtgggctgggccgtgatcaccgacgagtacaaggtgccctccaagaagttcaaggtgctgggcaacaccgaccggcactccatcaagaagaacctgatcggcgccctgctgttcgactccggcgagaccgccgaggccacccggctgaagcggaccgcccggcggcggtacacccggcggaagaaccggatctgctacctgcaggagatcttctccaacgagatggccaaggtggacgactccttcttccaccggctggaggagtccttcctggtggaggaggacaagaagcacgagcggcaccccatcttcggcaacatcgtggacgaggtggcctaccacgagaagtaccccaccatctaccacctgcggaagaagctggtggactccaccgacaaggccgacctgcggctgatctacctggccctggcccacatgatcaagttccggggccacttcctgatcgagggcgacctgaaccccgacaactccgacgtggacaagctgttcatccagctggtgcagacctacaaccagctgttcgaggagaaccccatcaacgcctccggcgtggacgccaaggccatcctgtccgcccggctgtccaagtcccggcggctggagaacctgatcgcccagctgcccggcgagaagaagaacggcctgttcggcaacctgatcgccctgtccctgggcctgacccccaacttcaagtccaacttcgacctggccgaggacgccaagctgcagctgtccaaggacacctacgacgacgacctggacaacctgctggcccagatcggcgaccagtacgccgacctgttcctggccgccaagaacctgtccgacgccatcctgctgtccgacatcctgcgggtgaacaccgagatcaccaaggcccccctgtccgcctccatgatcaagcggtacgacgagcaccaccaggacctgaccctgctgaaggccctggtgcggcagcagctgcccgagaagtacaaggagatcttcttcgaccagtccaagaacggctacgccggctacatcgacggcggcgcctcccaggaggagttctacaagttcatcaagcccatcctggagaagatggacggcaccgaggagctgctggtgaagctgaaccgggaggacctgctgcggaagcagcggaccttcgacaacggctccatcccccaccagatccacctgggcgagctgcacgccatcctgcggcggcaggaggacttctaccccttcctgaaggacaaccgggagaagatcgagaagatcctgaccttccggatcccctactacgtgggccccctggcccggggcaactcccggttcgcctggatgacccggaagtccgaggagaccatcaccccctggaacttcgaggaggtggtggacaagggcgcctccgcccagtccttcatcgagcggatgaccaacttcgacaagaacctgcccaacgagaaggtgctgcccaagcactccctgctgtacgagtacttcaccgtgtacaacgagctgaccaaggtgaagtacgtgaccgagggcatgcggaagcccgccttcctgtccggcgagcagaagaaggccatcgtggacctgctgttcaagaccaaccggaaggtgaccgtgaagcagctgaaggaggactacttcaagaagatcgagtgcttcgactccgtggagatctccggcgtggaggaccggttcaacgcctccctgggcacctaccacgacctgctgaagatcatcaaggacaaggacttcctggacaacgaggagaacgaggacatcctggaggacatcgtgctgaccctgaccctgttcgaggaccgggagatgatcgaggagcggctgaagacctacgcccacctgttcgacgacaaggtgatgaagcagctgaagcggcggcggtacaccggctggggccggctgtcccggaagctgatcaacggcatccgggacaagcagtccggcaagaccatcctggacttcctgaagtccgacggcttcgccaaccggaacttcatgcagctgatccacgacgactccctgaccttcaaggaggacatccagaaggcccaggtgtccggccagggcgactccctgcacgagcacatcgccaacctggccggctcccccgccatcaagaagggcatcctgcagaccgtgaaggtggtggacgagctggtgaaggtgatgggccggcacaagcccgagaacatcgtgatcgagatggcccgggagaaccagaccacccagaagggccagaagaactcccgggagcggatgaagcggatcgaggagggcatcaaggagctgggctcccagatcctgaaggagcaccccgtggagaacacccagctgcagaacgagaagctgtacctgtactacctgcagaacggccgggacatgtacgtggaccaggagctggacatcaaccggctgtccgactacgacgtggacgccatcgtgccccagtccttcctgaaggacgactccatcgacaacaaggtgctgacccggtccgacaagaaccggggcaagtccgacaacgtgccctccgaggaggtggtgaagaagatgaagaactactggcggcagctgctgaacgccaagctgatcacccagcggaagttcgacaacctgaccaaggccgagcggggcggcctgtccgagctggacaaggccggcttcatcaagcggcagctggtggagacccggcagatcaccaagcacgtggcccagatcctggactcccggatgaacaccaagtacgacgagaacgacaagctgatccgggaggtgaaggtgatcaccctgaagtccaagctggtgtccgacttccggaaggacttccagttctacaaggtgcgggagatcaacaactaccaccacgcccacgacgcctacctgaacgccgtggtgggcaccgccctgatcaagaagtaccccaagctggagtccgagttcgtgtacggcgactacaaggtgtacgacgtgcggaagatgatcgccaagtccgagcaggagatcggcaaggccaccgccaagtacttcttctactccaacatcatgaacttcttcaagaccgagatcaccctggccaacggcgagatccggaagcggcccctgatcgagaccaacggcgagaccggcgagatcgtgtgggacaagggccgggacttcgccaccgtgcggaaggtgctgtccatgccccaggtgaacatcgtgaagaagaccgaggtgcagaccggcggcttctccaaggagtccatcctgcccaagcggaactccgacaagctgatcgcccggaagaaggactgggaccccaagaagtacggcggcttcgactcccccaccgtggcctactccgtgctggtggtggccaaggtggagaagggcaagtccaagaagctgaagtccgtgaaggagctgctgggcatcaccatcatggagcggtcctccttcgagaagaaccccatcgacttcctggaggccaagggctacaaggaggtgaagaaggacctgatcatcaagctgcccaagtactccctgttcgagctggagaacggccggaagcggatgctggcctccgccggcgagctgcagaagggcaacgagctggccctgccctccaagtacgtgaacttcctgtacctggcctcccactacgagaagctgaagggctcccccgaggacaacgagcagaagcagctgttcgtggagcagcacaagcactacctggacgagatcatcgagcagatctccgagttctccaagcgggtgatcctggccgacgccaacctggacaaggtgctgtccgcctacaacaagcaccgggacaagcccatccgggagcaggccgagaacatcatccacctgttcaccctgaccaacctgggcgcccccgccgccttcaagtacttcgacaccaccatcgaccggaagcggtacacctccaccaaggaggtgctggacgccaccctgatccaccagtccatcaccggcctgtacgagacccggatcgacctgtcccagctgggcggcgacggcgcccccgagtccgccaccgagtccggcggcacctccaccgagtccgagggctccgccggccccaagaagaagcggaaggtgacctccaccgagtccgagggctccgccggctccgccggctccacctccggctcctcctccggcatgaagatcgccgtggtggacaaggccctgaacaacacccggtacgacaagcacttccagctgtacggcgaggaggtggacgtgttccacatgtgcaacgagaagctgtccggccggctgctgaagaagcacatcaccatcggcacccccgagaaccccttcgaccccaacgactacgacttcgtgatcctggtgggcgccgagcccttcctgtacttcgccggcaagaagggcatcggcgactacaccggcaagcgggtggagtacaacggctacgccaactggatcgcctccatctcccccgcccagctgcacttcaagcccgagatgaagcccgtgttcgacgccaccgtggagaacatccacgacatcatcaacggccgggagaagatcgccaaggccggcgactaccggcccatcaccgaccccgacgaggccgaggagtacatcaagatggtgtacaacatggtgatcggccccgtggccttcgcctccgccacctccgccctgtactgccgggacggctacctgctgggcgtgtccatctcccaccaggagtaccagggcgtgtacatcgactccgactgcctgaccgaggtggccgtgtactacctgcagaagatcctggactccgagaaccacaccatcgtgttccacaacctgaagttcgacatgcacttctacaagtaccacctgggcctgaccttcgacaaggcccacaaggagcggcggctgcacgacaccatgctgcagcactacgtgctggacgagcggcggggcacccacggcctgaagtccctggccatgaagtacaccgacatgggcgactacgacttcgagctggacaagttcaaggacgactactgcaaggcccacaagatcaagaaggaggacttcacctacgacctgatccccttcgacatcatgtggccctacgccgccaaggacaccgacgccaccatccggctgcacaacttcttcctgcccaagatcgagaagaacgagaagctgtgctccctgtactacgacgtgctgatgcccggctgcgtgttcctgcagcgggtggaggaccggggcgtgcccatctccatcgaccggctgaaggaggcccagtaccagctgacccacaacctgaacaaggcccgggagaagctgtacacctaccccgaggtgaagcagctggagcaggaccagaacgaggccttcaaccccaactccgtgaagcagctgcgggtgctgctgttcgactacgtgggcctgacccccaccggcaagctgaccgacaccggcgccgactccaccgacgccgaggccctgaacgagctggccacccagcaccccatcgccaagaccctgctggagatccggaagctgaccaagctgatctccacctacgtggagaagatcctgctgtccatcgacgccgacggctgcatccggaccggcttccacgagcacatgaccacctccggccggctgtcctcctccggcaagctgaacctgcagcagctgccccgggacgagtccatcatcaagggctgcgtggtggccccccccggctaccgggtgatcgcctgggacctgaccaccgccgaggtgtactacgccgccgtgctgtccggcgaccggaacatgcagcaggtgttcatcaacatgcggaacgagcccgacaagtaccccgacttccactccaacatcgcccacatggtgttcaagctgcagtgcgagccccgggacgtgaagaagctgttccccgccctgcggcaggccgccaaggccatcaccttcggcatcctgtacggctccggccccgccaaggtggcccactccgtgaacgaggccctgctggagcaggccgccaagaccggcgagcccttcgtggagtgcaccgtggccgacgccaaggagtacatcgagacctacttcggccagttcccccagctgaagcggtggatcgacaagtgccacgaccagatcaagaaccacggcttcatctactcccacttcggccggaagcggcggctgcacaacatccactccgaggaccggggcgtgcagggcgaggagatccggtccggcttcaacgccatcatccagtccgcctcctccgactccctgctgctgggcgccgtggacgccgacaacgagatcatctccctgggcctggagcaggagatgaagatcgtgatgctggtgcacgactccgtggtggccatcgtgcgggaggacctgatcgaccagtacaacgagatcctgatccggaacatccagaaggaccggggcatctccatccccggctgccccatcggcatcgactccgactccgaggccggcggctcccgggactactcctgcggcaagatgaagaagcagcacccctccatcgcctgcatcgacgacgacgagtacacccggtacgtgaagggcgtgctgctggacgccgagttcgagtacaagaagctggccgccatggacaaggagcaccccgaccactccaagtacaaggacgacaagttcatcgccgtgtgcaaggacctggacaacgtgaagcggatcctgggcgccggcggcggctccggcaagcggaccgccgacggctccggcggcggctcccccaagaagaagcggaaggtgcctgccgctaagagagtgaagctggactccgagtccgccacccccgagtccgtgtccggctggcggctgttcaagaagatctcctagctagcaccagcctcaagaacacccgaatggagtctctaagctacataataccaacttacactttacaaaatgttgtcccccaaaatgtagccattcgtatctgctcctaataaaaagaaagtttcttcacattctctcgagaaaaaaaaaaaatggaaaaaaaaaaaacggaaaaaaaaaaaaggtaaaaaaaaaaaatataaaaaaaaaaaacataaaaaaaaaaaacgaaaaaaaaaaaacgtaaaaaaaaaaaactcaaaaaaaaaaaagataaaaaaaaaaaacctaaaaaaaaaaaatgtaaaaaaaaaaaagggaaaaaaaaaaaacgcaaaaaaaaaaaacacaaaaaaaaaaaatgcaaaaaaaaaaaatcgaaaaaaaaaaaatctaaaaaaaaaaaacgaaaaaaaaaaaacccaaaaaaaaaaaagacaaaaaaaaaaaatagaaaaaaaaaaagttaaaaaaaaaaaactgaaaaaaaaaaaatttaaaaaaaaaaaatctag

SEQ ID NO: 2510 - DNA, 7310 bp, synthetic construct
  misc_feature 1..7310: note = Synthetic
  source 1..7310: mol_type = other DNA
aggaagctcagaataaacgctcaactttggccggatctgccaccatgaagcggcccgccgccaccaagaaggccggccaggccaagaagaagaaggacaagaagtactccatcggcctggacatcggcaccaactccgtgggctgggccgtgatcaccgacgagtacaaggtgccctccaagaagttcaaggtgctgggcaacaccgaccggcactccatcaagaagaacctgatcggcgccctgctgttcgactccggcgagaccgccgaggccacccggctgaagcggaccgcccggcggcggtacacccggcggaagaaccggatctgctacctgcaggagatcttctccaacgagatggccaaggtggacgactccttcttccaccggctggaggagtccttcctggtggaggaggacaagaagcacgagcggcaccccatcttcggcaacatcgtggacgaggtggcctaccacgagaagtaccccaccatctaccacctgcggaagaagctggtggactccaccgacaaggccgacctgcggctgatctacctggccctggcccacatgatcaagttccggggccacttcctgatcgagggcgacctgaaccccgacaactccgacgtggacaagctgttcatccagctggtgcagacctacaaccagctgttcgaggagaaccccatcaacgcctccggcgtggacgccaaggccatcctgtccgcccggctgtccaagtcccggcggctggagaacctgatcgcccagctgcccggcgagaagaagaacggcctgttcggcaacctgatcgccctgtccctgggcctgacccccaacttcaagtccaacttcgacctggccgaggacgccaagctgcagctgtccaaggacacctacgacgacgacctggacaacctgctggcccagatcggcgaccagtacgccgacctgttcctggccgccaagaacctgtccgacgccatcctgctgtccgacatcctgcgggtgaacaccgagatcaccaaggcccccctgtccgcctccatgatcaagcggtacgacgagcaccaccaggacctgaccctgctgaaggccctggtgcggcagcagctgcccgagaagtacaaggagatcttcttcgaccagtccaagaacggctacgccggctacatcgacggcggcgcctcccaggaggagttctacaagttcatcaagcccatcctggagaagatggacggcaccgaggagctgctggtgaagctgaaccgggaggacctgctgcggaagcagcggaccttcgacaacggctccatcccccaccagatccacctgggcgagctgcacgccatcctgcggcggcaggaggacttctaccccttcctgaaggacaaccgggagaagatcgagaagatcctgaccttccggatcccctactacgtgggccccctggcccggggcaactcccggttcgcctggatgacccggaagtccgaggagaccatcaccccctggaacttcgaggaggtggtggacaagggcgcctccgcccagtccttcatcgagcggatgaccaacttcgacaagaacctgcccaacgagaaggtgctgcccaagcactccctgctgtacgagtacttcaccgtgtacaacgagctgaccaaggtgaagtacgtgaccgagggcatgcggaagcccgccttcctgtccggcgagcagaagaaggccatcgtggacctgctgttcaagaccaaccggaaggtgaccgtgaagcagctgaaggaggactacttcaagaagatcgagtgcttcgactccgtggagatctccggcgtggaggaccggttcaacgcctccctgggcacctaccacgacctgctgaagatcatcaaggacaaggacttcctggacaacgaggagaacgaggacatcctggaggacatcgtgctgaccctgaccctgttcgaggaccgggagatgatcgaggagcggctgaagacctacgcccacctgttcgacgacaaggtgatgaagcagctgaagcggcggcggtacaccggctggggccggctgtcccggaagctgatcaacggcatccgggacaagcagtccggcaagaccatcctggacttcctgaagtccgacggcttcgccaaccggaacttcatgcagctgatccacgacgactccctgaccttcaaggaggacatccagaaggcccaggtgtccggccagggcgactccctgcacgagcacatcgccaacctggccggctcccccgccatcaagaagggcatcctgcagaccgtgaaggtggtggacgagctggtgaaggtgatgggccggcacaagcccgagaacatcgtgatcgagatggcccgggagaaccagaccacccagaagggccagaagaactcccgggagcggatgaagcggatcgaggagggcatcaaggagctgggctcccagatcctgaaggagcaccccgtggagaacacccagctgcagaacgagaagctgtacctgtactacctgcagaacggccgggacatgtacgtggaccaggagctggacatcaaccggctgtccgactacgacgtggacgccatcgtgccccagtccttcctgaaggacgactccatcgacaacaaggtgctgacccggtccgacaagaaccggggcaagtccgacaacgtgccctccgaggaggtggtgaagaagatgaagaactactggcggcagctgctgaacgccaagctgatcacccagcggaagttcgacaacctgaccaaggccgagcggggcggcctgtccgagctggacaaggccggcttcatcaagcggcagctggtggagacccggcagatcaccaagcacgtggcccagatcctggactcccggatgaacaccaagtacgacgagaacgacaagctgatccgggaggtgaaggtgatcaccctgaagtccaagctggtgtccgacttccggaaggacttccagttctacaaggtgcgggagatcaacaactaccaccacgcccacgacgcctacctgaacgccgtggtgggcaccgccctgatcaagaagtaccccaagctggagtccgagttcgtgtacggcgactacaaggtgtacgacgtgcggaagatgatcgccaagtccgagcaggagatcggcaaggccaccgccaagtacttcttctactccaacatcatgaacttcttcaagaccgagatcaccctggccaacggcgagatccggaagcggcccctgatcgagaccaacggcgagaccggcgagatcgtgtgggacaagggccgggacttcgccaccgtgcggaaggtgctgtccatgccccaggtgaacatcgtgaagaagaccgaggtgcagaccggcggcttctccaaggagtccatcctgcccaagcggaactccgacaagctgatcgcccggaagaaggactgggaccccaagaagtacggcggcttcgactcccccaccgtggcctactccgtgctggtggtggccaaggtggagaagggcaagtccaagaagctgaagtccgtgaaggagctgctgggcatcaccatcatggagcggtcctccttcgagaagaaccccatcgacttcctggaggccaagggctacaaggaggtgaagaaggacctgatcatcaagctgcccaagtactccctgttcgagctggagaacggccggaagcggatgctggcctccgccggcgagctgcagaagggcaacgagctggccctgccctccaagtacgtgaacttcctgtacctggcctcccactacgagaagctgaagggctcccccgaggacaacgagcagaagcagctgttcgtggagcagcacaagcactacctggacgagatcatcgagcagatctccgagttctccaagcgggtgatcctggccgacgccaacctggacaaggtgctgtccgcctacaacaagcaccgggacaagcccatccgggagcaggccgagaacatcatccacctgttcaccctgaccaacctgggcgcccccgccgccttcaagtacttcgacaccaccatcgaccggaagcggtacacctccaccaaggaggtgctggacgccaccctgatccaccagtccatcaccggcctgtacgagacccggatcgacctgtcccagctgggcggcgacggcgcccccgagtccgccaccgagtccggcggcacctccaccgagtccgagggctccgccggccccaagaagaagcggaaggtgacctccaccgagtccgagggctccgccggctccgccggctccacctccggctcctcctccggcatgaagatcgccgtggtggacaaggccctgaacaacacccggtacgacaagcacttccagctgtacggcgaggaggtggacgtgttccacatgtgcaacgagaagctgtccggccggctgctgaagaagcacatcaccatcggcacccccgagaaccccttcgaccccaacgactacgacttcgtgatcctggtgggcgccgagcccttcctgtacttcgccggcaagaagggcatcggcgactacaccggcaagcgggtggagtacaacggctacgccaactggatcgcctccatctcccccgcccagctgcacttcaagcccgagatgaagcccgtgttcgacgccaccgtggagaacatccacgacatcatcaacggccgggagaagatcgccaaggccggcgactaccggcccatcaccgaccccgacgaggccgaggagtacatcaagatggtgtacaacatggtgatcggccccgtggccttcgcctccgccacctccgccctgtactgccgggacggctacctgctgggcgtgtccatctcccaccaggagtaccagggcgtgtacatcgactccgactgcctgaccgaggtggccgtgtactacctgcagaagatcctggactccgagaaccacaccatcgtgttccacaacctgaagttcgacatgcacttctacaagtaccacctgggcctgaccttcgacaaggcccacaaggagcggcggctgcacgacaccatgctgcagcactacgtgctggacgagcggcggggcacccacggcctgaagtccctggccatgaagtacaccgacatgggcgactacgacttcgagctggacaagttcaaggacgactactgcaaggcccacaagatcaagaaggaggacttcacctacgacctgatccccttcgacatcatgtggccctacgccgccaaggacaccgacgccaccatccggctgcacaacttcttcctgcccaagatcgagaagaacgagaagctgtgctccctgtactacgacgtgctgatgcccggctgcgtgttcctgcagcgggtggaggaccggggcgtgcccatctccatcgaccggctgaaggaggcccagtaccagctgacccacaacctgaacaaggcccgggagaagctgtacacctaccccgaggtgaagcagctggagcaggaccagaacgaggccttcaaccccaactccgtgaagcagctgcgggtgctgctgttcgactacgtgggcctgacccccaccggcaagctgaccgacaccggcgccgactccaccgacgccgaggccctgaacgagctggccacccagcaccccatcgccaagaccctgctggagatccggaagctgaccaagctgatctccacctacgtggagaagatcctgctgtccatcgacgccgacggctgcatccggaccggcttccacgagcacatgaccacctccggccggctgtcctcctccggcaagctgaacctgcagcagctgccccgggacgagtccatcatcaagggctgcgtggtggccccccccggctaccgggtgatcgcctgggacctgaccaccgccgaggtgtactacgccgccgtgctgtccggcgaccggaacatgcagcaggtgttcatcaacatgcggaacgagcccgacaagtaccccgacttccactccaacatcgcccacatggtgttcaagctgcagtgcgagccccgggacgtgaagaagctgttccccgccctgcggcaggccgccaaggccatcaccttcggcatcctgtacggctccggccccgccaaggtggcccactccgtgaacgaggccctgctggagcaggccgccaagaccggcgagcccttcgtggagtgcaccgtggccgacgccaaggagtacatcgagacctacttcggccagttcccccagctgaagcggtggatcgacaagtgccacgaccagatcaagaaccacggcttcatctactcccacttcggccggaagcggcggctgcacaacatccactccgaggaccggggcgtgcagggcgaggagatccggtccggcttcaacgccatcatccagtccgcctcctccgactccctgctgctgggcgccgtggacgccgacaacgagatcatctccctgggcctggagcaggagatgaagatcgtgatgctggtgcacgactccgtggtggccatcgtgcgggaggacctgatcgaccagtacaacgagatcctgatccggaacatccagaaggaccggggcatctccatccccggctgccccatcggcatcgactccgactccgaggccggcggctcccgggactactcctgcggcaagatgaagaagcagcacccctccatcgcctgcatcgacgacgacgagtacacccggtacgtgaagggcgtgctgctggacgccgagttcgagtacaagaagctggccgccatggacaaggagcaccccgaccactccaagtacaaggacgacaagttcatcgccgtgtgcaaggacctggacaacgtgaagcggatcctgggcgccggcggcggctccggcaagcggaccgccgacggctccggcggcggctcccccaagaagaagcggaaggtgcctgccgctaagagagtgaagctggactccgagtccgccacccccgagtccgtgtccggctggcggctgttcaagaagatctcctagctagcaccagcctcaagaacacccgaatggagtctctaagctacataataccaacttacactttacaaaatgttgtcccccaaaatgtagccattcgtatctgctcctaataaaaagaaagtttcttcacattctctcgagaaaaaaaaaaaaaaaaaaaaaaaaaaaaaaaaaaaaaaaaaaaaaaaaaaaaaaaaaaaaaaaaaaaaaaaaaaaaaaaaaaaaaaaaaaaaaaaaaaaatctag

SEQ ID NO: 2511 - DNA, 7619 bp, synthetic construct
  misc_feature 1..7619: note = Synthetic
  source 1..7619: mol_type = other DNA
aggactcactatttgttttcgcgcccagttgcaaaaagtgtcgaagctcagaataaacgctcaactttggccggatctgccaccatgaagcggcccgccgccaccaagaaggccggccaggccaagaagaagaaggacaagaagtactccatcggcctggacatcggcaccaactccgtgggctgggccgtgatcaccgacgagtacaaggtgccctccaagaagttcaaggtgctgggcaacaccgaccggcactccatcaagaagaacctgatcggcgccctgctgttcgactccggcgagaccgccgaggccacccggctgaagcggaccgcccggcggcggtacacccggcggaagaaccggatctgctacctgcaggagatcttctccaacgagatggccaaggtggacgactccttcttccaccggctggaggagtccttcctggtggaggaggacaagaagcacgagcggcaccccatcttcggcaacatcgtggacgaggtggcctaccacgagaagtaccccaccatctaccacctgcggaagaagctggtggactccaccgacaaggccgacctgcggctgatctacctggccctggcccacatgatcaagttccggggccacttcctgatcgagggcgacctgaaccccgacaactccgacgtggacaagctgttcatccagctggtgcagacctacaaccagctgttcgaggagaaccccatcaacgcctccggcgtggacgccaaggccatcctgtccgcccggctgtccaagtcccggcggctggagaacctgatcgcccagctgcccggcgagaagaagaacggcctgttcggcaacctgatcgccctgtccctgggcctgacccccaacttcaagtccaacttcgacctggccgaggacgccaagctgcagctgtccaaggacacctacgacgacgacctggacaacctgctggcccagatcggcgaccagtacgccgacctgttcctggccgccaagaacctgtccgacgccatcctgctgtccgacatcctgcgggtgaacaccgagatcaccaaggcccccctgtccgcctccatgatcaagcggtacgacgagcaccaccaggacctgaccctgctgaaggccctggtgcggcagcagctgcccgagaagtacaaggagatcttcttcgaccagtccaagaacggctacgccggctacatcgacggcggcgcctcccaggaggagttctacaagttcatcaagcccatcctggagaagatggacggcaccgaggagctgctggtgaagctgaaccgggaggacctgctgcggaagcagcggaccttcgacaacggctccatcccccaccagatccacctgggcgagctgcacgccatcctgcggcggcaggaggacttctaccccttcctgaaggacaaccgggagaagatcgagaagatcctgaccttccggatcccctactacgtgggccccctggcccggggcaactcccggttcgcctggatgacccggaagtccgaggagaccatcaccccctggaacttcgaggaggtggtggacaagggcgcctccgcccagtccttcatcgagcggatgaccaacttcgacaagaacctgcccaacgagaaggtgctgcccaagcactccctgctgtacgagtacttcaccgtgtacaacgagctgaccaaggtgaagtacgtgaccgagggcatgcggaagcccgccttcctgtccggcgagcagaagaaggccatcgtggacctgctgttcaagaccaaccggaaggtgaccgtgaagcagctgaaggaggactacttcaagaagatcgagtgcttcgactccgtggagatctccggcgtggaggaccggttcaacgcctccctgggcacctaccacgacctgctgaagatcatcaaggacaaggacttcctggacaacgaggagaacgaggacatcctggaggacatcgtgctgaccctgaccctgttcgaggaccgggagatgatcgaggagcggctgaagacctacgcccacctgttcgacgacaaggtgatgaagcagctgaagcggcggcggtacaccggctggggccggctgtcccggaagctgatcaacggcatccgggacaagcagtccggcaagaccatcctggacttcctgaagtccgacggcttcgccaaccggaacttcatgcagctgatccacgacgactccctgaccttcaaggaggacatccagaaggcccaggtgtccggccagggcgactccctgcacgagcacatcgccaacctggccggctcccccgccatcaagaagggcatcctgcagaccgtgaaggtggtggacgagctggtgaaggtgatgggccggcacaagcccgagaacatcgtgatcgagatggcccgggagaaccagaccacccagaagggccagaagaactcccgggagcggatgaagcggatcgaggagggcatcaaggagctgggctcccagatcctgaaggagcaccccgtggagaacacccagctgcagaacgagaagctgtacctgtactacctgcagaacggccgggacatgtacgtggaccaggagctggacatcaaccggctgtccgactacgacgtggacgccatcgtgccccagtccttcctgaaggacgactccatcgacaacaaggtgctgacccggtccgacaagaaccggggcaagtccgacaacgtgccctccgaggaggtggtgaagaagatgaagaactactggcggcagctgctgaacgccaagctgatcacccagcggaagttcgacaacctgaccaaggccgagcggggcggcctgtccgagctggacaaggccggcttcatcaagcggcagctggtggagacccggcagatcaccaagcacgtggcccagatcctggactcccggatgaacaccaagtacgacgagaacgacaagctgatccgggaggtgaaggtgatcaccctgaagtccaagctggtgtccgacttccggaaggacttccagttctacaaggtgcgggagatcaacaactaccaccacgcccacgacgcctacctgaacgccgtggtgggcaccgccctgatcaagaagtaccccaagctggagtccgagttcgtgtacggcgactacaaggtgtacgacgtgcggaagatgatcgccaagtccgagcaggagatcggcaaggccaccgccaagtacttcttctactccaacatcatgaacttcttcaagaccgagatcaccctggccaacggcgagatccggaagcggcccctgatcgagaccaacggcgagaccggcgagatcgtgtgggacaagggccgggacttcgccaccgtgcggaaggtgctgtccatgccccaggtgaacatcgtgaagaagaccgaggtgcagaccggcggcttctccaaggagtccatcctgcccaagcggaactccgacaagctgatcgcccggaagaaggactgggaccccaagaagtacggcggcttcgactcccccaccgtggcctactccgtgctggtggtggccaaggtggagaagggcaagtccaagaagctgaagtccgtgaaggagctgctgggcatcaccatcatggagcggtcctccttcgagaagaaccccatcgacttcctggaggccaagggctacaaggaggtgaagaaggacctgatcatcaagctgcccaagtactccctgttcgagctggagaacggccggaagcggatgctggcctccgccggcgagctgcagaagggcaacgagctggccctgccctccaagtacgtgaacttcctgtacctggcctcccactacgagaagctgaagggctcccccgaggacaacgagcagaagcagctgttcgtggagcagcacaagcactacctggacgagatcatcgagcagatctccgagttctccaagcgggtgatcctggccgacgccaacctggacaaggtgctgtccgcctacaacaagcaccgggacaagcccatccgggagcaggccgagaacatcatccacctgttcaccctgaccaacctgggcgcccccgccgccttcaagtacttcgacaccaccatcgaccggaagcggtacacctccaccaaggaggtgctggacgccaccctgatccaccagtccatcaccggcctgtacgagacccggatcgacctgtcccagctgggcggcgacggcgcccccgagtccgccaccgagtccggcggcacctccaccgagtccgagggctccgccggccccaagaagaagcggaaggtgacctccaccgagtccgagggctccgccggctccgccggctccacctccggctcctcctccggcatgaagatcgccgtggtggacaaggccctgaacaacacccggtacgacaagcacttccagctgtacggcgaggaggtggacgtgttccacatgtgcaacgagaagctgtccggccggctgctgaagaagcacatcaccatcggcacccccgagaaccccttcgaccccaacgactacgacttcgtgatcctggtgggcgccgagcccttcctgtacttcgccggcaagaagggcatcggcgactacaccggcaagcgggtggagtacaacggctacgccaactggatcgcctccatctcccccgcccagctgcacttcaagcccgagatgaagcccgtgttcgacgccaccgtggagaacatccacgacatcatcaacggccgggagaagatcgccaaggccggcgactaccggcccatcaccgaccccgacgaggccgaggagtacatcaagatggtgtacaacatggtgatcggccccgtggccttcgcctccgccacctccgccctgtactgccgggacggctacctgctgggcgtgtccatctcccaccaggagtaccagggcgtgtacatcgactccgactgcctgaccgaggtggccgtgtactacctgcagaagatcctggactccgagaaccacaccatcgtgttccacaacctgaagttcgacatgcacttctacaagtaccacctgggcctgaccttcgacaaggcccacaaggagcggcggctgcacgacaccatgctgcagcactacgtgctggacgagcggcggggcacccacggcctgaagtccctggccatgaagtacaccgacatgggcgactacgacttcgagctggacaagttcaaggacgactactgcaaggcccacaagatcaagaaggaggacttcacctacgacctgatccccttcgacatcatgtggccctacgccgccaaggacaccgacgccaccatccggctgcacaacttcttcctgcccaagatcgagaagaacgagaagctgtgctccctgtactacgacgtgctgatgcccggctgcgtgttcctgcagcgggtggaggaccggggcgtgcccatctccatcgaccggctgaaggaggcccagtaccagctgacccacaacctgaacaaggcccgggagaagctgtacacctaccccgaggtgaagcagctggagcaggaccagaacgaggccttcaaccccaactccgtgaagcagctgcgggtgctgctgttcgactacgtgggcctgacccccaccggcaagctgaccgacaccggcgccgactccaccgacgccgaggccctgaacgagctggccacccagcaccccatcgccaagaccctgctggagatccggaagctgaccaagctgatctccacctacgtggagaagatcctgctgtccatcgacgccgacggctgcatccggaccggcttccacgagcacatgaccacctccggccggctgtcctcctccggcaagctgaacctgcagcagctgccccgggacgagtccatcatcaagggctgcgtggtggccccccccggctaccgggtgatcgcctgggacctgaccaccgccgaggtgtactacgccgccgtgctgtccggcgaccggaacatgcagcaggtgttcatcaacatgcggaacgagcccgacaagtaccccgacttccactccaacatcgcccacatggtgttcaagctgcagtgcgagccccgggacgtgaagaagctgttccccgccctgcggcaggccgccaaggccatcaccttcggcatcctgtacggctccggccccgccaaggtggcccactccgtgaacgaggccctgctggagcaggccgccaagaccggcgagcccttcgtggagtgcaccgtggccgacgccaaggagtacatcgagacctacttcggccagttcccccagctgaagcggtggatcgacaagtgccacgaccagatcaagaaccacggcttcatctactcccacttcggccggaagcggcggctgcacaacatccactccgaggaccggggcgtgcagggcgaggagatccggtccggcttcaacgccatcatccagtccgcctcctccgactccctgctgctgggcgccgtggacgccgacaacgagatcatctccctgggcctggagcaggagatgaagatcgtgatgctggtgcacgactccgtggtggccatcgtgcgggaggacctgatcgaccagtacaacgagatcctgatccggaacatccagaaggaccggggcatctccatccccggctgccccatcggcatcgactccgactccgaggccggcggctcccgggactactcctgcggcaagatgaagaagcagcacccctccatcgcctgcatcgacgacgacgagtacacccggtacgtgaagggcgtgctgctggacgccgagttcgagtacaagaagctggccgccatggacaaggagcaccccgaccactccaagtacaaggacgacaagttcatcgccgtgtgcaaggacctggacaacgtgaagcggatcctgggcgccggcggcggctccggcaagcggaccgccgacggctccggcggcggctcccccaagaagaagcggaaggtgcctgccgctaagagagtgaagctggactccgagtccgccacccccgagtccgtgtccggctggcggctgttcaagaagatctcctagctagcaccagcctcaagaacacccgaatggagtctctaagctacataataccaacttacactttacaaaatgttgtcccccaaaatgtagccattcgtatctgctcctaataaaaagaaagtttcttcacattctctcgagaaaaaaaaaaaatggaaaaaaaaaaaacggaaaaaaaaaaaaggtaaaaaaaaaaaatataaaaaaaaaaaacataaaaaaaaaaaacgaaaaaaaaaaaacgtaaaaaaaaaaaactcaaaaaaaaaaaagataaaaaaaaaaaacctaaaaaaaaaaaatgtaaaaaaaaaaaagggaaaaaaaaaaaacgcaaaaaaaaaaaacacaaaaaaaaaaaatgcaaaaaaaaaaaatcgaaaaaaaaaaaatctaaaaaaaaaaaacgaaaaaaaaaaaacccaaaaaaaaaaaagacaaaaaaaaaaaatagaaaaaaaaaaagttaaaaaaaaaaaactgaaaaaaaaaaaatttaaaaaaaaaaaatctag

SEQ ID NO: 2512 - DNA, 7673 bp, synthetic construct
  misc_feature 1..7673: note = Synthetic
  source 1..7673: mol_type = other DNA
aggaagctcagaataaacgctcaactttggccggatctgccaccatgaagcggcccgccgccaccaagaaggccggccaggccaagaagaagaaggacaagaagtactccatcggcctggacatcggcaccaactccgtgggctgggccgtgatcaccgacgagtacaaggtgccctccaagaagttcaaggtgctgggcaacaccgaccggcactccatcaagaagaacctgatcggcgccctgctgttcgactccggcgagaccgccgaggccacccggctgaagcggaccgcccggcggcggtacacccggcggaagaaccggatctgctacctgcaggagatcttctccaacgagatggccaaggtggacgactccttcttccaccggctggaggagtccttcctggtggaggaggacaagaagcacgagcggcaccccatcttcggcaacatcgtggacgaggtggcctaccacgagaagtaccccaccatctaccacctgcggaagaagctggtggactccaccgacaaggccgacctgcggctgatctacctggccctggcccacatgatcaagttccggggccacttcctgatcgagggcgacctgaaccccgacaactccgacgtggacaagctgttcatccagctggtgcagacctacaaccagctgttcgaggagaaccccatcaacgcctccggcgtggacgccaaggccatcctgtccgcccggctgtccaagtcccggcggctggagaacctgatcgcccagctgcccggcgagaagaagaacggcctgttcggcaacctgatcgccctgtccctgggcctgacccccaacttcaagtccaacttcgacctggccgaggacgccaagctgcagctgtccaaggacacctacgacgacgacctggacaacctgctggcccagatcggcgaccagtacgccgacctgttcctggccgccaagaacctgtccgacgccatcctgctgtccgacatcctgcgggtgaacaccgagatcaccaaggcccccctgtccgcctccatgatcaagcggtacgacgagcaccaccaggacctgaccctgctgaaggccctggtgcggcagcagctgcccgagaagtacaaggagatcttcttcgaccagtccaagaacggctacgccggctacatcgacggcggcgcctcccaggaggagttctacaagttcatcaagcccatcctggagaagatggacggcaccgaggagctgctggtgaagctgaaccgggaggacctgctgcggaagcagcggaccttcgacaacggctccatcccccaccagatccacctgggcgagctgcacgccatcctgcggcggcaggaggacttctaccccttcctgaaggacaaccgggagaagatcgagaagatcctgaccttccggatcccctactacgtgggccccctggcccggggcaactcccggttcgcctggatgacccggaagtccgaggagaccatcaccccctggaacttcgaggaggtggtggacaagggcgcctccgcccagtccttcatcgagcggatgaccaacttcgacaagaacctgcccaacgagaaggtgctgcccaagcactccctgctgtacgagtacttcaccgtgtacaacgagctgaccaaggtgaagtacgtgaccgagggcatgcggaagcccgccttcctgtccggcgagcagaagaaggccatcgtggacctgctgttcaagaccaaccggaaggtgaccgtgaagcagctgaaggaggactacttcaagaagatcgagtgcttcgactccgtggagatctccggcgtggaggaccggttcaacgcctccctgggcacctaccacgacctgctgaagatcatcaaggacaaggacttcctggacaacgaggagaacgaggacatcctggaggacatcgtgctgaccctgaccctgttcgaggaccgggagatgatcgaggagcggctgaagacctacgcccacctgttcgacgacaaggtgatgaagcagctgaagcggcggcggtacaccggctggggccggctgtcccggaagctgatcaacggcatccgggacaagcagtccggcaagaccatcctggacttcctgaagtccgacggcttcgccaaccggaacttcatgcagctgatccacgacgactccctgaccttcaaggaggacatccagaaggcccaggtgtccggccagggcgactccctgcacgagcacatcgccaacctggccggctcccccgccatcaagaagggcatcctgcagaccgtgaaggtggtggacgagctggtgaaggtgatgggccggcacaagcccgagaacatcgtgatcgagatggcccgggagaaccagaccacccagaagggccagaagaactcccgggagcggatgaagcggatcgaggagggcatcaaggagctgggctcccagatcctgaaggagcaccccgtggagaacacccagctgcagaacgagaagctgtacctgtactacctgcagaacggccgggacatgtacgtggaccaggagctggacatcaaccggctgtccgactacgacgtggacgccatcgtgccccagtccttcctgaaggacgactccatcgacaacaaggtgctgacccggtccgacaagaaccggggcaagtccgacaacgtgccctccgaggaggtggtgaagaagatgaagaactactggcggcagctgctgaacgccaagctgatcacccagcggaagttcgacaacctgaccaaggccgagcggggcggcctgtccgagctggacaaggccggcttcatcaagcggcagctggtggagacccggcagatcaccaagcacgtggcccagatcctggactcccggatgaacaccaagtacgacgagaacgacaagctgatccgggaggtgaaggtgatcaccctgaagtccaagctggtgtccgacttccggaaggacttccagttctacaaggtgcgggagatcaacaactaccaccacgcccacgacgcctacctgaacgccgtggtgggcaccgccctgatcaagaagtaccccaagctggagtccgagttcgtgtacggcgactacaaggtgtacgacgtgcggaagatgatcgccaagtccgagcaggagatcggcaaggccaccgccaagtacttcttctactccaacatcatgaacttcttcaagaccgagatcaccctggccaacggcgagatccggaagcggcccctgatcgagaccaacggcgagaccggcgagatcgtgtgggacaagggccgggacttcgccaccgtgcggaaggtgctgtccatgccccaggtgaacatcgtgaagaagaccgaggtgcagaccggcggcttctccaaggagtccatcctgcccaagcggaactccgacaagctgatcgcccggaagaaggactgggaccccaagaagtacggcggcttcgactcccccaccgtggcctactccgtgctggtggtggccaaggtggagaagggcaagtccaagaagctgaagtccgtgaaggagctgctgggcatcaccatcatggagcggtcctccttcgagaagaaccccatcgacttcctggaggccaagggctacaaggaggtgaagaaggacctgatcatcaagctgcccaagtactccctgttcgagctggagaacggccggaagcggatgctggcctccgccggcgagctgcagaagggcaacgagctggccctgccctccaagtacgtgaacttcctgtacctggcctcccactacgagaagctgaagggctcccccgaggacaacgagcagaagcagctgttcgtggagcagcacaagcactacctggacgagatcatcgagcagatctccgagttctccaagcgggtgatcctggccgacgccaacctggacaaggtgctgtccgcctacaacaagcaccgggacaagcccatccgggagcaggccgagaacatcatccacctgttcaccctgaccaacctgggcgcccccgccgccttcaagtacttcgacaccaccatcgaccggaagcggtacacctccaccaaggaggtgctggacgccaccctgatccaccagtccatcaccggcctgtacgagacccggatcgacctgtcccagctgggcggcgacggcgcccccgagtccgccaccgagtccggcggcacctccaccgagtccgagggctccgccggccccaagaagaagcggaaggtgacctccaccgagtccgagggctccgccggctccgccggctccacctccggctcctcctccggcatgaagatcgccgtggtggacaaggccctgaacaacacccggtacgacaagcacttccagctgtacggcgaggaggtggacgtgttccacatgtgcaacgagaagctgtccggccggctgctgaagaagcacatcaccatcggcacccccgagaaccccttcgaccccaacgactacgacttcgtgatcctggtgggcgccgagcccttcctgtacttcgccggcaagaagggcatcggcgactacaccggcaagcgggtggagtacaacggctacgccaactggatcgcctccatctcccccgcccagctgcacttcaagcccgagatgaagcccgtgttcgacgccaccgtggagaacatccacgacatcatcaacggccgggagaagatcgccaaggccggcgactaccggcccatcaccgaccccgacgaggccgaggagtacatcaagatggtgtacaacatggtgatcggccccgtggccttcgcctccgccacctccgccctgtactgccgggacggctacctgctgggcgtgtccatctcccaccaggagtaccagggcgtgtacatcgactccgactgcctgaccgaggtggccgtgtactacctgcagaagatcctggactccgagaaccacaccatcgtgttccacaacctgaagttcgacatgcacttctacaagtaccacctgggcctgaccttcgacaaggcccacaaggagcggcggctgcacgacaccatgctgcagcactacgtgctggacgagcggcggggcacccacggcctgaagtccctggccatgaagtacaccgacatgggcgactacgacttcgagctggacaagttcaaggacgactactgcaaggcccacaagatcaagaaggaggacttcacctacgacctgatccccttcgacatcatgtggccctacgccgccaaggacaccgacgccaccatccggctgcacaacttcttcctgcccaagatcgagaagaacgagaagctgtgctccctgtactacgacgtgctgatgcccggctgcgtgttcctgcagcgggtggaggaccggggcgtgcccatctccatcgaccggctgaaggaggcccagtaccagctgacccacaacctgaacaaggcccgggagaagctgtacacctaccccgaggtgaagcagctggagcaggaccagaacgaggccttcaaccccaactccgtgaagcagctgcgggtgctgctgttcgactacgtgggcctgacccccaccggcaagctgaccgacaccggcgccgactccaccgacgccgaggccctgaacgagctggccacccagcaccccatcgccaagaccctgctggagatccggaagctgaccaagctgatctccacctacgtggagaagatcctgctgtccatcgacgccgacggctgcatccggaccggcttccacgagcacatgaccacctccggccggctgtcctcctccggcaagctgaacctgcagcagctgccccgggacgagtccatcatcaagggctgcgtggtggccccccccggctaccgggtgatcgcctgggacctgaccaccgccgaggtgtactacgccgccgtgctgtccggcgaccggaacatgcagcaggtgttcatcaacatgcggaacgagcccgacaagtaccccgacttccactccaacatcgcccacatggtgttcaagctgcagtgcgagccccgggacgtgaagaagctgttccccgccctgcggcaggccgccaaggccatcaccttcggcatcctgtacggctccggccccgccaaggtggcccactccgtgaacgaggccctgctggagcaggccgccaagaccggcgagcccttcgtggagtgcaccgtggccgacgccaaggagtacatcgagacctacttcggccagttcccccagctgaagcggtggatcgacaagtgccacgaccagatcaagaaccacggcttcatctactcccacttcggccggaagcggcggctgcacaacatccactccgaggaccggggcgtgcagggcgaggagatccggtccggcttcaacgccatcatccagtccgcctcctccgactccctgctgctgggcgccgtggacgccgacaacgagatcatctccctgggcctggagcaggagatgaagatcgtgatgctggtgcacgactccgtggtggccatcgtgcgggaggacctgatcgaccagtacaacgagatcctgatccggaacatccagaaggaccggggcatctccatccccggctgccccatcggcatcgactccgactccgaggccggcggctcccgggactactcctgcggcaagatgaagaagcagcacccctccatcgcctgcatcgacgacgacgagtacacccggtacgtgaagggcgtgctgctggacgccgagttcgagtacaagaagctggccgccatggacaaggagcaccccgaccactccaagtacaaggacgacaagttcatcgccgtgtgcaaggacctggacaacgtgaagcggatcctgggcgccggcggcggctccggcaagcggaccgccgacggctccggcggcggctcccccaagaagaagcggaaggtgcctgccgctaagagagtgaagctggactccgagtccgccacccccgagtccgtgtccggctggcggctgttcaagaagatctcctagctagcaccagcctcaagaacacccgaatggagtctctaagctacataataccaacttacactttacaaaatgttgtcccccaaaatgtagccattcgtatctgctcctaataaaaagaaagtttcttcacattcttgtcagcccagaaccccacacgagttttgccactgctaagctgtgaggcagtgcaggctgggacagccgacctccaggttgcgaaaaacctggtctcgagaaaaaaaaaaaatggaaaaaaaaaaaacggaaaaaaaaaaaaggtaaaaaaaaaaaatataaaaaaaaaaaacataaaaaaaaaaaacgaaaaaaaaaaaacgtaaaaaaaaaaaactcaaaaaaaaaaaagataaaaaaaaaaaacctaaaaaaaaaaaatgtaaaaaaaaaaaagggaaaaaaaaaaaacgcaaaaaaaaaaaacacaaaaaaaaaaaatgcaaaaaaaaaaaatcgaaaaaaaaaaaatctaaaaaaaaaaaacgaaaaaaaaaaaacccaaaaaaaaaaaagacaaaaaaaaaaaatagaaaaaaaaaaagttaaaaaaaaaaaactgaaaaaaaaaaaatttaaaaaaaaaaaatctag

SEQ ID NO: 2513 - DNA, 7713 bp, synthetic construct
  misc_feature 1..7713: note = Synthetic
  source 1..7713: mol_type = other DNA
aggactcactatttgttttcgcgcccagttgcaaaaagtgtcgaagctcagaataaacgctcaactttggccggatctgccaccatgaagcggcccgccgccaccaagaaggccggccaggccaagaagaagaaggacaagaagtactccatcggcctggacatcggcaccaactccgtgggctgggccgtgatcaccgacgagtacaaggtgccctccaagaagttcaaggtgctgggcaacaccgaccggcactccatcaagaagaacctgatcggcgccctgctgttcgactccggcgagaccgccgaggccacccggctgaagcggaccgcccggcggcggtacacccggcggaagaaccggatctgctacctgcaggagatcttctccaacgagatggccaaggtggacgactccttcttccaccggctggaggagtccttcctggtggaggaggacaagaagcacgagcggcaccccatcttcggcaacatcgtggacgaggtggcctaccacgagaagtaccccaccatctaccacctgcggaagaagctggtggactccaccgacaaggccgacctgcggctgatctacctggccctggcccacatgatcaagttccggggccacttcctgatcgagggcgacctgaaccccgacaactccgacgtggacaagctgttcatccagctggtgcagacctacaaccagctgttcgaggagaaccccatcaacgcctccggcgtggacgccaaggccatcctgtccgcccggctgtccaagtcccggcggctggagaacctgatcgcccagctgcccggcgagaagaagaacggcctgttcggcaacctgatcgccctgtccctgggcctgacccccaacttcaagtccaacttcgacctggccgaggacgccaagctgcagctgtccaaggacacctacgacgacgacctggacaacctgctggcccagatcggcgaccagtacgccgacctgttcctggccgccaagaacctgtccgacgccatcctgctgtccgacatcctgcgggtgaacaccgagatcaccaaggcccccctgtccgcctccatgatcaagcggtacgacgagcaccaccaggacctgaccctgctgaaggccctggtgcggcagcagctgcccgagaagtacaaggagatcttcttcgaccagtccaagaacggctacgccggctacatcgacggcggcgcctcccaggaggagttctacaagttcatcaagcccatcctggagaagatggacggcaccgaggagctgctggtgaagctgaaccgggaggacctgctgcggaagcagcggaccttcgacaacggctccatcccccaccagatccacctgggcgagctgcacgccatcctgcggcggcaggaggacttctaccccttcctgaaggacaaccgggagaagatcgagaagatcctgaccttccggatcccctactacgtgggccccctggcccggggcaactcccggttcgcctggatgacccggaagtccgaggagaccatcaccccctggaacttcgaggaggtggtggacaagggcgcctccgcccagtccttcatcgagcggatgaccaacttcgacaagaacctgcccaacgagaaggtgctgcccaagcactccctgctgtacgagtacttcaccgtgtacaacgagctgaccaaggtgaagtacgtgaccgagggcatgcggaagcccgccttcctgtccggcgagcagaagaaggccatcgtggacctgctgttcaagaccaaccggaaggtgaccgtgaagcagctgaaggaggactacttcaagaagatcgagtgcttcgactccgtggagatctccggcgtggaggaccggttcaacgcctccctgggcacctaccacgacctgctgaagatcatcaaggacaaggacttcctggacaacgaggagaacgaggacatcctggaggacatcgtgctgaccctgaccctgttcgaggaccgggagatgatcgaggagcggctgaagacctacgcccacctgttcgacgacaaggtgatgaagcagctgaagcggcggcggtacaccggctggggccggctgtcccggaagctgatcaacggcatccgggacaagcagtccggcaagaccatcctggacttcctgaagtccgacggcttcgccaaccggaacttcatgcagctgatccacgacgactccctgaccttcaaggaggacatccagaaggcccaggtgtccggccagggcgactccctgcacgagcacatcgccaacctggccggctcccccgccatcaagaagggcatcctgcagaccgtgaaggtggtggacgagctggtgaaggtgatgggccggcacaagcccgagaacatcgtgatcgagatggcccgggagaaccagaccacccagaagggccagaagaactcccgggagcggatgaagcggatcgaggagggcatcaaggagctgggctcccagatcctgaaggagcaccccgtggagaacacccagctgcagaacgagaagctgtacctgtactacctgcagaacggccgggacatgtacgtggaccaggagctggacatcaaccggctgtccgactacgacgtggacgccatcgtgccccagtccttcctgaaggacgactccatcgacaacaaggtgctgacccggtccgacaagaaccggggcaagtccgacaacgtgccctccgaggaggtggtgaagaagatgaagaactactggcggcagctgctgaacgccaagctgatcacccagcggaagttcgacaacctgaccaaggccgagcggggcggcctgtccgagctggacaaggccggcttcatcaagcggcagctggtggagacccggcagatcaccaagcacgtggcccagatcctggactcccggatgaacaccaagtacgacgagaacgacaagctgatccgggaggtgaaggtgatcaccctgaagtccaagctggtgtccgacttccggaaggacttccagttctacaaggtgcgggagatcaacaactaccaccacgcccacgacgcctacctgaacgccgtggtgggcaccgccctgatcaagaagtaccccaagctggagtccgagttcgtgtacggcgactacaaggtgtacgacgtgcggaagatgatcgccaagtccgagcaggagatcggcaaggccaccgccaagtacttcttctactccaacatcatgaacttcttcaagaccgagatcaccctggccaacggcgagatccggaagcggcccctgatcgagaccaacggcgagaccggcgagatcgtgtgggacaagggccgggacttcgccaccgtgcggaaggtgctgtccatgccccaggtgaacatcgtgaagaagaccgaggtgcagaccggcggcttctccaaggagtccatcctgcccaagcggaactccgacaagctgatcgcccggaagaaggactgggaccccaagaagtacggcggcttcgactcccccaccgtggcctactccgtgctggtggtggccaaggtggagaagggcaagtccaagaagctgaagtccgtgaaggagctgctgggcatcaccatcatggagcggtcctccttcgagaagaaccccatcgacttcctggaggccaagggctacaaggaggtgaagaaggacctgatcatcaagctgcccaagtactccctgttcgagctggagaacggccggaagcggatgctggcctccgccggcgagctgcagaagggcaacgagctggccctgccctccaagtacgtgaacttcctgtacctggcctcccactacgagaagctgaagggctcccccgaggacaacgagcagaagcagctgttcgtggagcagcacaagcactacctggacgagatcatcgagcagatctccgagttctccaagcgggtgatcctggccgacgccaacctggacaaggtgctgtccgcctacaacaagcaccgggacaagcccatccgggagcaggccgagaacatcatccacctgttcaccctgaccaacctgggcgcccccgccgccttcaagtacttcgacaccaccatcgaccggaagcggtacacctccaccaaggaggtgctggacgccaccctgatccaccagtccatcaccggcctgtacgagacccggatcgacctgtcccagctgggcggcgacggcgcccccgagtccgccaccgagtccggcggcacctccaccgagtccgagggctccgccggccccaagaagaagcggaaggtgacctccaccgagtccgagggctccgccggctccgccggctccacctccggctcctcctccggcatgaagatcgccgtggtggacaaggccctgaacaacacccggtacgacaagcacttccagctgtacggcgaggaggtggacgtgttccacatgtgcaacgagaagctgtccggccggctgctgaagaagcacatcaccatcggcacccccgagaaccccttcgaccccaacgactacgacttcgtgatcctggtgggcgccgagcccttcctgtacttcgccggcaagaagggcatcggcgactacaccggcaagcgggtggagtacaacggctacgccaactggatcgcctccatctcccccgcccagctgcacttcaagcccgagatgaagcccgtgttcgacgccaccgtggagaacatccacgacatcatcaacggccgggagaagatcgccaaggccggcgactaccggcccatcaccgaccccgacgaggccgaggagtacatcaagatggtgtacaacatggtgatcggccccgtggccttcgcctccgccacctccgccctgtactgccgggacggctacctgctgggcgtgtccatctcccaccaggagtaccagggcgtgtacatcgactccgactgcctgaccgaggtggccgtgtactacctgcagaagatcctggactccgagaaccacaccatcgtgttccacaacctgaagttcgacatgcacttctacaagtaccacctgggcctgaccttcgacaaggcccacaaggagcggcggctgcacgacaccatgctgcagcactacgtgctggacgagcggcggggcacccacggcctgaagtccctggccatgaagtacaccgacatgggcgactacgacttcgagctggacaagttcaaggacgactactgcaaggcccacaagatcaagaaggaggacttcacctacgacctgatccccttcgacatcatgtggccctacgccgccaaggacaccgacgccaccatccggctgcacaacttcttcctgcccaagatcgagaagaacgagaagctgtgctccctgtactacgacgtgctgatgcccggctgcgtgttcctgcagcgggtggaggaccggggcgtgcccatctccatcgaccggctgaaggaggcccagtaccagctgacccacaacctgaacaaggcccgggagaagctgtacacctaccccgaggtgaagcagctggagcaggaccagaacgaggccttcaaccccaactccgtgaagcagctgcgggtgctgctgttcgactacgtgggcctgacccccaccggcaagctgaccgacaccggcgccgactccaccgacgccgaggccctgaacgagctggccacccagcaccccatcgccaagaccctgctggagatccggaagctgaccaagctgatctccacctacgtggagaagatcctgctgtccatcgacgccgacggctgcatccggaccggcttccacgagcacatgaccacctccggccggctgtcctcctccggcaagctgaacctgcagcagctgccccgggacgagtccatcatcaagggctgcgtggtggccccccccggctaccgggtgatcgcctgggacctgaccaccgccgaggtgtactacgccgccgtgctgtccggcgaccggaacatgcagcaggtgttcatcaacatgcggaacgagcccgacaagtaccccgacttccactccaacatcgcccacatggtgttcaagctgcagtgcgagccccgggacgtgaagaagctgttccccgccctgcggcaggccgccaaggccatcaccttcggcatcctgtacggctccggccccgccaaggtggcccactccgtgaacgaggccctgctggagcaggccgccaagaccggcgagcccttcgtggagtgcaccgtggccgacgccaaggagtacatcgagacctacttcggccagttcccccagctgaagcggtggatcgacaagtgccacgaccagatcaagaaccacggcttcatctactcccacttcggccggaagcggcggctgcacaacatccactccgaggaccggggcgtgcagggcgaggagatccggtccggcttcaacgccatcatccagtccgcctcctccgactccctgctgctgggcgccgtggacgccgacaacgagatcatctccctgggcctggagcaggagatgaagatcgtgatgctggtgcacgactccgtggtggccatcgtgcgggaggacctgatcgaccagtacaacgagatcctgatccggaacatccagaaggaccggggcatctccatccccggctgccccatcggcatcgactccgactccgaggccggcggctcccgggactactcctgcggcaagatgaagaagcagcacccctccatcgcctgcatcgacgacgacgagtacacccggtacgtgaagggcgtgctgctggacgccgagttcgagtacaagaagctggccgccatggacaaggagcaccccgaccactccaagtacaaggacgacaagttcatcgccgtgtgcaaggacctggacaacgtgaagcggatcctgggcgccggcggcggctccggcaagcggaccgccgacggctccggcggcggctcccccaagaagaagcggaaggtgcctgccgctaagagagtgaagctggactccgagtccgccacccccgagtccgtgtccggctggcggctgttcaagaagatctcctagctagcaccagcctcaagaacacccgaatggagtctctaagctacataataccaacttacactttacaaaatgttgtcccccaaaatgtagccattcgtatctgctcctaataaaaagaaagtttcttcacattcttgtcagcccagaaccccacacgagttttgccactgctaagctgtgaggcagtgcaggctgggacagccgacctccaggttgcgaaaaacctggtctcgagaaaaaaaaaaaatggaaaaaaaaaaaacggaaaaaaaaaaaaggtaaaaaaaaaaaatataaaaaaaaaaaacataaaaaaaaaaaacgaaaaaaaaaaaacgtaaaaaaaaaaaactcaaaaaaaaaaaagataaaaaaaaaaaacctaaaaaaaaaaaatgtaaaaaaaaaaaagggaaaaaaaaaaaacgcaaaaaaaaaaaacacaaaaaaaaaaaatgcaaaaaaaaaaaatcgaaaaaaaaaaaatctaaaaaaaaaaaacgaaaaaaaaaaaacccaaaaaaaaaaaagacaaaaaaaaaaaatagaaaaaaaaaaagttaaaaaaaaaaaactgaaaaaaaaaaaatttaaaaaaaaaaaatctag

SEQ ID NO: 2514 - DNA, 7669 bp, synthetic construct
  misc_feature 1..7669: note = Synthetic
  source 1..7669: mol_type = other DNA
aggactcactatttgttttcgcgcccagttgcaaaaagtgtcgaaaaaaaaaaaaccaaaaaaaaaaaacaaaaaaaaaaaataattgactaaaagctcagaataaacgctcaactttggccggatctgccaccatgaagcggcccgccgccaccaagaaggccggccaggccaagaagaagaaggacaagaagtactccatcggcctggacatcggcaccaactccgtgggctgggccgtgatcaccgacgagtacaaggtgccctccaagaagttcaaggtgctgggcaacaccgaccggcactccatcaagaagaacctgatcggcgccctgctgttcgactccggcgagaccgccgaggccacccggctgaagcggaccgcccggcggcggtacacccggcggaagaaccggatctgctacctgcaggagatcttctccaacgagatggccaaggtggacgactccttcttccaccggctggaggagtccttcctggtggaggaggacaagaagcacgagcggcaccccatcttcggcaacatcgtggacgaggtggcctaccacgagaagtaccccaccatctaccacctgcggaagaagctggtggactccaccgacaaggccgacctgcggctgatctacctggccctggcccacatgatcaagttccggggccacttcctgatcgagggcgacctgaaccccgacaactccgacgtggacaagctgttcatccagctggtgcagacctacaaccagctgttcgaggagaaccccatcaacgcctccggcgtggacgccaaggccatcctgtccgcccggctgtccaagtcccggcggctggagaacctgatcgcccagctgcccggcgagaagaagaacggcctgttcggcaacctgatcgccctgtccctgggcctgacccccaacttcaagtccaacttcgacctggccgaggacgccaagctgcagctgtccaaggacacctacgacgacgacctggacaacctgctggcccagatcggcgaccagtacgccgacctgttcctggccgccaagaacctgtccgacgccatcctgctgtccgacatcctgcgggtgaacaccgagatcaccaaggcccccctgtccgcctccatgatcaagcggtacgacgagcaccaccaggacctgaccctgctgaaggccctggtgcggcagcagctgcccgagaagtacaaggagatcttcttcgaccagtccaagaacggctacgccggctacatcgacggcggcgcctcccaggaggagttctacaagttcatcaagcccatcctggagaagatggacggcaccgaggagctgctggtgaagctgaaccgggaggacctgctgcggaagcagcggaccttcgacaacggctccatcccccaccagatccacctgggcgagctgcacgccatcctgcggcggcaggaggacttctaccccttcctgaaggacaaccgggagaagatcgagaagatcctgaccttccggatcccctactacgtgggccccctggcccggggcaactcccggttcgcctggatgacccggaagtccgaggagaccatcaccccctggaacttcgaggaggtggtggacaagggcgcctccgcccagtccttcatcgagcggatgaccaacttcgacaagaacctgcccaacgagaaggtgctgcccaagcactccctgctgtacgagtacttcaccgtgtacaacgagctgaccaaggtgaagtacgtgaccgagggcatgcggaagcccgccttcctgtccggcgagcagaagaaggccatcgtggacctgctgttcaagaccaaccggaaggtgaccgtgaagcagctgaaggaggactacttcaagaagatcgagtgcttcgactccgtggagatctccggcgtggaggaccggttcaacgcctccctgggcacctaccacgacctgctgaagatcatcaaggacaaggacttcctggacaacgaggagaacgaggacatcctggaggacatcgtgctgaccctgaccctgttcgaggaccgggagatgatcgaggagcggctgaagacctacgcccacctgttcgacgacaaggtgatgaagcagctgaagcggcggcggtacaccggctggggccggctgtcccggaagctgatcaacggcatccgggacaagcagtccggcaagaccatcctggacttcctgaagtccgacggcttcgccaaccggaacttcatgcagctgatccacgacgactccctgaccttcaaggaggacatccagaaggcccaggtgtccggccagggcgactccctgcacgagcacatcgccaacctggccggctcccccgccatcaagaagggcatcctgcagaccgtgaaggtggtggacgagctggtgaaggtgatgggccggcacaagcccgagaacatcgtgatcgagatggcccgggagaaccagaccacccagaagggccagaagaactcccgggagcggatgaagcggatcgaggagggcatcaaggagctgggctcccagatcctgaaggagcaccccgtggagaacacccagctgcagaacgagaagctgtacctgtactacctgcagaacggccgggacatgtacgtggaccaggagctggacatcaaccggctgtccgactacgacgtggacgccatcgtgccccagtccttcctgaaggacgactccatcgacaacaaggtgctgacccggtccgacaagaaccggggcaagtccgacaacgtgccctccgaggaggtggtgaagaagatgaagaactactggcggcagctgctgaacgccaagctgatcacccagcggaagttcgacaacctgaccaaggccgagcggggcggcctgtccgagctggacaaggccggcttcatcaagcggcagctggtggagacccggcagatcaccaagcacgtggcccagatcctggactcccggatgaacaccaagtacgacgagaacgacaagctgatccgggaggtgaaggtgatcaccctgaagtccaagctggtgtccgacttccggaaggacttccagttctacaaggtgcgggagatcaacaactaccaccacgcccacgacgcctacctgaacgccgtggtgggcaccgccctgatcaagaagtaccccaagctggagtccgagttcgtgtacggcgactacaaggtgtacgacgtgcggaagatgatcgccaagtccgagcaggagatcggcaaggccaccgccaagtacttcttctactccaacatcatgaacttcttcaagaccgagatcaccctggccaacggcgagatccggaagcggcccctgatcgagaccaacggcgagaccggcgagatcgtgtgggacaagggccgggacttcgccaccgtgcggaaggtgctgtccatgccccaggtgaacatcgtgaagaagaccgaggtgcagaccggcggcttctccaaggagtccatcctgcccaagcggaactccgacaagctgatcgcccggaagaaggactgggaccccaagaagtacggcggcttcgactcccccaccgtggcctactccgtgctggtggtggccaaggtggagaagggcaagtccaagaagctgaagtccgtgaaggagctgctgggcatcaccatcatggagcggtcctccttcgagaagaaccccatcgacttcctggaggccaagggctacaaggaggtgaagaaggacctgatcatcaagctgcccaagtactccctgttcgagctggagaacggccggaagcggatgctggcctccgccggcgagctgcagaagggcaacgagctggccctgccctccaagtacgtgaacttcctgtacctggcctcccactacgagaagctgaagggctcccccgaggacaacgagcagaagcagctgttcgtggagcagcacaagcactacctggacgagatcatcgagcagatctccgagttctccaagcgggtgatcctggccgacgccaacctggacaaggtgctgtccgcctacaacaagcaccgggacaagcccatccgggagcaggccgagaacatcatccacctgttcaccctgaccaacctgggcgcccccgccgccttcaagtacttcgacaccaccatcgaccggaagcggtacacctccaccaaggaggtgctggacgccaccctgatccaccagtccatcaccggcctgtacgagacccggatcgacctgtcccagctgggcggcgacggcgcccccgagtccgccaccgagtccggcggcacctccaccgagtccgagggctccgccggccccaagaagaagcggaaggtgacctccaccgagtccgagggctccgccggctccgccggctccacctccggctcctcctccggcatgaagatcgccgtggtggacaaggccctgaacaacacccggtacgacaagcacttccagctgtacggcgaggaggtggacgtgttccacatgtgcaacgagaagctgtccggccggctgctgaagaagcacatcaccatcggcacccccgagaaccccttcgaccccaacgactacgacttcgtgatcctggtgggcgccgagcccttcctgtacttcgccggcaagaagggcatcggcgactacaccggcaagcgggtggagtacaacggctacgccaactggatcgcctccatctcccccgcccagctgcacttcaagcccgagatgaagcccgtgttcgacgccaccgtggagaacatccacgacatcatcaacggccgggagaagatcgccaaggccggcgactaccggcccatcaccgaccccgacgaggccgaggagtacatcaagatggtgtacaacatggtgatcggccccgtggccttcgcctccgccacctccgccctgtactgccgggacggctacctgctgggcgtgtccatctcccaccaggagtaccagggcgtgtacatcgactccgactgcctgaccgaggtggccgtgtactacctgcagaagatcctggactccgagaaccacaccatcgtgttccacaacctgaagttcgacatgcacttctacaagtaccacctgggcctgaccttcgacaaggcccacaaggagcggcggctgcacgacaccatgctgcagcactacgtgctggacgagcggcggggcacccacggcctgaagtccctggccatgaagtacaccgacatgggcgactacgacttcgagctggacaagttcaaggacgactactgcaaggcccacaagatcaagaaggaggacttcacctacgacctgatccccttcgacatcatgtggccctacgccgccaaggacaccgacgccaccatccggctgcacaacttcttcctgcccaagatcgagaagaacgagaagctgtgctccctgtactacgacgtgctgatgcccggctgcgtgttcctgcagcgggtggaggaccggggcgtgcccatctccatcgaccggctgaaggaggcccagtaccagctgacccacaacctgaacaaggcccgggagaagctgtacacctaccccgaggtgaagcagctggagcaggaccagaacgaggccttcaaccccaactccgtgaagcagctgcgggtgctgctgttcgactacgtgggcctgacccccaccggcaagctgaccgacaccggcgccgactccaccgacgccgaggccctgaacgagctggccacccagcaccccatcgccaagaccctgctggagatccggaagctgaccaagctgatctccacctacgtggagaagatcctgctgtccatcgacgccgacggctgcatccggaccggcttccacgagcacatgaccacctccggccggctgtcctcctccggcaagctgaacctgcagcagctgccccgggacgagtccatcatcaagggctgcgtggtggccccccccggctaccgggtgatcgcctgggacctgaccaccgccgaggtgtactacgccgccgtgctgtccggcgaccggaacatgcagcaggtgttcatcaacatgcggaacgagcccgacaagtaccccgacttccactccaacatcgcccacatggtgttcaagctgcagtgcgagccccgggacgtgaagaagctgttccccgccctgcggcaggccgccaaggccatcaccttcggcatcctgtacggctccggccccgccaaggtggcccactccgtgaacgaggccctgctggagcaggccgccaagaccggcgagcccttcgtggagtgcaccgtggccgacgccaaggagtacatcgagacctacttcggccagttcccccagctgaagcggtggatcgacaagtgccacgaccagatcaagaaccacggcttcatctactcccacttcggccggaagcggcggctgcacaacatccactccgaggaccggggcgtgcagggcgaggagatccggtccggcttcaacgccatcatccagtccgcctcctccgactccctgctgctgggcgccgtggacgccgacaacgagatcatctccctgggcctggagcaggagatgaagatcgtgatgctggtgcacgactccgtggtggccatcgtgcgggaggacctgatcgaccagtacaacgagatcctgatccggaacatccagaaggaccggggcatctccatccccggctgccccatcggcatcgactccgactccgaggccggcggctcccgggactactcctgcggcaagatgaagaagcagcacccctccatcgcctgcatcgacgacgacgagtacacccggtacgtgaagggcgtgctgctggacgccgagttcgagtacaagaagctggccgccatggacaaggagcaccccgaccactccaagtacaaggacgacaagttcatcgccgtgtgcaaggacctggacaacgtgaagcggatcctgggcgccggcggcggctccggcaagcggaccgccgacggctccggcggcggctcccccaagaagaagcggaaggtgcctgccgctaagagagtgaagctggactccgagtccgccacccccgagtccgtgtccggctggcggctgttcaagaagatctcctagctagcaccagcctcaagaacacccgaatggagtctctaagctacataataccaacttacactttacaaaatgttgtcccccaaaatgtagccattcgtatctgctcctaataaaaagaaagtttcttcacattctctcgagaaaaaaaaaaaatggaaaaaaaaaaaacggaaaaaaaaaaaaggtaaaaaaaaaaaatataaaaaaaaaaaacataaaaaaaaaaaacgaaaaaaaaaaaacgtaaaaaaaaaaaactcaaaaaaaaaaaagataaaaaaaaaaaacctaaaaaaaaaaaatgtaaaaaaaaaaaagggaaaaaaaaaaaacgcaaaaaaaaaaaacacaaaaaaaaaaaatgcaaaaaaaaaaaatcgaaaaaaaaaaaatctaaaaaaaaaaaacgaaaaaaaaaaaacccaaaaaaaaaaaagacaaaaaaaaaaaatagaaaaaaaaaaagttaaaaaaaaaaaactgaaaaaaaaaaaatttaaaaaaaaaaaatctag

SEQ ID NO: 2515 - DNA, 7618 bp, synthetic construct
  misc_feature 1..7618: note = Synthetic
  source 1..7618: mol_type = other DNA
aggtgttcaaccagagtgaaaccactaacgggtcagagccccaagctcagaataaacgctcaactttggccggatctgccaccatgaagcggcccgccgccaccaagaaggccggccaggccaagaagaagaaggacaagaagtactccatcggcctggacatcggcaccaactccgtgggctgggccgtgatcaccgacgagtacaaggtgccctccaagaagttcaaggtgctgggcaacaccgaccggcactccatcaagaagaacctgatcggcgccctgctgttcgactccggcgagaccgccgaggccacccggctgaagcggaccgcccggcggcggtacacccggcggaagaaccggatctgctacctgcaggagatcttctccaacgagatggccaaggtggacgactccttcttccaccggctggaggagtccttcctggtggaggaggacaagaagcacgagcggcaccccatcttcggcaacatcgtggacgaggtggcctaccacgagaagtaccccaccatctaccacctgcggaagaagctggtggactccaccgacaaggccgacctgcggctgatctacctggccctggcccacatgatcaagttccggggccacttcctgatcgagggcgacctgaaccccgacaactccgacgtggacaagctgttcatccagctggtgcagacctacaaccagctgttcgaggagaaccccatcaacgcctccggcgtggacgccaaggccatcctgtccgcccggctgtccaagtcccggcggctggagaacctgatcgcccagctgcccggcgagaagaagaacggcctgttcggcaacctgatcgccctgtccctgggcctgacccccaacttcaagtccaacttcgacctggccgaggacgccaagctgcagctgtccaaggacacctacgacgacgacctggacaacctgctggcccagatcggcgaccagtacgccgacctgttcctggccgccaagaacctgtccgacgccatcctgctgtccgacatcctgcgggtgaacaccgagatcaccaaggcccccctgtccgcctccatgatcaagcggtacgacgagcaccaccaggacctgaccctgctgaaggccctggtgcggcagcagctgcccgagaagtacaaggagatcttcttcgaccagtccaagaacggctacgccggctacatcgacggcggcgcctcccaggaggagttctacaagttcatcaagcccatcctggagaagatggacggcaccgaggagctgctggtgaagctgaaccgggaggacctgctgcggaagcagcggaccttcgacaacggctccatcccccaccagatccacctgggcgagctgcacgccatcctgcggcggcaggaggacttctaccccttcctgaaggacaaccgggagaagatcgagaagatcctgaccttccggatcccctactacgtgggccccctggcccggggcaactcccggttcgcctggatgacccggaagtccgaggagaccatcaccccctggaacttcgaggaggtggtggacaagggcgcctccgcccagtccttcatcgagcggatgaccaacttcgacaagaacctgcccaacgagaaggtgctgcccaagcactccctgctgtacgagtacttcaccgtgtacaacgagctgaccaaggtgaagtacgtgaccgagggcatgcggaagcccgccttcctgtccggcgagcagaagaaggccatcgtggacctgctgttcaagaccaaccggaaggtgaccgtgaagcagctgaaggaggactacttcaagaagatcgagtgcttcgactccgtggagatctccggcgtggaggaccggttcaacgcctccctgggcacctaccacgacctgctgaagatcatcaaggacaaggacttcctggacaacgaggagaacgaggacatcctggaggacatcgtgctgaccctgaccctgttcgaggaccgggagatgatcgaggagcggctgaagacctacgcccacctgttcgacgacaaggtgatgaagcagctgaagcggcggcggtacaccggctggggccggctgtcccggaagctgatcaacggcatccgggacaagcagtccggcaagaccatcctggacttcctgaagtccgacggcttcgccaaccggaacttcatgcagctgatccacgacgactccctgaccttcaaggaggacatccagaaggcccaggtgtccggccagggcgactccctgcacgagcacatcgccaacctggccggctcccccgccatcaagaagggcatcctgcagaccgtgaaggtggtggacgagctggtgaaggtgatgggccggcacaagcccgagaacatcgtgatcgagatggcccgggagaaccagaccacccagaagggccagaagaactcccgggagcggatgaagcggatcgaggagggcatcaaggagctgggctcccagatcctgaaggagcaccccgtggagaacacccagctgcagaacgagaagctgtacctgtactacctgcagaacggccgggacatgtacgtggaccaggagctggacatcaaccggctgtccgactacgacgtggacgccatcgtgccccagtccttcctgaaggacgactccatcgacaacaaggtgctgacccggtccgacaagaaccggggcaagtccgacaacgtgccctccgaggaggtggtgaagaagatgaagaactactggcggcagctgctgaacgccaagctgatcacccagcggaagttcgacaacctgaccaaggccgagcggggcggcctgtccgagctggacaaggccggcttcatcaagcggcagctggtggagacccggcagatcaccaagcacgtggcccagatcctggactcccggatgaacaccaagtacgacgagaacgacaagctgatccgggaggtgaaggtgatcaccctgaagtccaagctggtgtccgacttccggaaggacttccagttctacaaggtgcgggagatcaacaactaccaccacgcccacgacgcctacctgaacgccgtggtgggcaccgccctgatcaagaagtaccccaagctggagtccgagttcgtgtacggcgactacaaggtgtacgacgtgcggaagatgatcgccaagtccgagcaggagatcggcaaggccaccgccaagtacttcttctactccaacatcatgaacttcttcaagaccgagatcaccctggccaacggcgagatccggaagcggcccctgatcgagaccaacggcgagaccggcgagatcgtgtgggacaagggccgggacttcgccaccgtgcggaaggtgctgtccatgccccaggtgaacatcgtgaagaagaccgaggtgcagaccggcggcttctccaaggagtccatcctgcccaagcggaactccgacaagctgatcgcccggaagaaggactgggaccccaagaagtacggcggcttcgactcccccaccgtggcctactccgtgctggtggtggccaaggtggagaagggcaagtccaagaagctgaagtccgtgaaggagctgctgggcatcaccatcatggagcggtcctccttcgagaagaaccccatcgacttcctggaggccaagggctacaaggaggtgaagaaggacctgatcatcaagctgcccaagtactccctgttcgagctggagaacggccggaagcggatgctggcctccgccggcgagctgcagaagggcaacgagctggccctgccctccaagtacgtgaacttcctgtacctggcctcccactacgagaagctgaagggctcccccgaggacaacgagcagaagcagctgttcgtggagcagcacaagcactacctggacgagatcatcgagcagatctccgagttctccaagcgggtgatcctggccgacgccaacctggacaaggtgctgtccgcctacaacaagcaccgggacaagcccatccgggagcaggccgagaacatcatccacctgttcaccctgaccaacctgggcgcccccgccgccttcaagtacttcgacaccaccatcgaccggaagcggtacacctccaccaaggaggtgctggacgccaccctgatccaccagtccatcaccggcctgtacgagacccggatcgacctgtcccagctgggcggcgacggcgcccccgagtccgccaccgagtccggcggcacctccaccgagtccgagggctccgccggccccaagaagaagcggaaggtgacctccaccgagtccgagggctccgccggctccgccggctccacctccggctcctcctccggcatgaagatcgccgtggtggacaaggccctgaacaacacccggtacgacaagcacttccagctgtacggcgaggaggtggacgtgttccacatgtgcaacgagaagctgtccggccggctgctgaagaagcacatcaccatcggcacccccgagaaccccttcgaccccaacgactacgacttcgtgatcctggtgggcgccgagcccttcctgtacttcgccggcaagaagggcatcggcgactacaccggcaagcgggtggagtacaacggctacgccaactggatcgcctccatctcccccgcccagctgcacttcaagcccgagatgaagcccgtgttcgacgccaccgtggagaacatccacgacatcatcaacggccgggagaagatcgccaaggccggcgactaccggcccatcaccgaccccgacgaggccgaggagtacatcaagatggtgtacaacatggtgatcggccccgtggccttcgcctccgccacctccgccctgtactgccgggacggctacctgctgggcgtgtccatctcccaccaggagtaccagggcgtgtacatcgactccgactgcctgaccgaggtggccgtgtactacctgcagaagatcctggactccgagaaccacaccatcgtgttccacaacctgaagttcgacatgcacttctacaagtaccacctgggcctgaccttcgacaaggcccacaaggagcggcggctgcacgacaccatgctgcagcactacgtgctggacgagcggcggggcacccacggcctgaagtccctggccatgaagtacaccgacatgggcgactacgacttcgagctggacaagttcaaggacgactactgcaaggcccacaagatcaagaaggaggacttcacctacgacctgatccccttcgacatcatgtggccctacgccgccaaggacaccgacgccaccatccggctgcacaacttcttcctgcccaagatcgagaagaacgagaagctgtgctccctgtactacgacgtgctgatgcccggctgcgtgttcctgcagcgggtggaggaccggggcgtgcccatctccatcgaccggctgaaggaggcccagtaccagctgacccacaacctgaacaaggcccgggagaagctgtacacctaccccgaggtgaagcagctggagcaggaccagaacgaggccttcaaccccaactccgtgaagcagctgcgggtgctgctgttcgactacgtgggcctgacccccaccggcaagctgaccgacaccggcgccgactccaccgacgccgaggccctgaacgagctggccacccagcaccccatcgccaagaccctgctggagatccggaagctgaccaagctgatctccacctacgtggagaagatcctgctgtccatcgacgccgacggctgcatccggaccggcttccacgagcacatgaccacctccggccggctgtcctcctccggcaagctgaacctgcagcagctgccccgggacgagtccatcatcaagggctgcgtggtggccccccccggctaccgggtgatcgcctgggacctgaccaccgccgaggtgtactacgccgccgtgctgtccggcgaccggaacatgcagcaggtgttcatcaacatgcggaacgagcccgacaagtaccccgacttccactccaacatcgcccacatggtgttcaagctgcagtgcgagccccgggacgtgaagaagctgttccccgccctgcggcaggccgccaaggccatcaccttcggcatcctgtacggctccggccccgccaaggtggcccactccgtgaacgaggccctgctggagcaggccgccaagaccggcgagcccttcgtggagtgcaccgtggccgacgccaaggagtacatcgagacctacttcggccagttcccccagctgaagcggtggatcgacaagtgccacgaccagatcaagaaccacggcttcatctactcccacttcggccggaagcggcggctgcacaacatccactccgaggaccggggcgtgcagggcgaggagatccggtccggcttcaacgccatcatccagtccgcctcctccgactccctgctgctgggcgccgtggacgccgacaacgagatcatctccctgggcctggagcaggagatgaagatcgtgatgctggtgcacgactccgtggtggccatcgtgcgggaggacctgatcgaccagtacaacgagatcctgatccggaacatccagaaggaccggggcatctccatccccggctgccccatcggcatcgactccgactccgaggccggcggctcccgggactactcctgcggcaagatgaagaagcagcacccctccatcgcctgcatcgacgacgacgagtacacccggtacgtgaagggcgtgctgctggacgccgagttcgagtacaagaagctggccgccatggacaaggagcaccccgaccactccaagtacaaggacgacaagttcatcgccgtgtgcaaggacctggacaacgtgaagcggatcctgggcgccggcggcggctccggcaagcggaccgccgacggctccggcggcggctcccccaagaagaagcggaaggtgcctgccgctaagagagtgaagctggactccgagtccgccacccccgagtccgtgtccggctggcggctgttcaagaagatctcctagctagcaccagcctcaagaacacccgaatggagtctctaagctacataataccaacttacactttacaaaatgttgtcccccaaaatgtagccattcgtatctgctcctaataaaaagaaagtttcttcacattctctcgagaaaaaaaaaaaatggaaaaaaaaaaaacggaaaaaaaaaaaaggtaaaaaaaaaaaatataaaaaaaaaaaacataaaaaaaaaaaacgaaaaaaaaaaaacgtaaaaaaaaaaaactcaaaaaaaaaaaagataaaaaaaaaaaacctaaaaaaaaaaaatgtaaaaaaaaaaaagggaaaaaaaaaaaacgcaaaaaaaaaaaacacaaaaaaaaaaaatgcaaaaaaaaaaaatcgaaaaaaaaaaaatctaaaaaaaaaaaacgaaaaaaaaaaaacccaaaaaaaaaaaagacaaaaaaaaaaaatagaaaaaaaaaaagttaaaaaaaaaaaactgaaaaaaaaaaaatttaaaaaaaaaaaatctag

SEQ ID NO: 2516 - DNA, 7579 bp, synthetic construct
  misc_feature 1..7579: note = Synthetic
  source 1..7579: mol_type = other DNA
aggaagctcagaataaacgctcaactttggccggatctgccaccatgaagcggccggctgcgaccaagaaggctggtcaggctaagaagaagaaggacaagaagtactccatcggcctcgacatcgggacgaactccgtgggttgggcggtgatcaccgatgagtacaaggtcccgtccaagaaattcaaggtgctgggtaacaccgatcgacatagtatcaagaagaacctgatcggggccctcttgttcgacagcggcgagactgctgaggcgacgcgcttgaagaggacggcccggcgtcgatacacccgacgcaagaatcggatttgctatctccaggagatcttctccaacgagatggcaaaggtggacgactcgttcttccaccgcctcgaggagagctttctcgtcgaggaggacaagaagcacgagcgccaccccatattcgggaatatcgtggatgaggtcgcctatcacgagaagtaccccacgatttatcatttgcgcaagaagctggtagattcaaccgacaaggcggacttgcggttgatctacctagctcttgcgcatatgataaagtttcgggggcacttcttgattgaaggcgacctcaatcccgataactcggatgtggacaagctcttcatacagctggtgcagacctacaaccagctgtttgaagagaatccgattaatgcgtcgggtgtcgacgccaaggccatcctcagcgcgcgcctcagcaagtctcgccgccttgagaatctgattgcccagctcccgggcgagaagaagaacgggttgttcggtaaccttattgcgctgtcgcttggcctcactccgaacttcaagtcgaacttcgacttggcggaggacgccaagctgcagctcagtaaggatacctacgacgacgacctggacaatcttctcgcccagatcggcgaccagtacgccgatctcttcctggcggcgaagaatctgagcgatgcaattctcctgagtgacattctgagggtgaatactgaaattacgaaggctccgctgtctgccagcatgatcaagcggtacgatgagcatcaccaggacctgacgctcctcaaggctctcgtccgtcagcagctcccggagaagtacaaggagatcttcttcgaccagtcgaagaacggatacgccgggtacatcgacgggggcgcttcccaggaggagttttataagtttataaagcccatcctggagaagatggacgggaccgaggagctcctggtgaagctcaaccgcgaggatctgctgcgcaagcagcggaccttcgataatggcagtattccccatcagattcacttaggagagttgcacgcgattcttcgccgccaggaagacttctaccccttcctcaaagataacagggagaagatcgagaagatcctcaccttccgcatcccgtattacgtgggtcccctggcgcgggggaactcacgttttgcgtggatgacgcggaagagtgaggagacgatcactccctggaactttgaggaagtggtagacaagggtgcttcggcacagtccttcatcgagcggatgacaaattttgacaagaatttgccgaacgagaaggtcttgccgaagcactcgctgctttacgagtactttacggtttacaacgagttgacgaaggtcaagtacgtcactgagggaatgcggaagcccgcattcctcagtggcgaacagaagaaggccatcgtcgacttgttgttcaagacgaaccgtaaagtaaccgtgaagcagctgaaggaggactacttcaagaagatcgagtgcttcgactccgttgagatcagcggagtcgaagaccgatttaatgcctccctcggtacgtatcatgatctcctcaagattatcaaggataaggacttccttgataatgaggagaatgaggatattctcgaggacattgtgctgaccctcaccctgttcgaagaccgtgagatgattgaggaacggttgaagacctacgctcatctgtttgatgacaaggtcatgaagcagttgaagcgtaggcgttataccggctggggtcgtctttcccgaaagcttatcaacgggatccgtgataagcagtcgggaaagacgatcctagacttcctcaagtctgacggttttgcgaacaggaacttcatgcagctcatccacgacgactccttgaccttcaaggaggatatccagaaggcgcaggtgagcggccagggcgatagcttgcacgagcatatcgcgaacctggccggctcacctgcgatcaagaagggtatcctccagacggtcaaggtcgtggatgagctcgtgaaggtgatgggtcggcacaagcccgagaatatcgtcatcgagatggctcgcgagaatcagacgacccagaagggtcagaagaattctcgcgagcgcatgaagcgtatcgaggagggcattaaggagctgggcagtcagattctcaaggagcaccctgtcgagaacacgcagcttcagaacgagaagctgtatctttactacctccagaacggacgggacatgtacgtagatcaggagctggacatcaaccggctctctgactacgatgtcgatgctatcgtccctcagagctttctgaaggacgatagcatcgacaacaaggtcctgactcgctccgataagaatcggggcaagtcggacaatgtcccgtccgaggaggtagtgaagaagatgaagaactattggcgtcagctgttgaacgcgaagctgatcactcagagaaagttcgataatctcaccaaggccgagagggggggtctgagcgagcttgataaggcgggtttcatcaagcggcagcttgttgagacccgccagatcacgaagcacgtcgctcagatcctcgactctcggatgaacaccaagtacgacgagaatgacaagcttattcgggaggtcaaggtcattacccttaagtcgaagctcgtcagcgactttcgcaaggattttcagttttataaagttcgtgagataaacaattatcaccatgcccacgacgcgtacctgaacgccgtcgtgggcacggcgctgataaagaagtacccgaagctggagtccgagttcgtttatggcgattataaggtgtacgacgtgcgcaagatgatcgccaagagcgagcaggagatcggaaaggctacggcgaagtacttcttttacagcaacatcatgaacttttttaagactgagatcacccttgcgaatggcgagatccgcaagcgcccgttgatcgagacgaacggggagactggggagattgtgtgggataagggtcgggatttcgctacggtgagaaaggttctttcgatgccccaggtcaacatcgtcaagaagacggaggttcagaccgggggcttctcgaaagaatctatcttaccgaagcgaaattccgacaagcttatcgcacgcaagaaggactgggaccccaagaagtacggggggttcgacagtcctacggtggcctactccgtgttggtggtcgccaaggttgagaagggcaagagcaagaagctcaagtccgtcaaggagctcttggggatcaccatcatggagaggtcatcgtttgagaagaatcctattgacttccttgaagccaagggctacaaggaagtcaagaaggatttgatcatcaagctccccaagtactccctgttcgagctcgagaacgggcgcaagcggatgctcgccagcgctggcgagcttcagaagggtaatgagcttgccctcccgagtaagtatgtcaatttcttgtacttggcgtcgcactacgagaagctgaagggctcgccggaggacaacgagcagaagcagcttttcgtagagcagcacaagcactaccttgatgagattatcgagcagatctctgagttcagcaagcgcgttatactagctgacgccaatctcgacaaggtgctctcggcttataacaagcaccgggataagccgatacgtgagcaggcggagaacatcatccacctgttcacgttgacgaacttgggggccccggcagcgttcaagtattttgatactacgatcgatcggaagcgttacaccagcaccaaggaggtcttggacgcgaccttgattcatcagtcgatcacgggtctctacgagacccggatcgacctgtcgcagctcgggggcgacggcgcccccgagtctgcgacagagtcgggcgggacttccaccgagagtgaaggatcggccggccccaagaagaagcgcaaagtcacgtcgacggagtcggaggggtctgcggggtccgcggggagcacgtccggctcctcctcgggcatgaagatcgctgttgtcgataaggcgttgaacaatacgcgttacgacaagcattttcagctgtacggggaggaggtggacgtgttccatatgtgcaatgagaagctgagcggtcggcttctcaagaagcacataaccatcgggaccccggagaaccccttcgacccgaacgactatgactttgtgattcttgttggggccgagccgttcctttactttgcggggaagaaggggatcggggactataccggtaagcgtgtcgagtacaatggatacgctaactggatagcctcgatctcccccgcccagcttcatttcaagcctgagatgaagccggtcttcgacgcgaccgttgagaatatccacgatattatcaacggtcgcgagaagatcgcgaaggccggtgattaccgcccaatcacggatcccgacgaggccgaggagtacatcaagatggtgtacaacatggtgattgggcccgtggcgttcgcctccgctacgtcggcattgtattgtcgagacggctacctccttggggtgtcgatcagccaccaggagtaccaaggagtgtatatcgattcagattgtctgacggaggtggctgtctattatctgcagaagatattagacagcgagaaccacaccatcgtcttccacaatctgaagttcgatatgcacttctacaagtaccacctggggctgacgttcgacaaggcccacaaggagcgccgtctccacgatacaatgctccagcactacgtgctggacgagcggaggggaacccacgggctcaagagcctcgccatgaagtacaccgatatgggcgattacgatttcgaacttgataagttcaaggacgactattgtaaggcccataagatcaagaaggaggacttcacctacgacttgatcccttttgacatcatgtggccgtacgcagctaaggacaccgatgcgacgatcaggctgcacaacttctttcttccgaagatcgagaagaacgagaagttgtgcagcctgtattacgacgtgttgatgcctggctgcgtgttcctgcagcgcgttgaggaccgcggcgtgcccatcagcatcgatcgactgaaggaggcgcagtatcagctcacacataatctgaacaaggcacgggagaagctttacacttacccggaggttaagcagctcgagcaggaccagaacgaggcgtttaaccccaatagtgtgaagcagctccgcgtgctcttgttcgattatgtggggctgacgccgactggtaagcttacggatacaggagcggatagcacggatgctgaggcgctgaacgagttagcgactcagcatccgattgctaagacgctcctggagatccgtaagcttaccaagttgatctccacttatgtggagaagatccttctgtcgatcgatgctgatgggtgcatccggacggggtttcatgagcacatgaccacgtccgggcgcctcagcagtagtgggaagctgaaccttcagcagctcccacgcgatgagtcgataatcaaggggtgcgtggtcgcaccccctggttatcgagtcatcgcgtgggatctcactactgctgaggtgtactacgccgcggtcctcagcggcgacaggaacatgcagcaggtgttcatcaacatgcgtaatgagccggataagtatccggacttccacagcaacatcgcgcatatggtgttcaagctgcagtgcgagccacgtgatgtcaagaagctgtttccagcgcttcggcaggcggcgaaggccattacgttcggtatactctatggcagtgggccagcgaaggtggcccactccgtcaacgaggcactcctcgagcaggccgccaagactggcgagccgttcgtggagtgcaccgttgcggatgccaaggagtatatcgaaacgtactttggccagttcccgcagctgaagcgctggatagataaatgccatgatcagatcaagaatcatggctttatctacagccattttggtcgcaaacggcggcttcataatatccatagcgaggatcgcggagtccagggcgaagagattcgctctggattcaacgcgatcatccagagcgctagttccgactccctcctcctcggcgctgtcgatgccgacaacgagatcatcagtcttggtctcgagcaggagatgaagattgtgatgctcgtgcacgatagcgtggtcgctatcgtgcgtgaggatctcattgaccagtacaatgagatcctcattcggaacatccagaaggatcgagggatctcgatccctggatgtccgatcggcatcgacagcgactccgaggcaggagggagtcgggactacagctgtggaaagatgaagaagcagcacccttccatagcgtgtatagacgacgacgagtatacacgctatgtgaagggtgtgcttcttgatgccgagttcgagtacaagaagttggccgctatggataaggagcaccccgaccactccaagtataaggatgacaagtttatcgcggtctgcaaagacctcgataatgtcaaacgtatacttggagctggcgggggctccggcaagcgcaccgctgacggctccggggggggctctccgaagaagaagcggaaggtgcccgctgcgaagcgggtaaagcttgattcggagagcgccaccccggagtccgtcagcggttggcgcttgttcaagaagatttcttgactagcaccagcctcaagaacacccgaatggagtctctaagctacataataccaacttacactttacaaaatgttgtcccccaaaatgtagccattcgtatctgctcctaataaaaagaaagtttcttcacattctctcgagaaaaaaaaaaaatggaaaaaaaaaaaacggaaaaaaaaaaaaggtaaaaaaaaaaaatataaaaaaaaaaaacataaaaaaaaaaaacgaaaaaaaaaaaacgtaaaaaaaaaaaactcaaaaaaaaaaaagataaaaaaaaaaaacctaaaaaaaaaaaatgtaaaaaaaaaaaagggaaaaaaaaaaaacgcaaaaaaaaaaaacacaaaaaaaaaaaatgcaaaaaaaaaaaatcgaaaaaaaaaaaatctaaaaaaaaaaaacgaaaaaaaaaaaacccaaaaaaaaaaaagacaaaaaaaaaaaatagaaaaaaaaaaagttaaaaaaaaaaaactgaaaaaaaaaaaatttaaaaaaaaaaaatctag

SEQ ID NO: 2517 - DNA, 7619 bp, synthetic construct
  misc_feature 1..7619: note = Synthetic
  source 1..7619: mol_type = other DNA
aggactcactatttgttttcgcgcccagttgcaaaaagtgtcgaagctcagaataaacgctcaactttggccggatctgccaccatgaagcggccggctgcgaccaagaaggctggtcaggctaagaagaagaaggacaagaagtactccatcggcctcgacatcgggacgaactccgtgggttgggcggtgatcaccgatgagtacaaggtcccgtccaagaaattcaaggtgctgggtaacaccgatcgacatagtatcaagaagaacctgatcggggccctcttgttcgacagcggcgagactgctgaggcgacgcgcttgaagaggacggcccggcgtcgatacacccgacgcaagaatcggatttgctatctccaggagatcttctccaacgagatggcaaaggtggacgactcgttcttccaccgcctcgaggagagctttctcgtcgaggaggacaagaagcacgagcgccaccccatattcgggaatatcgtggatgaggtcgcctatcacgagaagtaccccacgatttatcatttgcgcaagaagctggtagattcaaccgacaaggcggacttgcggttgatctacctagctcttgcgcatatgataaagtttcgggggcacttcttgattgaaggcgacctcaatcccgataactcggatgtggacaagctcttcatacagctggtgcagacctacaaccagctgtttgaagagaatccgattaatgcgtcgggtgtcgacgccaaggccatcctcagcgcgcgcctcagcaagtctcgccgccttgagaatctgattgcccagctcccgggcgagaagaagaacgggttgttcggtaaccttattgcgctgtcgcttggcctcactccgaacttcaagtcgaacttcgacttggcggaggacgccaagctgcagctcagtaaggatacctacgacgacgacctggacaatcttctcgcccagatcggcgaccagtacgccgatctcttcctggcggcgaagaatctgagcgatgcaattctcctgagtgacattctgagggtgaatactgaaattacgaaggctccgctgtctgccagcatgatcaagcggtacgatgagcatcaccaggacctgacgctcctcaaggctctcgtccgtcagcagctcccggagaagtacaaggagatcttcttcgaccagtcgaagaacggatacgccgggtacatcgacgggggcgcttcccaggaggagttttataagtttataaagcccatcctggagaagatggacgggaccgaggagctcctggtgaagctcaaccgcgaggatctgctgcgcaagcagcggaccttcgataatggcagtattccccatcagattcacttaggagagttgcacgcgattcttcgccgccaggaagacttctaccccttcctcaaagataacagggagaagatcgagaagatcctcaccttccgcatcccgtattacgtgggtcccctggcgcgggggaactcacgttttgcgtggatgacgcggaagagtgaggagacgatcactccctggaactttgaggaagtggtagacaagggtgcttcggcacagtccttcatcgagcggatgacaaattttgacaagaatttgccgaacgagaaggtcttgccgaagcactcgctgctttacgagtactttacggtttacaacgagttgacgaaggtcaagtacgtcactgagggaatgcggaagcccgcattcctcagtggcgaacagaagaaggccatcgtcgacttgttgttcaagacgaaccgtaaagtaaccgtgaagcagctgaaggaggactacttcaagaagatcgagtgcttcgactccgttgagatcagcggagtcgaagaccgatttaatgcctccctcggtacgtatcatgatctcctcaagattatcaaggataaggacttccttgataatgaggagaatgaggatattctcgaggacattgtgctgaccctcaccctgttcgaagaccgtgagatgattgaggaacggttgaagacctacgctcatctgtttgatgacaaggtcatgaagcagttgaagcgtaggcgttataccggctggggtcgtctttcccgaaagcttatcaacgggatccgtgataagcagtcgggaaagacgatcctagacttcctcaagtctgacggttttgcgaacaggaacttcatgcagctcatccacgacgactccttgaccttcaaggaggatatccagaaggcgcaggtgagcggccagggcgatagcttgcacgagcatatcgcgaacctggccggctcacctgcgatcaagaagggtatcctccagacggtcaaggtcgtggatgagctcgtgaaggtgatgggtcggcacaagcccgagaatatcgtcatcgagatggctcgcgagaatcagacgacccagaagggtcagaagaattctcgcgagcgcatgaagcgtatcgaggagggcattaaggagctgggcagtcagattctcaaggagcaccctgtcgagaacacgcagcttcagaacgagaagctgtatctttactacctccagaacggacgggacatgtacgtagatcaggagctggacatcaaccggctctctgactacgatgtcgatgctatcgtccctcagagctttctgaaggacgatagcatcgacaacaaggtcctgactcgctccgataagaatcggggcaagtcggacaatgtcccgtccgaggaggtagtgaagaagatgaagaactattggcgtcagctgttgaacgcgaagctgatcactcagagaaagttcgataatctcaccaaggccgagagggggggtctgagcgagcttgataaggcgggtttcatcaagcggcagcttgttgagacccgccagatcacgaagcacgtcgctcagatcctcgactctcggatgaacaccaagtacgacgagaatgacaagcttattcgggaggtcaaggtcattacccttaagtcgaagctcgtcagcgactttcgcaaggattttcagttttataaagttcgtgagataaacaattatcaccatgcccacgacgcgtacctgaacgccgtcgtgggcacggcgctgataaagaagtacccgaagctggagtccgagttcgtttatggcgattataaggtgtacgacgtgcgcaagatgatcgccaagagcgagcaggagatcggaaaggctacggcgaagtacttcttttacagcaacatcatgaacttttttaagactgagatcacccttgcgaatggcgagatccgcaagcgcccgttgatcgagacgaacggggagactggggagattgtgtgggataagggtcgggatttcgctacggtgagaaaggttctttcgatgccccaggtcaacatcgtcaagaagacggaggttcagaccgggggcttctcgaaagaatctatcttaccgaagcgaaattccgacaagcttatcgcacgcaagaaggactgggaccccaagaagtacggggggttcgacagtcctacggtggcctactccgtgttggtggtcgccaaggttgagaagggcaagagcaagaagctcaagtccgtcaaggagctcttggggatcaccatcatggagaggtcatcgtttgagaagaatcctattgacttccttgaagccaagggctacaaggaagtcaagaaggatttgatcatcaagctccccaagtactccctgttcgagctcgagaacgggcgcaagcggatgctcgccagcgctggcgagcttcagaagggtaatgagcttgccctcccgagtaagtatgtcaatttcttgtacttggcgtcgcactacgagaagctgaagggctcgccggaggacaacgagcagaagcagcttttcgtagagcagcacaagcactaccttgatgagattatcgagcagatctctgagttcagcaagcgcgttatactagctgacgccaatctcgacaaggtgctctcggcttataacaagcaccgggataagccgatacgtgagcaggcggagaacatcatccacctgttcacgttgacgaacttgggggccccggcagcgttcaagtattttgatactacgatcgatcggaagcgttacaccagcaccaaggaggtcttggacgcgaccttgattcatcagtcgatcacgggtctctacgagacccggatcgacctgtcgcagctcgggggcgacggcgcccccgagtctgcgacagagtcgggcgggacttccaccgagagtgaaggatcggccggccccaagaagaagcgcaaagtcacgtcgacggagtcggaggggtctgcggggtccgcggggagcacgtccggctcctcctcgggcatgaagatcgctgttgtcgataaggcgttgaacaatacgcgttacgacaagcattttcagctgtacggggaggaggtggacgtgttccatatgtgcaatgagaagctgagcggtcggcttctcaagaagcacataaccatcgggaccccggagaaccccttcgacccgaacgactatgactttgtgattcttgttggggccgagccgttcctttactttgcggggaagaaggggatcggggactataccggtaagcgtgtcgagtacaatggatacgctaactggatagcctcgatctcccccgcccagcttcatttcaagcctgagatgaagccggtcttcgacgcgaccgttgagaatatccacgatattatcaacggtcgcgagaagatcgcgaaggccggtgattaccgcccaatcacggatcccgacgaggccgaggagtacatcaagatggtgtacaacatggtgattgggcccgtggcgttcgcctccgctacgtcggcattgtattgtcgagacggctacctccttggggtgtcgatcagccaccaggagtaccaaggagtgtatatcgattcagattgtctgacggaggtggctgtctattatctgcagaagatattagacagcgagaaccacaccatcgtcttccacaatctgaagttcgatatgcacttctacaagtaccacctggggctgacgttcgacaaggcccacaaggagcgccgtctccacgatacaatgctccagcactacgtgctggacgagcggaggggaacccacgggctcaagagcctcgccatgaagtacaccgatatgggcgattacgatttcgaacttgataagttcaaggacgactattgtaaggcccataagatcaagaaggaggacttcacctacgacttgatcccttttgacatcatgtggccgtacgcagctaaggacaccgatgcgacgatcaggctgcacaacttctttcttccgaagatcgagaagaacgagaagttgtgcagcctgtattacgacgtgttgatgcctggctgcgtgttcctgcagcgcgttgaggaccgcggcgtgcccatcagcatcgatcgactgaaggaggcgcagtatcagctcacacataatctgaacaaggcacgggagaagctttacacttacccggaggttaagcagctcgagcaggaccagaacgaggcgtttaaccccaatagtgtgaagcagctccgcgtgctcttgttcgattatgtggggctgacgccgactggtaagcttacggatacaggagcggatagcacggatgctgaggcgctgaacgagttagcgactcagcatccgattgctaagacgctcctggagatccgtaagcttaccaagttgatctccacttatgtggagaagatccttctgtcgatcgatgctgatgggtgcatccggacggggtttcatgagcacatgaccacgtccgggcgcctcagcagtagtgggaagctgaaccttcagcagctcccacgcgatgagtcgataatcaaggggtgcgtggtcgcaccccctggttatcgagtcatcgcgtgggatctcactactgctgaggtgtactacgccgcggtcctcagcggcgacaggaacatgcagcaggtgttcatcaacatgcgtaatgagccggataagtatccggacttccacagcaacatcgcgcatatggtgttcaagctgcagtgcgagccacgtgatgtcaagaagctgtttccagcgcttcggcaggcggcgaaggccattacgttcggtatactctatggcagtgggccagcgaaggtggcccactccgtcaacgaggcactcctcgagcaggccgccaagactggcgagccgttcgtggagtgcaccgttgcggatgccaaggagtatatcgaaacgtactttggccagttcccgcagctgaagcgctggatagataaatgccatgatcagatcaagaatcatggctttatctacagccattttggtcgcaaacggcggcttcataatatccatagcgaggatcgcggagtccagggcgaagagattcgctctggattcaacgcgatcatccagagcgctagttccgactccctcctcctcggcgctgtcgatgccgacaacgagatcatcagtcttggtctcgagcaggagatgaagattgtgatgctcgtgcacgatagcgtggtcgctatcgtgcgtgaggatctcattgaccagtacaatgagatcctcattcggaacatccagaaggatcgagggatctcgatccctggatgtccgatcggcatcgacagcgactccgaggcaggagggagtcgggactacagctgtggaaagatgaagaagcagcacccttccatagcgtgtatagacgacgacgagtatacacgctatgtgaagggtgtgcttcttgatgccgagttcgagtacaagaagttggccgctatggataaggagcaccccgaccactccaagtataaggatgacaagtttatcgcggtctgcaaagacctcgataatgtcaaacgtatacttggagctggcgggggctccggcaagcgcaccgctgacggctccggggggggctctccgaagaagaagcggaaggtgcccgctgcgaagcgggtaaagcttgattcggagagcgccaccccggagtccgtcagcggttggcgcttgttcaagaagatttcttgactagcaccagcctcaagaacacccgaatggagtctctaagctacataataccaacttacactttacaaaatgttgtcccccaaaatgtagccattcgtatctgctcctaataaaaagaaagtttcttcacattctctcgagaaaaaaaaaaaatggaaaaaaaaaaaacggaaaaaaaaaaaaggtaaaaaaaaaaaatataaaaaaaaaaaacataaaaaaaaaaaacgaaaaaaaaaaaacgtaaaaaaaaaaaactcaaaaaaaaaaaagataaaaaaaaaaaacctaaaaaaaaaaaatgtaaaaaaaaaaaagggaaaaaaaaaaaacgcaaaaaaaaaaaacacaaaaaaaaaaaatgcaaaaaaaaaaaatcgaaaaaaaaaaaatctaaaaaaaaaaaacgaaaaaaaaaaaacccaaaaaaaaaaaagacaaaaaaaaaaaatagaaaaaaaaaaagttaaaaaaaaaaaactgaaaaaaaaaaaatttaaaaaaaaaaaatctag

SEQ ID NO: 2518 - DNA, 7673 bp, synthetic construct
  misc_feature 1..7673: note = Synthetic
  source 1..7673: mol_type = other DNA
aggaagctcagaataaacgctcaactttggccggatctgccaccatgaagcggccggctgcgaccaagaaggctggtcaggctaagaagaagaaggacaagaagtactccatcggcctcgacatcgggacgaactccgtgggttgggcggtgatcaccgatgagtacaaggtcccgtccaagaaattcaaggtgctgggtaacaccgatcgacatagtatcaagaagaacctgatcggggccctcttgttcgacagcggcgagactgctgaggcgacgcgcttgaagaggacggcccggcgtcgatacacccgacgcaagaatcggatttgctatctccaggagatcttctccaacgagatggcaaaggtggacgactcgttcttccaccgcctcgaggagagctttctcgtcgaggaggacaagaagcacgagcgccaccccatattcgggaatatcgtggatgaggtcgcctatcacgagaagtaccccacgatttatcatttgcgcaagaagctggtagattcaaccgacaaggcggacttgcggttgatctacctagctcttgcgcatatgataaagtttcgggggcacttcttgattgaaggcgacctcaatcccgataactcggatgtggacaagctcttcatacagctggtgcagacctacaaccagctgtttgaagagaatccgattaatgcgtcgggtgtcgacgccaaggccatcctcagcgcgcgcctcagcaagtctcgccgccttgagaatctgattgcccagctcccgggcgagaagaagaacgggttgttcggtaaccttattgcgctgtcgcttggcctcactccgaacttcaagtcgaacttcgacttggcggaggacgccaagctgcagctcagtaaggatacctacgacgacgacctggacaatcttctcgcccagatcggcgaccagtacgccgatctcttcctggcggcgaagaatctgagcgatgcaattctcctgagtgacattctgagggtgaatactgaaattacgaaggctccgctgtctgccagcatgatcaagcggtacgatgagcatcaccaggacctgacgctcctcaaggctctcgtccgtcagcagctcccggagaagtacaaggagatcttcttcgaccagtcgaagaacggatacgccgggtacatcgacgggggcgcttcccaggaggagttttataagtttataaagcccatcctggagaagatggacgggaccgaggagctcctggtgaagctcaaccgcgaggatctgctgcgcaagcagcggaccttcgataatggcagtattccccatcagattcacttaggagagttgcacgcgattcttcgccgccaggaagacttctaccccttcctcaaagataacagggagaagatcgagaagatcctcaccttccgcatcccgtattacgtgggtcccctggcgcgggggaactcacgttttgcgtggatgacgcggaagagtgaggagacgatcactccctggaactttgaggaagtggtagacaagggtgcttcggcacagtccttcatcgagcggatgacaaattttgacaagaatttgccgaacgagaaggtcttgccgaagcactcgctgctttacgagtactttacggtttacaacgagttgacgaaggtcaagtacgtcactgagggaatgcggaagcccgcattcctcagtggcgaacagaagaaggccatcgtcgacttgttgttcaagacgaaccgtaaagtaaccgtgaagcagctgaaggaggactacttcaagaagatcgagtgcttcgactccgttgagatcagcggagtcgaagaccgatttaatgcctccctcggtacgtatcatgatctcctcaagattatcaaggataaggacttccttgataatgaggagaatgaggatattctcgaggacattgtgctgaccctcaccctgttcgaagaccgtgagatgattgaggaacggttgaagacctacgctcatctgtttgatgacaaggtcatgaagcagttgaagcgtaggcgttataccggctggggtcgtctttcccgaaagcttatcaacgggatccgtgataagcagtcgggaaagacgatcctagacttcctcaagtctgacggttttgcgaacaggaacttcatgcagctcatccacgacgactccttgaccttcaaggaggatatccagaaggcgcaggtgagcggccagggcgatagcttgcacgagcatatcgcgaacctggccggctcacctgcgatcaagaagggtatcctccagacggtcaaggtcgtggatgagctcgtgaaggtgatgggtcggcacaagcccgagaatatcgtcatcgagatggctcgcgagaatcagacgacccagaagggtcagaagaattctcgcgagcgcatgaagcgtatcgaggagggcattaaggagctgggcagtcagattctcaaggagcaccctgtcgagaacacgcagcttcagaacgagaagctgtatctttactacctccagaacggacgggacatgtacgtagatcaggagctggacatcaaccggctctctgactacgatgtcgatgctatcgtccctcagagctttctgaaggacgatagcatcgacaacaaggtcctgactcgctccgataagaatcggggcaagtcggacaatgtcccgtccgaggaggtagtgaagaagatgaagaactattggcgtcagctgttgaacgcgaagctgatcactcagagaaagttcgataatctcaccaaggccgagagggggggtctgagcgagcttgataaggcgggtttcatcaagcggcagcttgttgagacccgccagatcacgaagcacgtcgctcagatcctcgactctcggatgaacaccaagtacgacgagaatgacaagcttattcgggaggtcaaggtcattacccttaagtcgaagctcgtcagcgactttcgcaaggattttcagttttataaagttcgtgagataaacaattatcaccatgcccacgacgcgtacctgaacgccgtcgtgggcacggcgctgataaagaagtacccgaagctggagtccgagttcgtttatggcgattataaggtgtacgacgtgcgcaagatgatcgccaagagcgagcaggagatcggaaaggctacggcgaagtacttcttttacagcaacatcatgaacttttttaagactgagatcacccttgcgaatggcgagatccgcaagcgcccgttgatcgagacgaacggggagactggggagattgtgtgggataagggtcgggatttcgctacggtgagaaaggttctttcgatgccccaggtcaacatcgtcaagaagacggaggttcagaccgggggcttctcgaaagaatctatcttaccgaagcgaaattccgacaagcttatcgcacgcaagaaggactgggaccccaagaagtacggggggttcgacagtcctacggtggcctactccgtgttggtggtcgccaaggttgagaagggcaagagcaagaagctcaagtccgtcaaggagctcttggggatcaccatcatggagaggtcatcgtttgagaagaatcctattgacttccttgaagccaagggctacaaggaagtcaagaaggatttgatcatcaagctccccaagtactccctgttcgagctcgagaacgggcgcaagcggatgctcgccagcgctggcgagcttcagaagggtaatgagcttgccctcccgagtaagtatgtcaatttcttgtacttggcgtcgcactacgagaagctgaagggctcgccggaggacaacgagcagaagcagcttttcgtagagcagcacaagcactaccttgatgagattatcgagcagatctctgagttcagcaagcgcgttatactagctgacgccaatctcgacaaggtgctctcggcttataacaagcaccgggataagccgatacgtgagcaggcggagaacatcatccacctgttcacgttgacgaacttgggggccccggcagcgttcaagtattttgatactacgatcgatcggaagcgttacaccagcaccaaggaggtcttggacgcgaccttgattcatcagtcgatcacgggtctctacgagacccggatcgacctgtcgcagctcgggggcgacggcgcccccgagtctgcgacagagtcgggcgggacttccaccgagagtgaaggatcggccggccccaagaagaagcgcaaagtcacgtcgacggagtcggaggggtctgcggggtccgcggggagcacgtccggctcctcctcgggcatgaagatcgctgttgtcgataaggcgttgaacaatacgcgttacgacaagcattttcagctgtacggggaggaggtggacgtgttccatatgtgcaatgagaagctgagcggtcggcttctcaagaagcacataaccatcgggaccccggagaaccccttcgacccgaacgactatgactttgtgattcttgttggggccgagccgttcctttactttgcggggaagaaggggatcggggactataccggtaagcgtgtcgagtacaatggatacgctaactggatagcctcgatctcccccgcccagcttcatttcaagcctgagatgaagccggtcttcgacgcgaccgttgagaatatccacgatattatcaacggtcgcgagaagatcgcgaaggccggtgattaccgcccaatcacggatcccgacgaggccgaggagtacatcaagatggtgtacaacatggtgattgggcccgtggcgttcgcctccgctacgtcggcattgtattgtcgagacggctacctccttggggtgtcgatcagccaccaggagtaccaaggagtgtatatcgattcagattgtctgacggaggtggctgtctattatctgcagaagatattagacagcgagaaccacaccatcgtcttccacaatctgaagttcgatatgcacttctacaagtaccacctggggctgacgttcgacaaggcccacaaggagcgccgtctccacgatacaatgctccagcactacgtgctggacgagcggaggggaacccacgggctcaagagcctcgccatgaagtacaccgatatgggcgattacgatttcgaacttgataagttcaaggacgactattgtaaggcccataagatcaagaaggaggacttcacctacgacttgatcccttttgacatcatgtggccgtacgcagctaaggacaccgatgcgacgatcaggctgcacaacttctttcttccgaagatcgagaagaacgagaagttgtgcagcctgtattacgacgtgttgatgcctggctgcgtgttcctgcagcgcgttgaggaccgcggcgtgcccatcagcatcgatcgactgaaggaggcgcagtatcagctcacacataatctgaacaaggcacgggagaagctttacacttacccggaggttaagcagctcgagcaggaccagaacgaggcgtttaaccccaatagtgtgaagcagctccgcgtgctcttgttcgattatgtggggctgacgccgactggtaagcttacggatacaggagcggatagcacggatgctgaggcgctgaacgagttagcgactcagcatccgattgctaagacgctcctggagatccgtaagcttaccaagttgatctccacttatgtggagaagatccttctgtcgatcgatgctgatgggtgcatccggacggggtttcatgagcacatgaccacgtccgggcgcctcagcagtagtgggaagctgaaccttcagcagctcccacgcgatgagtcgataatcaaggggtgcgtggtcgcaccccctggttatcgagtcatcgcgtgggatctcactactgctgaggtgtactacgccgcggtcctcagcggcgacaggaacatgcagcaggtgttcatcaacatgcgtaatgagccggataagtatccggacttccacagcaacatcgcgcatatggtgttcaagctgcagtgcgagccacgtgatgtcaagaagctgtttccagcgcttcggcaggcggcgaaggccattacgttcggtatactctatggcagtgggccagcgaaggtggcccactccgtcaacgaggcactcctcgagcaggccgccaagactggcgagccgttcgtggagtgcaccgttgcggatgccaaggagtatatcgaaacgtactttggccagttcccgcagctgaagcgctggatagataaatgccatgatcagatcaagaatcatggctttatctacagccattttggtcgcaaacggcggcttcataatatccatagcgaggatcgcggagtccagggcgaagagattcgctctggattcaacgcgatcatccagagcgctagttccgactccctcctcctcggcgctgtcgatgccgacaacgagatcatcagtcttggtctcgagcaggagatgaagattgtgatgctcgtgcacgatagcgtggtcgctatcgtgcgtgaggatctcattgaccagtacaatgagatcctcattcggaacatccagaaggatcgagggatctcgatccctggatgtccgatcggcatcgacagcgactccgaggcaggagggagtcgggactacagctgtggaaagatgaagaagcagcacccttccatagcgtgtatagacgacgacgagtatacacgctatgtgaagggtgtgcttcttgatgccgagttcgagtacaagaagttggccgctatggataaggagcaccccgaccactccaagtataaggatgacaagtttatcgcggtctgcaaagacctcgataatgtcaaacgtatacttggagctggcgggggctccggcaagcgcaccgctgacggctccggggggggctctccgaagaagaagcggaaggtgcccgctgcgaagcgggtaaagcttgattcggagagcgccaccccggagtccgtcagcggttggcgcttgttcaagaagatttcttgactagcaccagcctcaagaacacccgaatggagtctctaagctacataataccaacttacactttacaaaatgttgtcccccaaaatgtagccattcgtatctgctcctaataaaaagaaagtttcttcacattcttgtcagcccagaaccccacacgagttttgccactgctaagctgtgaggcagtgcaggctgggacagccgacctccaggttgcgaaaaacctggtctcgagaaaaaaaaaaaatggaaaaaaaaaaaacggaaaaaaaaaaaaggtaaaaaaaaaaaatataaaaaaaaaaaacataaaaaaaaaaaacgaaaaaaaaaaaacgtaaaaaaaaaaaactcaaaaaaaaaaaagataaaaaaaaaaaacctaaaaaaaaaaaatgtaaaaaaaaaaaagggaaaaaaaaaaaacgcaaaaaaaaaaaacacaaaaaaaaaaaatgcaaaaaaaaaaaatcgaaaaaaaaaaaatctaaaaaaaaaaaacgaaaaaaaaaaaacccaaaaaaaaaaaagacaaaaaaaaaaaatagaaaaaaaaaaagttaaaaaaaaaaaactgaaaaaaaaaaaatttaaaaaaaaaaaatctag

SEQ ID NO: 2519 - DNA, 7713 bp, synthetic construct
  misc_feature 1..7713: note = Synthetic
  source 1..7713: mol_type = other DNA
aggactcactatttgttttcgcgcccagttgcaaaaagtgtcgaagctcagaataaacgctcaactttggccggatctgccaccatgaagcggccggctgcgaccaagaaggctggtcaggctaagaagaagaaggacaagaagtactccatcggcctcgacatcgggacgaactccgtgggttgggcggtgatcaccgatgagtacaaggtcccgtccaagaaattcaaggtgctgggtaacaccgatcgacatagtatcaagaagaacctgatcggggccctcttgttcgacagcggcgagactgctgaggcgacgcgcttgaagaggacggcccggcgtcgatacacccgacgcaagaatcggatttgctatctccaggagatcttctccaacgagatggcaaaggtggacgactcgttcttccaccgcctcgaggagagctttctcgtcgaggaggacaagaagcacgagcgccaccccatattcgggaatatcgtggatgaggtcgcctatcacgagaagtaccccacgatttatcatttgcgcaagaagctggtagattcaaccgacaaggcggacttgcggttgatctacctagctcttgcgcatatgataaagtttcgggggcacttcttgattgaaggcgacctcaatcccgataactcggatgtggacaagctcttcatacagctggtgcagacctacaaccagctgtttgaagagaatccgattaatgcgtcgggtgtcgacgccaaggccatcctcagcgcgcgcctcagcaagtctcgccgccttgagaatctgattgcccagctcccgggcgagaagaagaacgggttgttcggtaaccttattgcgctgtcgcttggcctcactccgaacttcaagtcgaacttcgacttggcggaggacgccaagctgcagctcagtaaggatacctacgacgacgacctggacaatcttctcgcccagatcggcgaccagtacgccgatctcttcctggcggcgaagaatctgagcgatgcaattctcctgagtgacattctgagggtgaatactgaaattacgaaggctccgctgtctgccagcatgatcaagcggtacgatgagcatcaccaggacctgacgctcctcaaggctctcgtccgtcagcagctcccggagaagtacaaggagatcttcttcgaccagtcgaagaacggatacgccgggtacatcgacgggggcgcttcccaggaggagttttataagtttataaagcccatcctggagaagatggacgggaccgaggagctcctggtgaagctcaaccgcgaggatctgctgcgcaagcagcggaccttcgataatggcagtattccccatcagattcacttaggagagttgcacgcgattcttcgccgccaggaagacttctaccccttcctcaaagataacagggagaagatcgagaagatcctcaccttccgcatcccgtattacgtgggtcccctggcgcgggggaactcacgttttgcgtggatgacgcggaagagtgaggagacgatcactccctggaactttgaggaagtggtagacaagggtgcttcggcacagtccttcatcgagcggatgacaaattttgacaagaatttgccgaacgagaaggtcttgccgaagcactcgctgctttacgagtactttacggtttacaacgagttgacgaaggtcaagtacgtcactgagggaatgcggaagcccgcattcctcagtggcgaacagaagaaggccatcgtcgacttgttgttcaagacgaaccgtaaagtaaccgtgaagcagctgaaggaggactacttcaagaagatcgagtgcttcgactccgttgagatcagcggagtcgaagaccgatttaatgcctccctcggtacgtatcatgatctcctcaagattatcaaggataaggacttccttgataatgaggagaatgaggatattctcgaggacattgtgctgaccctcaccctgttcgaagaccgtgagatgattgaggaacggttgaagacctacgctcatctgtttgatgacaaggtcatgaagcagttgaagcgtaggcgttataccggctggggtcgtctttcccgaaagcttatcaacgggatccgtgataagcagtcgggaaagacgatcctagacttcctcaagtctgacggttttgcgaacaggaacttcatgcagctcatccacgacgactccttgaccttcaaggaggatatccagaaggcgcaggtgagcggccagggcgatagcttgcacgagcatatcgcgaacctggccggctcacctgcgatcaagaagggtatcctccagacggtcaaggtcgtggatgagctcgtgaaggtgatgggtcggcacaagcccgagaatatcgtcatcgagatggctcgcgagaatcagacgacccagaagggtcagaagaattctcgcgagcgcatgaagcgtatcgaggagggcattaaggagctgggcagtcagattctcaaggagcaccctgtcgagaacacgcagcttcagaacgagaagctgtatctttactacctccagaacggacgggacatgtacgtagatcaggagctggacatcaaccggctctctgactacgatgtcgatgctatcgtccctcagagctttctgaaggacgatagcatcgacaacaaggtcctgactcgctccgataagaatcggggcaagtcggacaatgtcccgtccgaggaggtagtgaagaagatgaagaactattggcgtcagctgttgaacgcgaagctgatcactcagagaaagttcgataatctcaccaaggccgagagggggggtctgagcgagcttgataaggcgggtttcatcaagcggcagcttgttgagacccgccagatcacgaagcacgtcgctcagatcctcgactctcggatgaacaccaagtacgacgagaatgacaagcttattcgggaggtcaaggtcattacccttaagtcgaagctcgtcagcgactttcgcaaggattttcagttttataaagttcgtgagataaacaattatcaccatgcccacgacgcgtacctgaacgccgtcgtgggcacggcgctgataaagaagtacccgaagctggagtccgagttcgtttatggcgattataaggtgtacgacgtgcgcaagatgatcgccaagagcgagcaggagatcggaaaggctacggcgaagtacttcttttacagcaacatcatgaacttttttaagactgagatcacccttgcgaatggcgagatccgcaagcgcccgttgatcgagacgaacggggagactggggagattgtgtgggataagggtcgggatttcgctacggtgagaaaggttctttcgatgccccaggtcaacatcgtcaagaagacggaggttcagaccgggggcttctcgaaagaatctatcttaccgaagcgaaattccgacaagcttatcgcacgcaagaaggactgggaccccaagaagtacggggggttcgacagtcctacggtggcctactccgtgttggtggtcgccaaggttgagaagggcaagagcaagaagctcaagtccgtcaaggagctcttggggatcaccatcatggagaggtcatcgtttgagaagaatcctattgacttccttgaagccaagggctacaaggaagtcaagaaggatttgatcatcaagctccccaagtactccctgttcgagctcgagaacgggcgcaagcggatgctcgccagcgctggcgagcttcagaagggtaatgagcttgccctcccgagtaagtatgtcaatttcttgtacttggcgtcgcactacgagaagctgaagggctcgccggaggacaacgagcagaagcagcttttcgtagagcagcacaagcactaccttgatgagattatcgagcagatctctgagttcagcaagcgcgttatactagctgacgccaatctcgacaaggtgctctcggcttataacaagcaccgggataagccgatacgtgagcaggcggagaacatcatccacctgttcacgttgacgaacttgggggccccggcagcgttcaagtattttgatactacgatcgatcggaagcgttacaccagcaccaaggaggtcttggacgcgaccttgattcatcagtcgatcacgggtctctacgagacccggatcgacctgtcgcagctcgggggcgacggcgcccccgagtctgcgacagagtcgggcgggacttccaccgagagtgaaggatcggccggccccaagaagaagcgcaaagtcacgtcgacggagtcggaggggtctgcggggtccgcggggagcacgtccggctcctcctcgggcatgaagatcgctgttgtcgataaggcgttgaacaatacgcgttacgacaagcattttcagctgtacggggaggaggtggacgtgttccatatgtgcaatgagaagctgagcggtcggcttctcaagaagcacataaccatcgggaccccggagaaccccttcgacccgaacgactatgactttgtgattcttgttggggccgagccgttcctttactttgcggggaagaaggggatcggggactataccggtaagcgtgtcgagtacaatggatacgctaactggatagcctcgatctcccccgcccagcttcatttcaagcctgagatgaagccggtcttcgacgcgaccgttgagaatatccacgatattatcaacggtcgcgagaagatcgcgaaggccggtgattaccgcccaatcacggatcccgacgaggccgaggagtacatcaagatggtgtacaacatggtgattgggcccgtggcgttcgcctccgctacgtcggcattgtattgtcgagacggctacctccttggggtgtcgatcagccaccaggagtaccaaggagtgtatatcgattcagattgtctgacggaggtggctgtctattatctgcagaagatattagacagcgagaaccacaccatcgtcttccacaatctgaagttcgatatgcacttctacaagtaccacctggggctgacgttcgacaaggcccacaaggagcgccgtctccacgatacaatgctccagcactacgtgctggacgagcggaggggaacccacgggctcaagagcctcgccatgaagtacaccgatatgggcgattacgatttcgaacttgataagttcaaggacgactattgtaaggcccataagatcaagaaggaggacttcacctacgacttgatcccttttgacatcatgtggccgtacgcagctaaggacaccgatgcgacgatcaggctgcacaacttctttcttccgaagatcgagaagaacgagaagttgtgcagcctgtattacgacgtgttgatgcctggctgcgtgttcctgcagcgcgttgaggaccgcggcgtgcccatcagcatcgatcgactgaaggaggcgcagtatcagctcacacataatctgaacaaggcacgggagaagctttacacttacccggaggttaagcagctcgagcaggaccagaacgaggcgtttaaccccaatagtgtgaagcagctccgcgtgctcttgttcgattatgtggggctgacgccgactggtaagcttacggatacaggagcggatagcacggatgctgaggcgctgaacgagttagcgactcagcatccgattgctaagacgctcctggagatccgtaagcttaccaagttgatctccacttatgtggagaagatccttctgtcgatcgatgctgatgggtgcatccggacggggtttcatgagcacatgaccacgtccgggcgcctcagcagtagtgggaagctgaaccttcagcagctcccacgcgatgagtcgataatcaaggggtgcgtggtcgcaccccctggttatcgagtcatcgcgtgggatctcactactgctgaggtgtactacgccgcggtcctcagcggcgacaggaacatgcagcaggtgttcatcaacatgcgtaatgagccggataagtatccggacttccacagcaacatcgcgcatatggtgttcaagctgcagtgcgagccacgtgatgtcaagaagctgtttccagcgcttcggcaggcggcgaaggccattacgttcggtatactctatggcagtgggccagcgaaggtggcccactccgtcaacgaggcactcctcgagcaggccgccaagactggcgagccgttcgtggagtgcaccgttgcggatgccaaggagtatatcgaaacgtactttggccagttcccgcagctgaagcgctggatagataaatgccatgatcagatcaagaatcatggctttatctacagccattttggtcgcaaacggcggcttcataatatccatagcgaggatcgcggagtccagggcgaagagattcgctctggattcaacgcgatcatccagagcgctagttccgactccctcctcctcggcgctgtcgatgccgacaacgagatcatcagtcttggtctcgagcaggagatgaagattgtgatgctcgtgcacgatagcgtggtcgctatcgtgcgtgaggatctcattgaccagtacaatgagatcctcattcggaacatccagaaggatcgagggatctcgatccctggatgtccgatcggcatcgacagcgactccgaggcaggagggagtcgggactacagctgtggaaagatgaagaagcagcacccttccatagcgtgtatagacgacgacgagtatacacgctatgtgaagggtgtgcttcttgatgccgagttcgagtacaagaagttggccgctatggataaggagcaccccgaccactccaagtataaggatgacaagtttatcgcggtctgcaaagacctcgataatgtcaaacgtatacttggagctggcgggggctccggcaagcgcaccgctgacggctccggggggggctctccgaagaagaagcggaaggtgcccgctgcgaagcgggtaaagcttgattcggagagcgccaccccggagtccgtcagcggttggcgcttgttcaagaagatttcttgactagcaccagcctcaagaacacccgaatggagtctctaagctacataataccaacttacactttacaaaatgttgtcccccaaaatgtagccattcgtatctgctcctaataaaaagaaagtttcttcacattcttgtcagcccagaaccccacacgagttttgccactgctaagctgtgaggcagtgcaggctgggacagccgacctccaggttgcgaaaaacctggtctcgagaaaaaaaaaaaatggaaaaaaaaaaaacggaaaaaaaaaaaaggtaaaaaaaaaaaatataaaaaaaaaaaacataaaaaaaaaaaacgaaaaaaaaaaaacgtaaaaaaaaaaaactcaaaaaaaaaaaagataaaaaaaaaaaacctaaaaaaaaaaaatgtaaaaaaaaaaaagggaaaaaaaaaaaacgcaaaaaaaaaaaacacaaaaaaaaaaaatgcaaaaaaaaaaaatcgaaaaaaaaaaaatctaaaaaaaaaaaacgaaaaaaaaaaaacccaaaaaaaaaaaagacaaaaaaaaaaaatagaaaaaaaaaaagttaaaaaaaaaaaactgaaaaaaaaaaaatttaaaaaaaaaaaatctag

SEQ ID NO: 2520 - DNA, 7669 bp, synthetic construct
  misc_feature 1..7669: note = Synthetic
  source 1..7669: mol_type = other DNA
aggactcactatttgttttcgcgcccagttgcaaaaagtgtcgaaaaaaaaaaaaccaaaaaaaaaaaacaaaaaaaaaaaataattgactaaaagctcagaataaacgctcaactttggccggatctgccaccatgaagcggccggctgcgaccaagaaggctggtcaggctaagaagaagaaggacaagaagtactccatcggcctcgacatcgggacgaactccgtgggttgggcggtgatcaccgatgagtacaaggtcccgtccaagaaattcaaggtgctgggtaacaccgatcgacatagtatcaagaagaacctgatcggggccctcttgttcgacagcggcgagactgctgaggcgacgcgcttgaagaggacggcccggcgtcgatacacccgacgcaagaatcggatttgctatctccaggagatcttctccaacgagatggcaaaggtggacgactcgttcttccaccgcctcgaggagagctttctcgtcgaggaggacaagaagcacgagcgccaccccatattcgggaatatcgtggatgaggtcgcctatcacgagaagtaccccacgatttatcatttgcgcaagaagctggtagattcaaccgacaaggcggacttgcggttgatctacctagctcttgcgcatatgataaagtttcgggggcacttcttgattgaaggcgacctcaatcccgataactcggatgtggacaagctcttcatacagctggtgcagacctacaaccagctgtttgaagagaatccgattaatgcgtcgggtgtcgacgccaaggccatcctcagcgcgcgcctcagcaagtctcgccgccttgagaatctgattgcccagctcccgggcgagaagaagaacgggttgttcggtaaccttattgcgctgtcgcttggcctcactccgaacttcaagtcgaacttcgacttggcggaggacgccaagctgcagctcagtaaggatacctacgacgacgacctggacaatcttctcgcccagatcggcgaccagtacgccgatctcttcctggcggcgaagaatctgagcgatgcaattctcctgagtgacattctgagggtgaatactgaaattacgaaggctccgctgtctgccagcatgatcaagcggtacgatgagcatcaccaggacctgacgctcctcaaggctctcgtccgtcagcagctcccggagaagtacaaggagatcttcttcgaccagtcgaagaacggatacgccgggtacatcgacgggggcgcttcccaggaggagttttataagtttataaagcccatcctggagaagatggacgggaccgaggagctcctggtgaagctcaaccgcgaggatctgctgcgcaagcagcggaccttcgataatggcagtattccccatcagattcacttaggagagttgcacgcgattcttcgccgccaggaagacttctaccccttcctcaaagataacagggagaagatcgagaagatcctcaccttccgcatcccgtattacgtgggtcccctggcgcgggggaactcacgttttgcgtggatgacgcggaagagtgaggagacgatcactccctggaactttgaggaagtggtagacaagggtgcttcggcacagtccttcatcgagcggatgacaaattttgacaagaatttgccgaacgagaaggtcttgccgaagcactcgctgctttacgagtactttacggtttacaacgagttgacgaaggtcaagtacgtcactgagggaatgcggaagcccgcattcctcagtggcgaacagaagaaggccatcgtcgacttgttgttcaagacgaaccgtaaagtaaccgtgaagcagctgaaggaggactacttcaagaagatcgagtgcttcgactccgttgagatcagcggagtcgaagaccgatttaatgcctccctcggtacgtatcatgatctcctcaagattatcaaggataaggacttccttgataatgaggagaatgaggatattctcgaggacattgtgctgaccctcaccctgttcgaagaccgtgagatgattgaggaacggttgaagacctacgctcatctgtttgatgacaaggtcatgaagcagttgaagcgtaggcgttataccggctggggtcgtctttcccgaaagcttatcaacgggatccgtgataagcagtcgggaaagacgatcctagacttcctcaagtctgacggttttgcgaacaggaacttcatgcagctcatccacgacgactccttgaccttcaaggaggatatccagaaggcgcaggtgagcggccagggcgatagcttgcacgagcatatcgcgaacctggccggctcacctgcgatcaagaagggtatcctccagacggtcaaggtcgtggatgagctcgtgaaggtgatgggtcggcacaagcccgagaatatcgtcatcgagatggctcgcgagaatcagacgacccagaagggtcagaagaattctcgcgagcgcatgaagcgtatcgaggagggcattaaggagctgggcagtcagattctcaaggagcaccctgtcgagaacacgcagcttcagaacgagaagctgtatctttactacctccagaacggacgggacatgtacgtagatcaggagctggacatcaaccggctctctgactacgatgtcgatgctatcgtccctcagagctttctgaaggacgatagcatcgacaacaaggtcctgactcgctccgataagaatcggggcaagtcggacaatgtcccgtccgaggaggtagtgaagaagatgaagaactattggcgtcagctgttgaacgcgaagctgatcactcagagaaagttcgataatctcaccaaggccgagagggggggtctgagcgagcttgataaggcgggtttcatcaagcggcagcttgttgagacccgccagatcacgaagcacgtcgctcagatcctcgactctcggatgaacaccaagtacgacgagaatgacaagcttattcgggaggtcaaggtcattacccttaagtcgaagctcgtcagcgactttcgcaaggattttcagttttataaagttcgtgagataaacaattatcaccatgcccacgacgcgtacctgaacgccgtcgtgggcacggcgctgataaagaagtacccgaagctggagtccgagttcgtttatggcgattataaggtgtacgacgtgcgcaagatgatcgccaagagcgagcaggagatcggaaaggctacggcgaagtacttcttttacagcaacatcatgaacttttttaagactgagatcacccttgcgaatggcgagatccgcaagcgcccgttgatcgagacgaacggggagactggggagattgtgtgggataagggtcgggatttcgctacggtgagaaaggttctttcgatgccccaggtcaacatcgtcaagaagacggaggttcagaccgggggcttctcgaaagaatctatcttaccgaagcgaaattccgacaagcttatcgcacgcaagaaggactgggaccccaagaagtacggggggttcgacagtcctacggtggcctactccgtgttggtggtcgccaaggttgagaagggcaagagcaagaagctcaagtccgtcaaggagctcttggggatcaccatcatggagaggtcatcgtttgagaagaatcctattgacttccttgaagccaagggctacaaggaagtcaagaaggatttgatcatcaagctccccaagtactccctgttcgagctcgagaacgggcgcaagcggatgctcgccagcgctggcgagcttcagaagggtaatgagcttgccctcccgagtaagtatgtcaatttcttgtacttggcgtcgcactacgagaagctgaagggctcgccggaggacaacgagcagaagcagcttttcgtagagcagcacaagcactaccttgatgagattatcgagcagatctctgagttcagcaagcgcgttatactagctgacgccaatctcgacaaggtgctctcggcttataacaagcaccgggataagccgatacgtgagcaggcggagaacatcatccacctgttcacgttgacgaacttgggggccccggcagcgttcaagtattttgatactacgatcgatcggaagcgttacaccagcaccaaggaggtcttggacgcgaccttgattcatcagtcgatcacgggtctctacgagacccggatcgacctgtcgcagctcgggggcgacggcgcccccgagtctgcgacagagtcgggcgggacttccaccgagagtgaaggatcggccggccccaagaagaagcgcaaagtcacgtcgacggagtcggaggggtctgcggggtccgcggggagcacgtccggctcctcctcgggcatgaagatcgctgttgtcgataaggcgttgaacaatacgcgttacgacaagcattttcagctgtacggggaggaggtggacgtgttccatatgtgcaatgagaagctgagcggtcggcttctcaagaagcacataaccatcgggaccccggagaaccccttcgacccgaacgactatgactttgtgattcttgttggggccgagccgttcctttactttgcggggaagaaggggatcggggactataccggtaagcgtgtcgagtacaatggatacgctaactggatagcctcgatctcccccgcccagcttcatttcaagcctgagatgaagccggtcttcgacgcgaccgttgagaatatccacgatattatcaacggtcgcgagaagatcgcgaaggccggtgattaccgcccaatcacggatcccgacgaggccgaggagtacatcaagatggtgtacaacatggtgattgggcccgtggcgttcgcctccgctacgtcggcattgtattgtcgagacggctacctccttggggtgtcgatcagccaccaggagtaccaaggagtgtatatcgattcagattgtctgacggaggtggctgtctattatctgcagaagatattagacagcgagaaccacaccatcgtcttccacaatctgaagttcgatatgcacttctacaagtaccacctggggctgacgttcgacaaggcccacaaggagcgccgtctccacgatacaatgctccagcactacgtgctggacgagcggaggggaacccacgggctcaagagcctcgccatgaagtacaccgatatgggcgattacgatttcgaacttgataagttcaaggacgactattgtaaggcccataagatcaagaaggaggacttcacctacgacttgatcccttttgacatcatgtggccgtacgcagctaaggacaccgatgcgacgatcaggctgcacaacttctttcttccgaagatcgagaagaacgagaagttgtgcagcctgtattacgacgtgttgatgcctggctgcgtgttcctgcagcgcgttgaggaccgcggcgtgcccatcagcatcgatcgactgaaggaggcgcagtatcagctcacacataatctgaacaaggcacgggagaagctttacacttacccggaggttaagcagctcgagcaggaccagaacgaggcgtttaaccccaatagtgtgaagcagctccgcgtgctcttgttcgattatgtggggctgacgccgactggtaagcttacggatacaggagcggatagcacggatgctgaggcgctgaacgagttagcgactcagcatccgattgctaagacgctcctggagatccgtaagcttaccaagttgatctccacttatgtggagaagatccttctgtcgatcgatgctgatgggtgcatccggacggggtttcatgagcacatgaccacgtccgggcgcctcagcagtagtgggaagctgaaccttcagcagctcccacgcgatgagtcgataatcaaggggtgcgtggtcgcaccccctggttatcgagtcatcgcgtgggatctcactactgctgaggtgtactacgccgcggtcctcagcggcgacaggaacatgcagcaggtgttcatcaacatgcgtaatgagccggataagtatccggacttccacagcaacatcgcgcatatggtgttcaagctgcagtgcgagccacgtgatgtcaagaagctgtttccagcgcttcggcaggcggcgaaggccattacgttcggtatactctatggcagtgggccagcgaaggtggcccactccgtcaacgaggcactcctcgagcaggccgccaagactggcgagccgttcgtggagtgcaccgttgcggatgccaaggagtatatcgaaacgtactttggccagttcccgcagctgaagcgctggatagataaatgccatgatcagatcaagaatcatggctttatctacagccattttggtcgcaaacggcggcttcataatatccatagcgaggatcgcggagtccagggcgaagagattcgctctggattcaacgcgatcatccagagcgctagttccgactccctcctcctcggcgctgtcgatgccgacaacgagatcatcagtcttggtctcgagcaggagatgaagattgtgatgctcgtgcacgatagcgtggtcgctatcgtgcgtgaggatctcattgaccagtacaatgagatcctcattcggaacatccagaaggatcgagggatctcgatccctggatgtccgatcggcatcgacagcgactccgaggcaggagggagtcgggactacagctgtggaaagatgaagaagcagcacccttccatagcgtgtatagacgacgacgagtatacacgctatgtgaagggtgtgcttcttgatgccgagttcgagtacaagaagttggccgctatggataaggagcaccccgaccactccaagtataaggatgacaagtttatcgcggtctgcaaagacctcgataatgtcaaacgtatacttggagctggcgggggctccggcaagcgcaccgctgacggctccggggggggctctccgaagaagaagcggaaggtgcccgctgcgaagcgggtaaagcttgattcggagagcgccaccccggagtccgtcagcggttggcgcttgttcaagaagatttcttgactagcaccagcctcaagaacacccgaatggagtctctaagctacataataccaacttacactttacaaaatgttgtcccccaaaatgtagccattcgtatctgctcctaataaaaagaaagtttcttcacattctctcgagaaaaaaaaaaaatggaaaaaaaaaaaacggaaaaaaaaaaaaggtaaaaaaaaaaaatataaaaaaaaaaaacataaaaaaaaaaaacgaaaaaaaaaaaacgtaaaaaaaaaaaactcaaaaaaaaaaaagataaaaaaaaaaaacctaaaaaaaaaaaatgtaaaaaaaaaaaagggaaaaaaaaaaaacgcaaaaaaaaaaaacacaaaaaaaaaaaatgcaaaaaaaaaaaatcgaaaaaaaaaaaatctaaaaaaaaaaaacgaaaaaaaaaaaacccaaaaaaaaaaaagacaaaaaaaaaaaatagaaaaaaaaaaagttaaaaaaaaaaaactgaaaaaaaaaaaatttaaaaaaaaaaaatctag

SEQ ID NO: 2521 - DNA, 7618 bp, synthetic construct
  misc_feature 1..7618: note = Synthetic
  source 1..7618: mol_type = other DNA
aggtgttcaaccagagtgaaaccactaacgggtcagagccccaagctcagaataaacgctcaactttggccggatctgccaccatgaagcggccggctgcgaccaagaaggctggtcaggctaagaagaagaaggacaagaagtactccatcggcctcgacatcgggacgaactccgtgggttgggcggtgatcaccgatgagtacaaggtcccgtccaagaaattcaaggtgctgggtaacaccgatcgacatagtatcaagaagaacctgatcggggccctcttgttcgacagcggcgagactgctgaggcgacgcgcttgaagaggacggcccggcgtcgatacacccgacgcaagaatcggatttgctatctccaggagatcttctccaacgagatggcaaaggtggacgactcgttcttccaccgcctcgaggagagctttctcgtcgaggaggacaagaagcacgagcgccaccccatattcgggaatatcgtggatgaggtcgcctatcacgagaagtaccccacgatttatcatttgcgcaagaagctggtagattcaaccgacaaggcggacttgcggttgatctacctagctcttgcgcatatgataaagtttcgggggcacttcttgattgaaggcgacctcaatcccgataactcggatgtggacaagctcttcatacagctggtgcagacctacaaccagctgtttgaagagaatccgattaatgcgtcgggtgtcgacgccaaggccatcctcagcgcgcgcctcagcaagtctcgccgccttgagaatctgattgcccagctcccgggcgagaagaagaacgggttgttcggtaaccttattgcgctgtcgcttggcctcactccgaacttcaagtcgaacttcgacttggcggaggacgccaagctgcagctcagtaaggatacctacgacgacgacctggacaatcttctcgcccagatcggcgaccagtacgccgatctcttcctggcggcgaagaatctgagcgatgcaattctcctgagtgacattctgagggtgaatactgaaattacgaaggctccgctgtctgccagcatgatcaagcggtacgatgagcatcaccaggacctgacgctcctcaaggctctcgtccgtcagcagctcccggagaagtacaaggagatcttcttcgaccagtcgaagaacggatacgccgggtacatcgacgggggcgcttcccaggaggagttttataagtttataaagcccatcctggagaagatggacgggaccgaggagctcctggtgaagctcaaccgcgaggatctgctgcgcaagcagcggaccttcgataatggcagtattccccatcagattcacttaggagagttgcacgcgattcttcgccgccaggaagacttctaccccttcctcaaagataacagggagaagatcgagaagatcctcaccttccgcatcccgtattacgtgggtcccctggcgcgggggaactcacgttttgcgtggatgacgcggaagagtgaggagacgatcactccctggaactttgaggaagtggtagacaagggtgcttcggcacagtccttcatcgagcggatgacaaattttgacaagaatttgccgaacgagaaggtcttgccgaagcactcgctgctttacgagtactttacggtttacaacgagttgacgaaggtcaagtacgtcactgagggaatgcggaagcccgcattcctcagtggcgaacagaagaaggccatcgtcgacttgttgttcaagacgaaccgtaaagtaaccgtgaagcagctgaaggaggactacttcaagaagatcgagtgcttcgactccgttgagatcagcggagtcgaagaccgatttaatgcctccctcggtacgtatcatgatctcctcaagattatcaaggataaggacttccttgataatgaggagaatgaggatattctcgaggacattgtgctgaccctcaccctgttcgaagaccgtgagatgattgaggaacggttgaagacctacgctcatctgtttgatgacaaggtcatgaagcagttgaagcgtaggcgttataccggctggggtcgtctttcccgaaagcttatcaacgggatccgtgataagcagtcgggaaagacgatcctagacttcctcaagtctgacggttttgcgaacaggaacttcatgcagctcatccacgacgactccttgaccttcaaggaggatatccagaaggcgcaggtgagcggccagggcgatagcttgcacgagcatatcgcgaacctggccggctcacctgcgatcaagaagggtatcctccagacggtcaaggtcgtggatgagctcgtgaaggtgatgggtcggcacaagcccgagaatatcgtcatcgagatggctcgcgagaatcagacgacccagaagggtcagaagaattctcgcgagcgcatgaagcgtatcgaggagggcattaaggagctgggcagtcagattctcaaggagcaccctgtcgagaacacgcagcttcagaacgagaagctgtatctttactacctccagaacggacgggacatgtacgtagatcaggagctggacatcaaccggctctctgactacgatgtcgatgctatcgtccctcagagctttctgaaggacgatagcatcgacaacaaggtcctgactcgctccgataagaatcggggcaagtcggacaatgtcccgtccgaggaggtagtgaagaagatgaagaactattggcgtcagctgttgaacgcgaagctgatcactcagagaaagttcgataatctcaccaaggccgagagggggggtctgagcgagcttgataaggcgggtttcatcaagcggcagcttgttgagacccgccagatcacgaagcacgtcgctcagatcctcgactctcggatgaacaccaagtacgacgagaatgacaagcttattcgggaggtcaaggtcattacccttaagtcgaagctcgtcagcgactttcgcaaggattttcagttttataaagttcgtgagataaacaattatcaccatgcccacgacgcgtacctgaacgccgtcgtgggcacggcgctgataaagaagtacccgaagctggagtccgagttcgtttatggcgattataaggtgtacgacgtgcgcaagatgatcgccaagagcgagcaggagatcggaaaggctacggcgaagtacttcttttacagcaacatcatgaacttttttaagactgagatcacccttgcgaatggcgagatccgcaagcgcccgttgatcgagacgaacggggagactggggagattgtgtgggataagggtcgggatttcgctacggtgagaaaggttctttcgatgccccaggtcaacatcgtcaagaagacggaggttcagaccgggggcttctcgaaagaatctatcttaccgaagcgaaattccgacaagcttatcgcacgcaagaaggactgggaccccaagaagtacggggggttcgacagtcctacggtggcctactccgtgttggtggtcgccaaggttgagaagggcaagagcaagaagctcaagtccgtcaaggagctcttggggatcaccatcatggagaggtcatcgtttgagaagaatcctattgacttccttgaagccaagggctacaaggaagtcaagaaggatttgatcatcaagctccccaagtactccctgttcgagctcgagaacgggcgcaagcggatgctcgccagcgctggcgagcttcagaagggtaatgagcttgccctcccgagtaagtatgtcaatttcttgtacttggcgtcgcactacgagaagctgaagggctcgccggaggacaacgagcagaagcagcttttcgtagagcagcacaagcactaccttgatgagattatcgagcagatctctgagttcagcaagcgcgttatactagctgacgccaatctcgacaaggtgctctcggcttataacaagcaccgggataagccgatacgtgagcaggcggagaacatcatccacctgttcacgttgacgaacttgggggccccggcagcgttcaagtattttgatactacgatcgatcggaagcgttacaccagcaccaaggaggtcttggacgcgaccttgattcatcagtcgatcacgggtctctacgagacccggatcgacctgtcgcagctcgggggcgacggcgcccccgagtctgcgacagagtcgggcgggacttccaccgagagtgaaggatcggccggccccaagaagaagcgcaaagtcacgtcgacggagtcggaggggtctgcggggtccgcggggagcacgtccggctcctcctcgggcatgaagatcgctgttgtcgataaggcgttgaacaatacgcgttacgacaagcattttcagctgtacggggaggaggtggacgtgttccatatgtgcaatgagaagctgagcggtcggcttctcaagaagcacataaccatcgggaccccggagaaccccttcgacccgaacgactatgactttgtgattcttgttggggccgagccgttcctttactttgcggggaagaaggggatcggggactataccggtaagcgtgtcgagtacaatggatacgctaactggatagcctcgatctcccccgcccagcttcatttcaagcctgagatgaagccggtcttcgacgcgaccgttgagaatatccacgatattatcaacggtcgcgagaagatcgcgaaggccggtgattaccgcccaatcacggatcccgacgaggccgaggagtacatcaagatggtgtacaacatggtgattgggcccgtggcgttcgcctccgctacgtcggcattgtattgtcgagacggctacctccttggggtgtcgatcagccaccaggagtaccaaggagtgtatatcgattcagattgtctgacggaggtggctgtctattatctgcagaagatattagacagcgagaaccacaccatcgtcttccacaatctgaagttcgatatgcacttctacaagtaccacctggggctgacgttcgacaaggcccacaaggagcgccgtctccacgatacaatgctccagcactacgtgctggacgagcggaggggaacccacgggctcaagagcctcgccatgaagtacaccgatatgggcgattacgatttcgaacttgataagttcaaggacgactattgtaaggcccataagatcaagaaggaggacttcacctacgacttgatcccttttgacatcatgtggccgtacgcagctaaggacaccgatgcgacgatcaggctgcacaacttctttcttccgaagatcgagaagaacgagaagttgtgcagcctgtattacgacgtgttgatgcctggctgcgtgttcctgcagcgcgttgaggaccgcggcgtgcccatcagcatcgatcgactgaaggaggcgcagtatcagctcacacataatctgaacaaggcacgggagaagctttacacttacccggaggttaagcagctcgagcaggaccagaacgaggcgtttaaccccaatagtgtgaagcagctccgcgtgctcttgttcgattatgtggggctgacgccgactggtaagcttacggatacaggagcggatagcacggatgctgaggcgctgaacgagttagcgactcagcatccgattgctaagacgctcctggagatccgtaagcttaccaagttgatctccacttatgtggagaagatccttctgtcgatcgatgctgatgggtgcatccggacggggtttcatgagcacatgaccacgtccgggcgcctcagcagtagtgggaagctgaaccttcagcagctcccacgcgatgagtcgataatcaaggggtgcgtggtcgcaccccctggttatcgagtcatcgcgtgggatctcactactgctgaggtgtactacgccgcggtcctcagcggcgacaggaacatgcagcaggtgttcatcaacatgcgtaatgagccggataagtatccggacttccacagcaacatcgcgcatatggtgttcaagctgcagtgcgagccacgtgatgtcaagaagctgtttccagcgcttcggcaggcggcgaaggccattacgttcggtatactctatggcagtgggccagcgaaggtggcccactccgtcaacgaggcactcctcgagcaggccgccaagactggcgagccgttcgtggagtgcaccgttgcggatgccaaggagtatatcgaaacgtactttggccagttcccgcagctgaagcgctggatagataaatgccatgatcagatcaagaatcatggctttatctacagccattttggtcgcaaacggcggcttcataatatccatagcgaggatcgcggagtccagggcgaagagattcgctctggattcaacgcgatcatccagagcgctagttccgactccctcctcctcggcgctgtcgatgccgacaacgagatcatcagtcttggtctcgagcaggagatgaagattgtgatgctcgtgcacgatagcgtggtcgctatcgtgcgtgaggatctcattgaccagtacaatgagatcctcattcggaacatccagaaggatcgagggatctcgatccctggatgtccgatcggcatcgacagcgactccgaggcaggagggagtcgggactacagctgtggaaagatgaagaagcagcacccttccatagcgtgtatagacgacgacgagtatacacgctatgtgaagggtgtgcttcttgatgccgagttcgagtacaagaagttggccgctatggataaggagcaccccgaccactccaagtataaggatgacaagtttatcgcggtctgcaaagacctcgataatgtcaaacgtatacttggagctggcgggggctccggcaagcgcaccgctgacggctccggggggggctctccgaagaagaagcggaaggtgcccgctgcgaagcgggtaaagcttgattcggagagcgccaccccggagtccgtcagcggttggcgcttgttcaagaagatttcttgactagcaccagcctcaagaacacccgaatggagtctctaagctacataataccaacttacactttacaaaatgttgtcccccaaaatgtagccattcgtatctgctcctaataaaaagaaagtttcttcacattctctcgagaaaaaaaaaaaatggaaaaaaaaaaaacggaaaaaaaaaaaaggtaaaaaaaaaaaatataaaaaaaaaaaacataaaaaaaaaaaacgaaaaaaaaaaaacgtaaaaaaaaaaaactcaaaaaaaaaaaagataaaaaaaaaaaacctaaaaaaaaaaaatgtaaaaaaaaaaaagggaaaaaaaaaaaacgcaaaaaaaaaaaacacaaaaaaaaaaaatgcaaaaaaaaaaaatcgaaaaaaaaaaaatctaaaaaaaaaaaacgaaaaaaaaaaaacccaaaaaaaaaaaagacaaaaaaaaaaaatagaaaaaaaaaaagttaaaaaaaaaaaactgaaaaaaaaaaaatttaaaaaaaaaaaatctag

SEQ ID NO: 2522 - DNA, 7579 bp, synthetic construct
  misc_feature 1..7579: note = Synthetic
  source 1..7579: mol_type = other DNA
aggaagctcagaataaacgctcaactttggccggatctgccaccatgaagcggcccgccgccaccaagaaggccggccaggccaagaagaagaaggacaagaagtactccatcggcctggacatcggcaccaactccgtgggctgggccgtgatcaccgacgagtacaaggtgccctccaagaagttcaaggtgctgggcaacaccgaccggcactccatcaagaagaacctgatcggcgccctgctgttcgactccggcgagaccgccgaggccacccggctgaagcggaccgcccggcggcggtacacccggcggaagaaccggatctgctacctgcaggagatcttctccaacgagatggccaaggtggacgactccttcttccaccggctggaggagtccttcctggtggaggaggacaagaagcacgagcggcaccccatcttcggcaacatcgtggacgaggtggcctaccacgagaagtaccccaccatctaccacctgcggaagaagctggtggactccaccgacaaggccgacctgcggctgatctacctggccctggcccacatgatcaagttccggggccacttcctgatcgagggcgacctgaaccccgacaactccgacgtggacaagctgttcatccagctggtgcagacctacaaccagctgttcgaggagaaccccatcaacgcctccggcgtggacgccaaggccatcctgtccgcccggctgtccaagtcccggcggctggagaacctgatcgcccagctgcccggcgagaagaagaacggcctgttcggcaacctgatcgccctgtccctgggcctgacccccaacttcaagtccaacttcgacctggccgaggacgccaagctgcagctgtccaaggacacctacgacgacgacctggacaacctgctggcccagatcggcgaccagtacgccgacctgttcctggccgccaagaacctgtccgacgccatcctgctgtccgacatcctgcgggtgaacaccgagatcaccaaggcccccctgtccgcctccatgatcaagcggtacgacgagcaccaccaggacctgaccctgctgaaggccctggtgcggcagcagctgcccgagaagtacaaggagatcttcttcgaccagtccaagaacggctacgccggctacatcgacggcggcgcctcccaggaggagttctacaagttcatcaagcccatcctggagaagatggacggcaccgaggagctgctggtgaagctgaaccgggaggacctgctgcggaagcagcggaccttcgacaacggctccatcccccaccagatccacctgggcgagctgcacgccatcctgcggcggcaggaggacttctaccccttcctgaaggacaaccgggagaagatcgagaagatcctgaccttccggatcccctactacgtgggccccctggcccggggcaactcccggttcgcctggatgacccggaagtccgaggagaccatcaccccctggaacttcgaggaggtggtggacaagggcgcctccgcccagtccttcatcgagcggatgaccaacttcgacaagaacctgcccaacgagaaggtgctgcccaagcactccctgctgtacgagtacttcaccgtgtacaacgagctgaccaaggtgaagtacgtgaccgagggcatgcggaagcccgccttcctgtccggcgagcagaagaaggccatcgtggacctgctgttcaagaccaaccggaaggtgaccgtgaagcagctgaaggaggactacttcaagaagatcgagtgcttcgactccgtggagatctccggcgtggaggaccggttcaacgcctccctgggcacctaccacgacctgctgaagatcatcaaggacaaggacttcctggacaacgaggagaacgaggacatcctggaggacatcgtgctgaccctgaccctgttcgaggaccgggagatgatcgaggagcggctgaagacctacgcccacctgttcgacgacaaggtgatgaagcagctgaagcggcggcggtacaccggctggggccggctgtcccggaagctgatcaacggcatccgggacaagcagtccggcaagaccatcctggacttcctgaagtccgacggcttcgccaaccggaacttcatgcagctgatccacgacgactccctgaccttcaaggaggacatccagaaggcccaggtgtccggccagggcgactccctgcacgagcacatcgccaacctggccggctcccccgccatcaagaagggcatcctgcagaccgtgaaggtggtggacgagctggtgaaggtgatgggccggcacaagcccgagaacatcgtgatcgagatggcccgggagaaccagaccacccagaagggccagaagaactcccgggagcggatgaagcggatcgaggagggcatcaaggagctgggctcccagatcctgaaggagcaccccgtggagaacacccagctgcagaacgagaagctgtacctgtactacctgcagaacggccgggacatgtacgtggaccaggagctggacatcaaccggctgtccgactacgacgtggactccatcgtgccccagtccttcctgaaggacgactccatcgacaacaaggtgctgacccggtccgacaagaaccggggcaagtccgacaacgtgccctccgaggaggtggtgaagaagatgaagaactactggcggcagctgctgaacgccaagctgatcacccagcggaagttcgacaacctgaccaaggccgagcggggcggcctgtccgagctggacaaggccggcttcatcaagcggcagctggtggagacccggcagatcaccaagcacgtggcccagatcctggactcccggatgaacaccaagtacgacgagaacgacaagctgatccgggaggtgaaggtgatcaccctgaagtccaagctggtgtccgacttccggaaggacttccagttctacaaggtgcgggagatcaacaactaccaccacgcccacgacgcctacctgaacgccgtggtgggcaccgccctgatcaagaagtaccccaagctggagtccgagttcgtgtacggcgactacaaggtgtacgacgtgcggaagatgatcgccaagtccgagcaggagatcggcaaggccaccgccaagtacttcttctactccaacatcatgaacttcttcaagaccgagatcaccctggccaacggcgagatccggaagcggcccctgatcgagaccaacggcgagaccggcgagatcgtgtgggacaagggccgggacttcgccaccgtgcggaaggtgctgtccatgccccaggtgaacatcgtgaagaagaccgaggtgcagaccggcggcttctccaaggagtccatcctgcccaagcggaactccgacaagctgatcgcccggaagaaggactgggaccccaagaagtacggcggcttcgactcccccaccgtggcctactccgtgctggtggtggccaaggtggagaagggcaagtccaagaagctgaagtccgtgaaggagctgctgggcatcaccatcatggagcggtcctccttcgagaagaaccccatcgacttcctggaggccaagggctacaaggaggtgaagaaggacctgatcatcaagctgcccaagtactccctgttcgagctggagaacggccggaagcggatgctggcctccgccggcgagctgcagaagggcaacgagctggccctgccctccaagtacgtgaacttcctgtacctggcctcccactacgagaagctgaagggctcccccgaggacaacgagcagaagcagctgttcgtggagcagcacaagcactacctggacgagatcatcgagcagatctccgagttctccaagcgggtgatcctggccgacgccaacctggacaaggtgctgtccgcctacaacaagcaccgggacaagcccatccgggagcaggccgagaacatcatccacctgttcaccctgaccaacctgggcgcccccgccgccttcaagtacttcgacaccaccatcgaccggaagcggtacacctccaccaaggaggtgctggacgccaccctgatccaccagtccatcaccggcctgtacgagacccggatcgacctgtcccagctgggcggcgacggcgcccccgagtccgccaccgagtccggcggcacctccaccgagtccgagggctccgccggccccaagaagaagcggaaggtgacctccaccgagtccgagggctccgccggctccgccggctccacctccggctcctcctccggcatgaagatcgccgtggtggacaaggccctgaacaacacccggtacgacaagcacttccagctgtacggcgaggaggtggacgtgttccacatgtgcaacgagaagctgtccggccggctgctgaagaagcacatcaccatcggcacccccgagaaccccttcgaccccaacgactacgacttcgtgatcctggtgggcgccgagcccttcctgtacttcgccggcaagaagggcatcggcgactacaccggcaagcgggtggagtacaacggctacgccaactggatcgcctccatctcccccgcccagctgcacttcaagcccgagatgaagcccgtgttcgacgccaccgtggagaacatccacgacatcatcaacggccgggagaagatcgccaaggccggcgactaccggcccatcaccgaccccgacgaggccgaggagtacatcaagatggtgtacaacatggtgatcggccccgtggccttcgcctccgccacctccgccctgtactgccgggacggctacctgctgggcgtgtccatctcccaccaggagtaccagggcgtgtacatcgactccgactgcctgaccgaggtggccgtgtactacctgcagaagatcctggactccgagaaccacaccatcgtgttccacaacctgaagttcgacatgcacttctacaagtaccacctgggcctgaccttcgacaaggcccacaaggagcggcggctgcacgacaccatgctgcagcactacgtgctggacgagcggcggggcacccacggcctgaagtccctggccatgaagtacaccgacatgggcgactacgacttcgagctggacaagttcaaggacgactactgcaaggcccacaagatcaagaaggaggacttcacctacgacctgatccccttcgacatcatgtggccctacgccgccaaggacaccgacgccaccatccggctgcacaacttcttcctgcccaagatcgagaagaacgagaagctgtgctccctgtactacgacgtgctgatgcccggctgcgtgttcctgcagcgggtggaggaccggggcgtgcccatctccatcgaccggctgaaggaggcccagtaccagctgacccacaacctgaacaaggcccgggagaagctgtacacctaccccgaggtgaagcagctggagcaggaccagaacgaggccttcaaccccaactccgtgaagcagctgcgggtgctgctgttcgactacgtgggcctgacccccaccggcaagctgaccgacaccggcgccgactccaccgacgccgaggccctgaacgagctggccacccagcaccccatcgccaagaccctgctggagatccggaagctgaccaagctgatctccacctacgtggagaagatcctgctgtccatcgacgccgacggctgcatccggaccggcttccacgagcacatgaccacctccggccggctgtcctcctccggcaagctgaacctgcagcagctgccccgggacgagtccatcatcaagggctgcgtggtggccccccccggctaccgggtgatcgcctgggacctgaccaccgccgaggtgtactacgccgccgtgctgtccggcgaccggaacatgcagcaggtgttcatcaacatgcggaacgagcccgacaagtaccccgacttccactccaacatcgcccacatggtgttcaagctgcagtgcgagccccgggacgtgaagaagctgttccccgccctgcggcaggccgccaaggccatcaccttcggcatcctgtacggctccggccccgccaaggtggcccactccgtgaacgaggccctgctggagcaggccgccaagaccggcgagcccttcgtggagtgcaccgtggccgacgccaaggagtacatcgagacctacttcggccagttcccccagctgaagcggtggatcgacaagtgccacgaccagatcaagaaccacggcttcatctactcccacttcggccggaagcggcggctgcacaacatccactccgaggaccggggcgtgcagggcgaggagatccggtccggcttcaacgccatcatccagtccgcctcctccgactccctgctgctgggcgccgtggacgccgacaacgagatcatctccctgggcctggagcaggagatgaagatcgtgatgctggtgcacgactccgtggtggccatcgtgcgggaggacctgatcgaccagtacaacgagatcctgatccggaacatccagaaggaccggggcatctccatccccggctgccccatcggcatcgactccgactccgaggccggcggctcccgggactactcctgcggcaagatgaagaagcagcacccctccatcgcctgcatcgacgacgacgagtacacccggtacgtgaagggcgtgctgctggacgccgagttcgagtacaagaagctggccgccatggacaaggagcaccccgaccactccaagtacaaggacgacaagttcatcgccgtgtgcaaggacctggacaacgtgaagcggatcctgggcgccggcggcggctccggcaagcggaccgccgacggctccggcggcggctcccccaagaagaagcggaaggtgcctgccgctaagagagtgaagctggactccgagtccgccacccccgagtccgtgtccggctggcggctgttcaagaagatctcctagctagcaccagcctcaagaacacccgaatggagtctctaagctacataataccaacttacactttacaaaatgttgtcccccaaaatgtagccattcgtatctgctcctaataaaaagaaagtttcttcacattctctcgagaaaaaaaaaaaatggaaaaaaaaaaaacggaaaaaaaaaaaaggtaaaaaaaaaaaatataaaaaaaaaaaacataaaaaaaaaaaacgaaaaaaaaaaaacgtaaaaaaaaaaaactcaaaaaaaaaaaagataaaaaaaaaaaacctaaaaaaaaaaaatgtaaaaaaaaaaaagggaaaaaaaaaaaacgcaaaaaaaaaaaacacaaaaaaaaaaaatgcaaaaaaaaaaaatcgaaaaaaaaaaaatctaaaaaaaaaaaacgaaaaaaaaaaaacccaaaaaaaaaaaagacaaaaaaaaaaaatagaaaaaaaaaaagttaaaaaaaaaaaactgaaaaaaaaaaaatttaaaaaaaaaaaatctag

SEQ ID NO: 2523 - DNA, 7669 bp, synthetic construct
  misc_feature 1..7669: note = Synthetic
  source 1..7669: mol_type = other DNA
aggactcactatttgttttcgcgcccagttgcaaaaagtgtcgaaaaaaaaaaaaccaaaaaaaaaaaacaaaaaaaaaaaataattgactaaaagctcagaataaacgctcaactttggccggatctgccaccatgaagcggcccgccgccaccaagaaggccggccaggccaagaagaagaaggacaagaagtactccatcggcctggacatcggcaccaactccgtgggctgggccgtgatcaccgacgagtacaaggtgccctccaagaagttcaaggtgctgggcaacaccgaccggcactccatcaagaagaacctgatcggcgccctgctgttcgactccggcgagaccgccgaggccacccggctgaagcggaccgcccggcggcggtacacccggcggaagaaccggatctgctacctgcaggagatcttctccaacgagatggccaaggtggacgactccttcttccaccggctggaggagtccttcctggtggaggaggacaagaagcacgagcggcaccccatcttcggcaacatcgtggacgaggtggcctaccacgagaagtaccccaccatctaccacctgcggaagaagctggtggactccaccgacaaggccgacctgcggctgatctacctggccctggcccacatgatcaagttccggggccacttcctgatcgagggcgacctgaaccccgacaactccgacgtggacaagctgttcatccagctggtgcagacctacaaccagctgttcgaggagaaccccatcaacgcctccggcgtggacgccaaggccatcctgtccgcccggctgtccaagtcccggcggctggagaacctgatcgcccagctgcccggcgagaagaagaacggcctgttcggcaacctgatcgccctgtccctgggcctgacccccaacttcaagtccaacttcgacctggccgaggacgccaagctgcagctgtccaaggacacctacgacgacgacctggacaacctgctggcccagatcggcgaccagtacgccgacctgttcctggccgccaagaacctgtccgacgccatcctgctgtccgacatcctgcgggtgaacaccgagatcaccaaggcccccctgtccgcctccatgatcaagcggtacgacgagcaccaccaggacctgaccctgctgaaggccctggtgcggcagcagctgcccgagaagtacaaggagatcttcttcgaccagtccaagaacggctacgccggctacatcgacggcggcgcctcccaggaggagttctacaagttcatcaagcccatcctggagaagatggacggcaccgaggagctgctggtgaagctgaaccgggaggacctgctgcggaagcagcggaccttcgacaacggctccatcccccaccagatccacctgggcgagctgcacgccatcctgcggcggcaggaggacttctaccccttcctgaaggacaaccgggagaagatcgagaagatcctgaccttccggatcccctactacgtgggccccctggcccggggcaactcccggttcgcctggatgacccggaagtccgaggagaccatcaccccctggaacttcgaggaggtggtggacaagggcgcctccgcccagtccttcatcgagcggatgaccaacttcgacaagaacctgcccaacgagaaggtgctgcccaagcactccctgctgtacgagtacttcaccgtgtacaacgagctgaccaaggtgaagtacgtgaccgagggcatgcggaagcccgccttcctgtccggcgagcagaagaaggccatcgtggacctgctgttcaagaccaaccggaaggtgaccgtgaagcagctgaaggaggactacttcaagaagatcgagtgcttcgactccgtggagatctccggcgtggaggaccggttcaacgcctccctgggcacctaccacgacctgctgaagatcatcaaggacaaggacttcctggacaacgaggagaacgaggacatcctggaggacatcgtgctgaccctgaccctgttcgaggaccgggagatgatcgaggagcggctgaagacctacgcccacctgttcgacgacaaggtgatgaagcagctgaagcggcggcggtacaccggctggggccggctgtcccggaagctgatcaacggcatccgggacaagcagtccggcaagaccatcctggacttcctgaagtccgacggcttcgccaaccggaacttcatgcagctgatccacgacgactccctgaccttcaaggaggacatccagaaggcccaggtgtccggccagggcgactccctgcacgagcacatcgccaacctggccggctcccccgccatcaagaagggcatcctgcagaccgtgaaggtggtggacgagctggtgaaggtgatgggccggcacaagcccgagaacatcgtgatcgagatggcccgggagaaccagaccacccagaagggccagaagaactcccgggagcggatgaagcggatcgaggagggcatcaaggagctgggctcccagatcctgaaggagcaccccgtggagaacacccagctgcagaacgagaagctgtacctgtactacctgcagaacggccgggacatgtacgtggaccaggagctggacatcaaccggctgtccgactacgacgtggactccatcgtgccccagtccttcctgaaggacgactccatcgacaacaaggtgctgacccggtccgacaagaaccggggcaagtccgacaacgtgccctccgaggaggtggtgaagaagatgaagaactactggcggcagctgctgaacgccaagctgatcacccagcggaagttcgacaacctgaccaaggccgagcggggcggcctgtccgagctggacaaggccggcttcatcaagcggcagctggtggagacccggcagatcaccaagcacgtggcccagatcctggactcccggatgaacaccaagtacgacgagaacgacaagctgatccgggaggtgaaggtgatcaccctgaagtccaagctggtgtccgacttccggaaggacttccagttctacaaggtgcgggagatcaacaactaccaccacgcccacgacgcctacctgaacgccgtggtgggcaccgccctgatcaagaagtaccccaagctggagtccgagttcgtgtacggcgactacaaggtgtacgacgtgcggaagatgatcgccaagtccgagcaggagatcggcaaggccaccgccaagtacttcttctactccaacatcatgaacttcttcaagaccgagatcaccctggccaacggcgagatccggaagcggcccctgatcgagaccaacggcgagaccggcgagatcgtgtgggacaagggccgggacttcgccaccgtgcggaaggtgctgtccatgccccaggtgaacatcgtgaagaagaccgaggtgcagaccggcggcttctccaaggagtccatcctgcccaagcggaactccgacaagctgatcgcccggaagaaggactgggaccccaagaagtacggcggcttcgactcccccaccgtggcctactccgtgctggtggtggccaaggtggagaagggcaagtccaagaagctgaagtccgtgaaggagctgctgggcatcaccatcatggagcggtcctccttcgagaagaaccccatcgacttcctggaggccaagggctacaaggaggtgaagaaggacctgatcatcaagctgcccaagtactccctgttcgagctggagaacggccggaagcggatgctggcctccgccggcgagctgcagaagggcaacgagctggccctgccctccaagtacgtgaacttcctgtacctggcctcccactacgagaagctgaagggctcccccgaggacaacgagcagaagcagctgttcgtggagcagcacaagcactacctggacgagatcatcgagcagatctccgagttctccaagcgggtgatcctggccgacgccaacctggacaaggtgctgtccgcctacaacaagcaccgggacaagcccatccgggagcaggccgagaacatcatccacctgttcaccctgaccaacctgggcgcccccgccgccttcaagtacttcgacaccaccatcgaccggaagcggtacacctccaccaaggaggtgctggacgccaccctgatccaccagtccatcaccggcctgtacgagacccggatcgacctgtcccagctgggcggcgacggcgcccccgagtccgccaccgagtccggcggcacctccaccgagtccgagggctccgccggccccaagaagaagcggaaggtgacctccaccgagtccgagggctccgccggctccgccggctccacctccggctcctcctccggcatgaagatcgccgtggtggacaaggccctgaacaacacccggtacgacaagcacttccagctgtacggcgaggaggtggacgtgttccacatgtgcaacgagaagctgtccggccggctgctgaagaagcacatcaccatcggcacccccgagaaccccttcgaccccaacgactacgacttcgtgatcctggtgggcgccgagcccttcctgtacttcgccggcaagaagggcatcggcgactacaccggcaagcgggtggagtacaacggctacgccaactggatcgcctccatctcccccgcccagctgcacttcaagcccgagatgaagcccgtgttcgacgccaccgtggagaacatccacgacatcatcaacggccgggagaagatcgccaaggccggcgactaccggcccatcaccgaccccgacgaggccgaggagtacatcaagatggtgtacaacatggtgatcggccccgtggccttcgcctccgccacctccgccctgtactgccgggacggctacctgctgggcgtgtccatctcccaccaggagtaccagggcgtgtacatcgactccgactgcctgaccgaggtggccgtgtactacctgcagaagatcctggactccgagaaccacaccatcgtgttccacaacctgaagttcgacatgcacttctacaagtaccacctgggcctgaccttcgacaaggcccacaaggagcggcggctgcacgacaccatgctgcagcactacgtgctggacgagcggcggggcacccacggcctgaagtccctggccatgaagtacaccgacatgggcgactacgacttcgagctggacaagttcaaggacgactactgcaaggcccacaagatcaagaaggaggacttcacctacgacctgatccccttcgacatcatgtggccctacgccgccaaggacaccgacgccaccatccggctgcacaacttcttcctgcccaagatcgagaagaacgagaagctgtgctccctgtactacgacgtgctgatgcccggctgcgtgttcctgcagcgggtggaggaccggggcgtgcccatctccatcgaccggctgaaggaggcccagtaccagctgacccacaacctgaacaaggcccgggagaagctgtacacctaccccgaggtgaagcagctggagcaggaccagaacgaggccttcaaccccaactccgtgaagcagctgcgggtgctgctgttcgactacgtgggcctgacccccaccggcaagctgaccgacaccggcgccgactccaccgacgccgaggccctgaacgagctggccacccagcaccccatcgccaagaccctgctggagatccggaagctgaccaagctgatctccacctacgtggagaagatcctgctgtccatcgacgccgacggctgcatccggaccggcttccacgagcacatgaccacctccggccggctgtcctcctccggcaagctgaacctgcagcagctgccccgggacgagtccatcatcaagggctgcgtggtggccccccccggctaccgggtgatcgcctgggacctgaccaccgccgaggtgtactacgccgccgtgctgtccggcgaccggaacatgcagcaggtgttcatcaacatgcggaacgagcccgacaagtaccccgacttccactccaacatcgcccacatggtgttcaagctgcagtgcgagccccgggacgtgaagaagctgttccccgccctgcggcaggccgccaaggccatcaccttcggcatcctgtacggctccggccccgccaaggtggcccactccgtgaacgaggccctgctggagcaggccgccaagaccggcgagcccttcgtggagtgcaccgtggccgacgccaaggagtacatcgagacctacttcggccagttcccccagctgaagcggtggatcgacaagtgccacgaccagatcaagaaccacggcttcatctactcccacttcggccggaagcggcggctgcacaacatccactccgaggaccggggcgtgcagggcgaggagatccggtccggcttcaacgccatcatccagtccgcctcctccgactccctgctgctgggcgccgtggacgccgacaacgagatcatctccctgggcctggagcaggagatgaagatcgtgatgctggtgcacgactccgtggtggccatcgtgcgggaggacctgatcgaccagtacaacgagatcctgatccggaacatccagaaggaccggggcatctccatccccggctgccccatcggcatcgactccgactccgaggccggcggctcccgggactactcctgcggcaagatgaagaagcagcacccctccatcgcctgcatcgacgacgacgagtacacccggtacgtgaagggcgtgctgctggacgccgagttcgagtacaagaagctggccgccatggacaaggagcaccccgaccactccaagtacaaggacgacaagttcatcgccgtgtgcaaggacctggacaacgtgaagcggatcctgggcgccggcggcggctccggcaagcggaccgccgacggctccggcggcggctcccccaagaagaagcggaaggtgcctgccgctaagagagtgaagctggactccgagtccgccacccccgagtccgtgtccggctggcggctgttcaagaagatctcctagctagcaccagcctcaagaacacccgaatggagtctctaagctacataataccaacttacactttacaaaatgttgtcccccaaaatgtagccattcgtatctgctcctaataaaaagaaagtttcttcacattctctcgagaaaaaaaaaaaatggaaaaaaaaaaaacggaaaaaaaaaaaaggtaaaaaaaaaaaatataaaaaaaaaaaacataaaaaaaaaaaacgaaaaaaaaaaaacgtaaaaaaaaaaaactcaaaaaaaaaaaagataaaaaaaaaaaacctaaaaaaaaaaaatgtaaaaaaaaaaaagggaaaaaaaaaaaacgcaaaaaaaaaaaacacaaaaaaaaaaaatgcaaaaaaaaaaaatcgaaaaaaaaaaaatctaaaaaaaaaaaacgaaaaaaaaaaaacccaaaaaaaaaaaagacaaaaaaaaaaaatagaaaaaaaaaaagttaaaaaaaaaaaactgaaaaaaaaaaaatttaaaaaaaaaaaatctag

SEQ ID NO: 2524 - DNA, 7579 bp, synthetic construct
  misc_feature 1..7579: note = Synthetic
  source 1..7579: mol_type = other DNA
aggaagctcagaataaacgctcaactttggccggatctgccaccatgaagcggccggctgcgaccaagaaggctggtcaggctaagaagaagaaggacaagaagtactccatcggcctcgacatcgggacgaactccgtgggttgggcggtgatcaccgatgagtacaaggtcccgtccaagaaattcaaggtgctgggtaacaccgatcgacatagtatcaagaagaacctgatcggggccctcttgttcgacagcggcgagactgctgaggcgacgcgcttgaagaggacggcccggcgtcgatacacccgacgcaagaatcggatttgctatctccaggagatcttctccaacgagatggcaaaggtggacgactcgttcttccaccgcctcgaggagagctttctcgtcgaggaggacaagaagcacgagcgccaccccatattcgggaatatcgtggatgaggtcgcctatcacgagaagtaccccacgatttatcatttgcgcaagaagctggtagattcaaccgacaaggcggacttgcggttgatctacctagctcttgcgcatatgataaagtttcgggggcacttcttgattgaaggcgacctcaatcccgataactcggatgtggacaagctcttcatacagctggtgcagacctacaaccagctgtttgaagagaatccgattaatgcgtcgggtgtcgacgccaaggccatcctcagcgcgcgcctcagcaagtctcgccgccttgagaatctgattgcccagctcccgggcgagaagaagaacgggttgttcggtaaccttattgcgctgtcgcttggcctcactccgaacttcaagtcgaacttcgacttggcggaggacgccaagctgcagctcagtaaggatacctacgacgacgacctggacaatcttctcgcccagatcggcgaccagtacgccgatctcttcctggcggcgaagaatctgagcgatgcaattctcctgagtgacattctgagggtgaatactgaaattacgaaggctccgctgtctgccagcatgatcaagcggtacgatgagcatcaccaggacctgacgctcctcaaggctctcgtccgtcagcagctcccggagaagtacaaggagatcttcttcgaccagtcgaagaacggatacgccgggtacatcgacgggggcgcttcccaggaggagttttataagtttataaagcccatcctggagaagatggacgggaccgaggagctcctggtgaagctcaaccgcgaggatctgctgcgcaagcagcggaccttcgataatggcagtattccccatcagattcacttaggagagttgcacgcgattcttcgccgccaggaagacttctaccccttcctcaaagataacagggagaagatcgagaagatcctcaccttccgcatcccgtattacgtgggtcccctggcgcgggggaactcacgttttgcgtggatgacgcggaagagtgaggagacgatcactccctggaactttgaggaagtggtagacaagggtgcttcggcacagtccttcatcgagcggatgacaaattttgacaagaatttgccgaacgagaaggtcttgccgaagcactcgctgctttacgagtactttacggtttacaacgagttgacgaaggtcaagtacgtcactgagggaatgcggaagcccgcattcctcagtggcgaacagaagaaggccatcgtcgacttgttgttcaagacgaaccgtaaagtaaccgtgaagcagctgaaggaggactacttcaagaagatcgagtgcttcgactccgttgagatcagcggagtcgaagaccgatttaatgcctccctcggtacgtatcatgatctcctcaagattatcaaggataaggacttccttgataatgaggagaatgaggatattctcgaggacattgtgctgaccctcaccctgttcgaagaccgtgagatgattgaggaacggttgaagacctacgctcatctgtttgatgacaaggtcatgaagcagttgaagcgtaggcgttataccggctggggtcgtctttcccgaaagcttatcaacgggatccgtgataagcagtcgggaaagacgatcctagacttcctcaagtctgacggttttgcgaacaggaacttcatgcagctcatccacgacgactccttgaccttcaaggaggatatccagaaggcgcaggtgagcggccagggcgatagcttgcacgagcatatcgcgaacctggccggctcacctgcgatcaagaagggtatcctccagacggtcaaggtcgtggatgagctcgtgaaggtgatgggtcggcacaagcccgagaatatcgtcatcgagatggctcgcgagaatcagacgacccagaagggtcagaagaattctcgcgagcgcatgaagcgtatcgaggagggcattaaggagctgggcagtcagattctcaaggagcaccctgtcgagaacacgcagcttcagaacgagaagctgtatctttactacctccagaacggacgggacatgtacgtagatcaggagctggacatcaaccggctctctgactacgatgtcgattctatcgtccctcagagctttctgaaggacgatagcatcgacaacaaggtcctgactcgctccgataagaatcggggcaagtcggacaatgtcccgtccgaggaggtagtgaagaagatgaagaactattggcgtcagctgttgaacgcgaagctgatcactcagagaaagttcgataatctcaccaaggccgagagggggggtctgagcgagcttgataaggcgggtttcatcaagcggcagcttgttgagacccgccagatcacgaagcacgtcgctcagatcctcgactctcggatgaacaccaagtacgacgagaatgacaagcttattcgggaggtcaaggtcattacccttaagtcgaagctcgtcagcgactttcgcaaggattttcagttttataaagttcgtgagataaacaattatcaccatgcccacgacgcgtacctgaacgccgtcgtgggcacggcgctgataaagaagtacccgaagctggagtccgagttcgtttatggcgattataaggtgtacgacgtgcgcaagatgatcgccaagagcgagcaggagatcggaaaggctacggcgaagtacttcttttacagcaacatcatgaacttttttaagactgagatcacccttgcgaatggcgagatccgcaagcgcccgttgatcgagacgaacggggagactggggagattgtgtgggataagggtcgggatttcgctacggtgagaaaggttctttcgatgccccaggtcaacatcgtcaagaagacggaggttcagaccgggggcttctcgaaagaatctatcttaccgaagcgaaattccgacaagcttatcgcacgcaagaaggactgggaccccaagaagtacggggggttcgacagtcctacggtggcctactccgtgttggtggtcgccaaggttgagaagggcaagagcaagaagctcaagtccgtcaaggagctcttggggatcaccatcatggagaggtcatcgtttgagaagaatcctattgacttccttgaagccaagggctacaaggaagtcaagaaggatttgatcatcaagctccccaagtactccctgttcgagctcgagaacgggcgcaagcggatgctcgccagcgctggcgagcttcagaagggtaatgagcttgccctcccgagtaagtatgtcaatttcttgtacttggcgtcgcactacgagaagctgaagggctcgccggaggacaacgagcagaagcagcttttcgtagagcagcacaagcactaccttgatgagattatcgagcagatctctgagttcagcaagcgcgttatactagctgacgccaatctcgacaaggtgctctcggcttataacaagcaccgggataagccgatacgtgagcaggcggagaacatcatccacctgttcacgttgacgaacttgggggccccggcagcgttcaagtattttgatactacgatcgatcggaagcgttacaccagcaccaaggaggtcttggacgcgaccttgattcatcagtcgatcacgggtctctacgagacccggatcgacctgtcgcagctcgggggcgacggcgcccccgagtctgcgacagagtcgggcgggacttccaccgagagtgaaggatcggccggccccaagaagaagcgcaaagtcacgtcgacggagtcggaggggtctgcggggtccgcggggagcacgtccggctcctcctcgggcatgaagatcgctgttgtcgataaggcgttgaacaatacgcgttacgacaagcattttcagctgtacggggaggaggtggacgtgttccatatgtgcaatgagaagctgagcggtcggcttctcaagaagcacataaccatcgggaccccggagaaccccttcgacccgaacgactatgactttgtgattcttgttggggccgagccgttcctttactttgcggggaagaaggggatcggggactataccggtaagcgtgtcgagtacaatggatacgctaactggatagcctcgatctcccccgcccagcttcatttcaagcctgagatgaagccggtcttcgacgcgaccgttgagaatatccacgatattatcaacggtcgcgagaagatcgcgaaggccggtgattaccgcccaatcacggatcccgacgaggccgaggagtacatcaagatggtgtacaacatggtgattgggcccgtggcgttcgcctccgctacgtcggcattgtattgtcgagacggctacctccttggggtgtcgatcagccaccaggagtaccaaggagtgtatatcgattcagattgtctgacggaggtggctgtctattatctgcagaagatattagacagcgagaaccacaccatcgtcttccacaatctgaagttcgatatgcacttctacaagtaccacctggggctgacgttcgacaaggcccacaaggagcgccgtctccacgatacaatgctccagcactacgtgctggacgagcggaggggaacccacgggctcaagagcctcgccatgaagtacaccgatatgggcgattacgatttcgaacttgataagttcaaggacgactattgtaaggcccataagatcaagaaggaggacttcacctacgacttgatcccttttgacatcatgtggccgtacgcagctaaggacaccgatgcgacgatcaggctgcacaacttctttcttccgaagatcgagaagaacgagaagttgtgcagcctgtattacgacgtgttgatgcctggctgcgtgttcctgcagcgcgttgaggaccgcggcgtgcccatcagcatcgatcgactgaaggaggcgcagtatcagctcacacataatctgaacaaggcacgggagaagctttacacttacccggaggttaagcagctcgagcaggaccagaacgaggcgtttaaccccaatagtgtgaagcagctccgcgtgctcttgttcgattatgtggggctgacgccgactggtaagcttacggatacaggagcggatagcacggatgctgaggcgctgaacgagttagcgactcagcatccgattgctaagacgctcctggagatccgtaagcttaccaagttgatctccacttatgtggagaagatccttctgtcgatcgatgctgatgggtgcatccggacggggtttcatgagcacatgaccacgtccgggcgcctcagcagtagtgggaagctgaaccttcagcagctcccacgcgatgagtcgataatcaaggggtgcgtggtcgcaccccctggttatcgagtcatcgcgtgggatctcactactgctgaggtgtactacgccgcggtcctcagcggcgacaggaacatgcagcaggtgttcatcaacatgcgtaatgagccggataagtatccggacttccacagcaacatcgcgcatatggtgttcaagctgcagtgcgagccacgtgatgtcaagaagctgtttccagcgcttcggcaggcggcgaaggccattacgttcggtatactctatggcagtgggccagcgaaggtggcccactccgtcaacgaggcactcctcgagcaggccgccaagactggcgagccgttcgtggagtgcaccgttgcggatgccaaggagtatatcgaaacgtactttggccagttcccgcagctgaagcgctggatagataaatgccatgatcagatcaagaatcatggctttatctacagccattttggtcgcaaacggcggcttcataatatccatagcgaggatcgcggagtccagggcgaagagattcgctctggattcaacgcgatcatccagagcgctagttccgactccctcctcctcggcgctgtcgatgccgacaacgagatcatcagtcttggtctcgagcaggagatgaagattgtgatgctcgtgcacgatagcgtggtcgctatcgtgcgtgaggatctcattgaccagtacaatgagatcctcattcggaacatccagaaggatcgagggatctcgatccctggatgtccgatcggcatcgacagcgactccgaggcaggagggagtcgggactacagctgtggaaagatgaagaagcagcacccttccatagcgtgtatagacgacgacgagtatacacgctatgtgaagggtgtgcttcttgatgccgagttcgagtacaagaagttggccgctatggataaggagcaccccgaccactccaagtataaggatgacaagtttatcgcggtctgcaaagacctcgataatgtcaaacgtatacttggagctggcgggggctccggcaagcgcaccgctgacggctccggggggggctctccgaagaagaagcggaaggtgcccgctgcgaagcgggtaaagcttgattcggagagcgccaccccggagtccgtcagcggttggcgcttgttcaagaagatttcttgactagcaccagcctcaagaacacccgaatggagtctctaagctacataataccaacttacactttacaaaatgttgtcccccaaaatgtagccattcgtatctgctcctaataaaaagaaagtttcttcacattctctcgagaaaaaaaaaaaatggaaaaaaaaaaaacggaaaaaaaaaaaaggtaaaaaaaaaaaatataaaaaaaaaaaacataaaaaaaaaaaacgaaaaaaaaaaaacgtaaaaaaaaaaaactcaaaaaaaaaaaagataaaaaaaaaaaacctaaaaaaaaaaaatgtaaaaaaaaaaaagggaaaaaaaaaaaacgcaaaaaaaaaaaacacaaaaaaaaaaaatgcaaaaaaaaaaaatcgaaaaaaaaaaaatctaaaaaaaaaaaacgaaaaaaaaaaaacccaaaaaaaaaaaagacaaaaaaaaaaaatagaaaaaaaaaaagttaaaaaaaaaaaactgaaaaaaaaaaaatttaaaaaaaaaaaatctag

SEQ ID NO: 2525 - DNA, 7669 bp, synthetic construct
  misc_feature 1..7669: note = Synthetic
  source 1..7669: mol_type = other DNA
aggactcactatttgttttcgcgcccagttgcaaaaagtgtcgaaaaaaaaaaaaccaaaaaaaaaaaacaaaaaaaaaaaataattgactaaaagctcagaataaacgctcaactttggccggatctgccaccatgaagcggccggctgcgaccaagaaggctggtcaggctaagaagaagaaggacaagaagtactccatcggcctcgacatcgggacgaactccgtgggttgggcggtgatcaccgatgagtacaaggtcccgtccaagaaattcaaggtgctgggtaacaccgatcgacatagtatcaagaagaacctgatcggggccctcttgttcgacagcggcgagactgctgaggcgacgcgcttgaagaggacggcccggcgtcgatacacccgacgcaagaatcggatttgctatctccaggagatcttctccaacgagatggcaaaggtggacgactcgttcttccaccgcctcgaggagagctttctcgtcgaggaggacaagaagcacgagcgccaccccatattcgggaatatcgtggatgaggtcgcctatcacgagaagtaccccacgatttatcatttgcgcaagaagctggtagattcaaccgacaaggcggacttgcggttgatctacctagctcttgcgcatatgataaagtttcgggggcacttcttgattgaaggcgacctcaatcccgataactcggatgtggacaagctcttcatacagctggtgcagacctacaaccagctgtttgaagagaatccgattaatgcgtcgggtgtcgacgccaaggccatcctcagcgcgcgcctcagcaagtctcgccgccttgagaatctgattgcccagctcccgggcgagaagaagaacgggttgttcggtaaccttattgcgctgtcgcttggcctcactccgaacttcaagtcgaacttcgacttggcggaggacgccaagctgcagctcagtaaggatacctacgacgacgacctggacaatcttctcgcccagatcggcgaccagtacgccgatctcttcctggcggcgaagaatctgagcgatgcaattctcctgagtgacattctgagggtgaatactgaaattacgaaggctccgctgtctgccagcatgatcaagcggtacgatgagcatcaccaggacctgacgctcctcaaggctctcgtccgtcagcagctcccggagaagtacaaggagatcttcttcgaccagtcgaagaacggatacgccgggtacatcgacgggggcgcttcccaggaggagttttataagtttataaagcccatcctggagaagatggacgggaccgaggagctcctggtgaagctcaaccgcgaggatctgctgcgcaagcagcggaccttcgataatggcagtattccccatcagattcacttaggagagttgcacgcgattcttcgccgccaggaagacttctaccccttcctcaaagataacagggagaagatcgagaagatcctcaccttccgcatcccgtattacgtgggtcccctggcgcgggggaactcacgttttgcgtggatgacgcggaagagtgaggagacgatcactccctggaactttgaggaagtggtagacaagggtgcttcggcacagtccttcatcgagcggatgacaaattttgacaagaatttgccgaacgagaaggtcttgccgaagcactcgctgctttacgagtactttacggtttacaacgagttgacgaaggtcaagtacgtcactgagggaatgcggaagcccgcattcctcagtggcgaacagaagaaggccatcgtcgacttgttgttcaagacgaaccgtaaagtaaccgtgaagcagctgaaggaggactacttcaagaagatcgagtgcttcgactccgttgagatcagcggagtcgaagaccgatttaatgcctccctcggtacgtatcatgatctcctcaagattatcaaggataaggacttccttgataatgaggagaatgaggatattctcgaggacattgtgctgaccctcaccctgttcgaagaccgtgagatgattgaggaacggttgaagacctacgctcatctgtttgatgacaaggtcatgaagcagttgaagcgtaggcgttataccggctggggtcgtctttcccgaaagcttatcaacgggatccgtgataagcagtcgggaaagacgatcctagacttcctcaagtctgacggttttgcgaacaggaacttcatgcagctcatccacgacgactccttgaccttcaaggaggatatccagaaggcgcaggtgagcggccagggcgatagcttgcacgagcatatcgcgaacctggccggctcacctgcgatcaagaagggtatcctccagacggtcaaggtcgtggatgagctcgtgaaggtgatgggtcggcacaagcccgagaatatcgtcatcgagatggctcgcgagaatcagacgacccagaagggtcagaagaattctcgcgagcgcatgaagcgtatcgaggagggcattaaggagctgggcagtcagattctcaaggagcaccctgtcgagaacacgcagcttcagaacgagaagctgtatctttactacctccagaacggacgggacatgtacgtagatcaggagctggacatcaaccggctctctgactacgatgtcgattctatcgtccctcagagctttctgaaggacgatagcatcgacaacaaggtcctgactcgctccgataagaatcggggcaagtcggacaatgtcccgtccgaggaggtagtgaagaagatgaagaactattggcgtcagctgttgaacgcgaagctgatcactcagagaaagttcgataatctcaccaaggccgagagggggggtctgagcgagcttgataaggcgggtttcatcaagcggcagcttgttgagacccgccagatcacgaagcacgtcgctcagatcctcgactctcggatgaacaccaagtacgacgagaatgacaagcttattcgggaggtcaaggtcattacccttaagtcgaagctcgtcagcgactttcgcaaggattttcagttttataaagttcgtgagataaacaattatcaccatgcccacgacgcgtacctgaacgccgtcgtgggcacggcgctgataaagaagtacccgaagctggagtccgagttcgtttatggcgattataaggtgtacgacgtgcgcaagatgatcgccaagagcgagcaggagatcggaaaggctacggcgaagtacttcttttacagcaacatcatgaacttttttaagactgagatcacccttgcgaatggcgagatccgcaagcgcccgttgatcgagacgaacggggagactggggagattgtgtgggataagggtcgggatttcgctacggtgagaaaggttctttcgatgccccaggtcaacatcgtcaagaagacggaggttcagaccgggggcttctcgaaagaatctatcttaccgaagcgaaattccgacaagcttatcgcacgcaagaaggactgggaccccaagaagtacggggggttcgacagtcctacggtggcctactccgtgttggtggtcgccaaggttgagaagggcaagagcaagaagctcaagtccgtcaaggagctcttggggatcaccatcatggagaggtcatcgtttgagaagaatcctattgacttccttgaagccaagggctacaaggaagtcaagaaggatttgatcatcaagctccccaagtactccctgttcgagctcgagaacgggcgcaagcggatgctcgccagcgctggcgagcttcagaagggtaatgagcttgccctcccgagtaagtatgtcaatttcttgtacttggcgtcgcactacgagaagctgaagggctcgccggaggacaacgagcagaagcagcttttcgtagagcagcacaagcactaccttgatgagattatcgagcagatctctgagttcagcaagcgcgttatactagctgacgccaatctcgacaaggtgctctcggcttataacaagcaccgggataagccgatacgtgagcaggcggagaacatcatccacctgttcacgttgacgaacttgggggccccggcagcgttcaagtattttgatactacgatcgatcggaagcgttacaccagcaccaaggaggtcttggacgcgaccttgattcatcagtcgatcacgggtctctacgagacccggatcgacctgtcgcagctcgggggcgacggcgcccccgagtctgcgacagagtcgggcgggacttccaccgagagtgaaggatcggccggccccaagaagaagcgcaaagtcacgtcgacggagtcggaggggtctgcggggtccgcggggagcacgtccggctcctcctcgggcatgaagatcgctgttgtcgataaggcgttgaacaatacgcgttacgacaagcattttcagctgtacggggaggaggtggacgtgttccatatgtgcaatgagaagctgagcggtcggcttctcaagaagcacataaccatcgggaccccggagaaccccttcgacccgaacgactatgactttgtgattcttgttggggccgagccgttcctttactttgcggggaagaaggggatcggggactataccggtaagcgtgtcgagtacaatggatacgctaactggatagcctcgatctcccccgcccagcttcatttcaagcctgagatgaagccggtcttcgacgcgaccgttgagaatatccacgatattatcaacggtcgcgagaagatcgcgaaggccggtgattaccgcccaatcacggatcccgacgaggccgaggagtacatcaagatggtgtacaacatggtgattgggcccgtggcgttcgcctccgctacgtcggcattgtattgtcgagacggctacctccttggggtgtcgatcagccaccaggagtaccaaggagtgtatatcgattcagattgtctgacggaggtggctgtctattatctgcagaagatattagacagcgagaaccacaccatcgtcttccacaatctgaagttcgatatgcacttctacaagtaccacctggggctgacgttcgacaaggcccacaaggagcgccgtctccacgatacaatgctccagcactacgtgctggacgagcggaggggaacccacgggctcaagagcctcgccatgaagtacaccgatatgggcgattacgatttcgaacttgataagttcaaggacgactattgtaaggcccataagatcaagaaggaggacttcacctacgacttgatcccttttgacatcatgtggccgtacgcagctaaggacaccgatgcgacgatcaggctgcacaacttctttcttccgaagatcgagaagaacgagaagttgtgcagcctgtattacgacgtgttgatgcctggctgcgtgttcctgcagcgcgttgaggaccgcggcgtgcccatcagcatcgatcgactgaaggaggcgcagtatcagctcacacataatctgaacaaggcacgggagaagctttacacttacccggaggttaagcagctcgagcaggaccagaacgaggcgtttaaccccaatagtgtgaagcagctccgcgtgctcttgttcgattatgtggggctgacgccgactggtaagcttacggatacaggagcggatagcacggatgctgaggcgctgaacgagttagcgactcagcatccgattgctaagacgctcctggagatccgtaagcttaccaagttgatctccacttatgtggagaagatccttctgtcgatcgatgctgatgggtgcatccggacggggtttcatgagcacatgaccacgtccgggcgcctcagcagtagtgggaagctgaaccttcagcagctcccacgcgatgagtcgataatcaaggggtgcgtggtcgcaccccctggttatcgagtcatcgcgtgggatctcactactgctgaggtgtactacgccgcggtcctcagcggcgacaggaacatgcagcaggtgttcatcaacatgcgtaatgagccggataagtatccggacttccacagcaacatcgcgcatatggtgttcaagctgcagtgcgagccacgtgatgtcaagaagctgtttccagcgcttcggcaggcggcgaaggccattacgttcggtatactctatggcagtgggccagcgaaggtggcccactccgtcaacgaggcactcctcgagcaggccgccaagactggcgagccgttcgtggagtgcaccgttgcggatgccaaggagtatatcgaaacgtactttggccagttcccgcagctgaagcgctggatagataaatgccatgatcagatcaagaatcatggctttatctacagccattttggtcgcaaacggcggcttcataatatccatagcgaggatcgcggagtccagggcgaagagattcgctctggattcaacgcgatcatccagagcgctagttccgactccctcctcctcggcgctgtcgatgccgacaacgagatcatcagtcttggtctcgagcaggagatgaagattgtgatgctcgtgcacgatagcgtggtcgctatcgtgcgtgaggatctcattgaccagtacaatgagatcctcattcggaacatccagaaggatcgagggatctcgatccctggatgtccgatcggcatcgacagcgactccgaggcaggagggagtcgggactacagctgtggaaagatgaagaagcagcacccttccatagcgtgtatagacgacgacgagtatacacgctatgtgaagggtgtgcttcttgatgccgagttcgagtacaagaagttggccgctatggataaggagcaccccgaccactccaagtataaggatgacaagtttatcgcggtctgcaaagacctcgataatgtcaaacgtatacttggagctggcgggggctccggcaagcgcaccgctgacggctccggggggggctctccgaagaagaagcggaaggtgcccgctgcgaagcgggtaaagcttgattcggagagcgccaccccggagtccgtcagcggttggcgcttgttcaagaagatttcttgactagcaccagcctcaagaacacccgaatggagtctctaagctacataataccaacttacactttacaaaatgttgtcccccaaaatgtagccattcgtatctgctcctaataaaaagaaagtttcttcacattctctcgagaaaaaaaaaaaatggaaaaaaaaaaaacggaaaaaaaaaaaaggtaaaaaaaaaaaatataaaaaaaaaaaacataaaaaaaaaaaacgaaaaaaaaaaaacgtaaaaaaaaaaaactcaaaaaaaaaaaagataaaaaaaaaaaacctaaaaaaaaaaaatgtaaaaaaaaaaaagggaaaaaaaaaaaacgcaaaaaaaaaaaacacaaaaaaaaaaaatgcaaaaaaaaaaaatcgaaaaaaaaaaaatctaaaaaaaaaaaacgaaaaaaaaaaaacccaaaaaaaaaaaagacaaaaaaaaaaaatagaaaaaaaaaaagttaaaaaaaaaaaactgaaaaaaaaaaaatttaaaaaaaaaaaatctag

SEQ ID NO: 2526 - DNA, 7579 bp, synthetic construct
  misc_feature 1..7579: note = Synthetic
  source 1..7579: mol_type = other DNA
aggaagctcagaataaacgctcaactttggccggatctgccaccatgaagcggcccgccgccaccaagaaggccggccaggccaagaagaagaaggacaagaagtactccatcggcctggacatcggcaccaactccgtgggctgggccgtgatcaccgacgagtacaaggtgccctccaagaagttcaaggtgctgggcaacaccgaccggcactccatcaagaagaacctgatcggcgccctgctgttcgactccggcgagaccgccgaggccacccggctgaagcggaccgcccggcggcggtacacccggcggaagaaccggatctgctacctgcaggagatcttctccaacgagatggccaaggtggacgactccttcttccaccggctggaggagtccttcctggtggaggaggacaagaagcacgagcggcaccccatcttcggcaacatcgtggacgaggtggcctaccacgagaagtaccccaccatctaccacctgcggaagaagctggtggactccaccgacaaggccgacctgcggctgatctacctggccctggcccacatgatcaagttccggggccacttcctgatcgagggcgacctgaaccccgacaactccgacgtggacaagctgttcatccagctggtgcagacctacaaccagctgttcgaggagaaccccatcaacgcctccggcgtggacgccaaggccatcctgtccgcccggctgtccaagtcccggcggctggagaacctgatcgcccagctgcccggcgagaagaagaacggcctgttcggcaacctgatcgccctgtccctgggcctgacccccaacttcaagtccaacttcgacctggccgaggacgccaagctgcagctgtccaaggacacctacgacgacgacctggacaacctgctggcccagatcggcgaccagtacgccgacctgttcctggccgccaagaacctgtccgacgccatcctgctgtccgacatcctgcgggtgaacaccgagatcaccaaggcccccctgtccgcctccatgatcaagcggtacgacgagcaccaccaggacctgaccctgctgaaggccctggtgcggcagcagctgcccgagaagtacaaggagatcttcttcgaccagtccaagaacggctacgccggctacatcgacggcggcgcctcccaggaggagttctacaagttcatcaagcccatcctggagaagatggacggcaccgaggagctgctggtgaagctgaaccgggaggacctgctgcggaagcagcggaccttcgacaacggctccatcccccaccagatccacctgggcgagctgcacgccatcctgcggcggcaggaggacttctaccccttcctgaaggacaaccgggagaagatcgagaagatcctgaccttccggatcccctactacgtgggccccctggcccggggcaactcccggttcgcctggatgacccggaagtccgaggagaccatcaccccctggaacttcgaggaggtggtggacaagggcgcctccgcccagtccttcatcgagcggatgaccaacttcgacaagaacctgcccaacgagaaggtgctgcccaagcactccctgctgtacgagtacttcaccgtgtacaacgagctgaccaaggtgaagtacgtgaccgagggcatgcggaagcccgccttcctgtccggcgagcagaagaaggccatcgtggacctgctgttcaagaccaaccggaaggtgaccgtgaagcagctgaaggaggactacttcaagaagatcgagtgcttcgactccgtggagatctccggcgtggaggaccggttcaacgcctccctgggcacctaccacgacctgctgaagatcatcaaggacaaggacttcctggacaacgaggagaacgaggacatcctggaggacatcgtgctgaccctgaccctgttcgaggaccgggagatgatcgaggagcggctgaagacctacgcccacctgttcgacgacaaggtgatgaagcagctgaagcggcggcggtacaccggctggggccggctgtcccggaagctgatcaacggcatccgggacaagcagtccggcaagaccatcctggacttcctgaagtccgacggcttcgccaaccggaacttcatgcagctgatccacgacgactccctgaccttcaaggaggacatccagaaggcccaggtgtccggccagggcgactccctgcacgagcacatcgccaacctggccggctcccccgccatcaagaagggcatcctgcagaccgtgaaggtggtggacgagctggtgaaggtgatgggccggcacaagcccgagaacatcgtgatcgagatggcccgggagaaccagaccacccagaagggccagaagaactcccgggagcggatgaagcggatcgaggagggcatcaaggagctgggctcccagatcctgaaggagcaccccgtggagaacacccagctgcagaacgagaagctgtacctgtactacctgcagaacggccgggacatgtacgtggaccaggagctggacatcaaccggctgtccgactacgacgtggacgccatcgtgccccagtccttcctgaaggacgactccatcgacaacaaggtgctgacccggtccgacaagaaccggggcaagtccgacaacgtgccctccgaggaggtggtgaagaagatgaagaactactggcggcagctgctgaacgccaagctgatcacccagcggaagttcgacaacctgaccaaggccgagcggggcggcctgtccgagctggacaaggccggcttcatcaagcggcagctggtggagacccggcagatcaccaagcacgtggcccagatcctggactcccggatgaacaccaagtacgacgagaacgacaagctgatccgggaggtgaaggtgatcaccctgaagtccaagctggtgtccgacttccggaaggacttccagttctacaaggtgcgggagatcaacaactaccaccacgcccacgacgcctacctgaacgccgtggtgggcaccgccctgatcaagaagtaccccaagctggagtccgagttcgtgtacggcgactacaaggtgtacgacgtgcggaagatgatcgccaagtccgagcaggagatcggcaaggccaccgccaagtacttcttctactccaacatcatgaacttcttcaagaccgagatcaccctggccaacggcgagatccggaagcggcccctgatcgagaccaacggcgagaccggcgagatcgtgtgggacaagggccgggacttcgccaccgtgcggaaggtgctgtccatgccccaggtgaacatcgtgaagaagaccgaggtgcagaccggcggcttctccaaggagtccatcctgcccaagcggaactccgacaagctgatcgcccggaagaaggactgggaccccaagaagtacggcggcttcgactcccccaccgtggcctactccgtgctggtggtggccaaggtggagaagggcaagtccaagaagctgaagtccgtgaaggagctgctgggcatcaccatcatggagcggtcctccttcgagaagaaccccatcgacttcctggaggccaagggctacaaggaggtgaagaaggacctgatcatcaagctgcccaagtactccctgttcgagctggagaacggccggaagcggatgctggcctccgccggcgagctgcagaagggcaacgagctggccctgccctccaagtacgtgaacttcctgtacctggcctcccactacgagaagctgaagggctcccccgaggacaacgagcagaagcagctgttcgtggagcagcacaagcactacctggacgagatcatcgagcagatctccgagttctccaagcgggtgatcctggccgacgccaacctggacaaggtgctgtccgcctacaacaagcaccgggacaagcccatccgggagcaggccgagaacatcatccacctgttcaccctgaccaacctgggcgcccccgccgccttcaagtacttcgacaccaccatcgaccggaagcggtacacctccaccaaggaggtgctggacgccaccctgatccaccagtccatcaccggcctgtacgagacccggatcgacctgtcccagctgggcggcgacggcgcccccgagtccgccaccgagtccggcggcacctccaccgagtccgagggctccgccggccccaagaagaagcggaaggtgacctccaccgagtccgagggctccgccggctccgccggctccacctccggctcctcctccggcatgaagatcgccgtggtggacaaggccctgaacaacacccggtacgacaagcacttccagctgtacggcgaggaggtggacgtgttccacatgtgcaacgagaagctgtccggccggctgctgaagaagcacatcaccatcggcacccccgagaaccccttcgaccccaacgactacgacttcgtgatcctggtgggcgccgagcccttcctgtacttcgccggcaagaagggcatcggcgactacaccggcaagcgggtggagtacaacggctacgccaactggatcgcctccatctcccccgcccagctgcacttcaagcccgagatgaagcccgtgttcgacgccaccgtggagaacatccacgacatcatcaacggccgggagaagatcgccaaggccggcgactaccggcccatcaccgaccccgacgaggccgaggagtacatcaagatggtgtacaacatggtgatcggccccgtggccttcgcctccgccacctccgccctgtactgccgggacggctacctgctgggcgtgtccatctcccaccaggagtaccagggcgtgtacatcgactccgactgcctgaccgaggtggccgtgtactacctgcagaagatcctggactccgagaaccacaccatcgtgttccacaacctgaagttcgacatgcacttctacaagtaccacctgggcctgaccttcgacaaggcccacaaggagcggcggctgcacgacaccatgctgcagcactacgtgctggacgagcggcggggcacccacggcctgaagtccctggccatgaagtacaccgacatgggcgactacgacttcgagctggacaagttcaaggacgactactgcaaggcccacaagatcaagaaggaggacttcacctacgacctgatccccttcgacatcatgtggccctacgccgccaaggacaccgacgccaccatccggctgcacaacttcttcctgcccaagatcgagaagaacgagaagctgtgctccctgtactacgacgtgctgatgcccggctgcgtgttcctgcagcgggtggaggaccggggcgtgcccatctccatcgaccggctgaaggaggcccagtaccagctgacccacaacctgaacaaggcccgggagaagctgtacacctaccccgaggtgaagcagctggagcaggaccagaacgaggccttcaaccccaactccgtgaagcagctgcgggtgctgctgttcgactacgtgggcctgacccccaccggcaagctgaccgacaccggcgccgactccaccgacgccgaggccctgaacgagctggccacccagcaccccatcgccaagaccctgctggagatccggaagctgaccaagctgatctccacctacgtggagaagatcctgctgtccatcgacgccgacggctgcatccggaccggcttccacgagcacatgaccacctccggccggctgtcctcctccggcaagctgaacctgcagcagctgccccgggacgagtccatcatcaagggctgcgtggtggccccccccggctaccgggtgatcgcctgggacctgaccaccgccgaggtgtactacgccgccgtgctgtccggcgaccggaacatgcagcaggtgttcatcaacatgcggaacgagcccgacaagtaccccgacttccactccaacatcgcccacatggtgttcaagctgcagtgcgagccccgggacgtgaagaagctgttccccgccctgcggcaggccgccaaggccatcaccttcggcatcctgtacggctccggccccgccaaggtggcccactccgtgaacgaggccctgctggagcaggccgccaagaccggcgagcccttcgtggagtgcaccgtggccgacgccaaggagtacatcgagacctacttcggccagttcccccagctgaagcggtggatcgacaagtgccacgaccagatcaagaaccacggcttcatctactcccacttcggccggaagcggcggctgcacaacatccactccgaggaccggggcgtgcagggcgaggagatccggtccggcttcaacgccatcatccagtccgcctcctccgactccctgctgctgggcgccgtggacgccgacaacgagatcatctccctgggcctggagcaggagatgaagatcgtgatgctggtgcacgactccgtggtggccatcgtgcgggaggacctgatcgaccagtacaacgagatcctgatccggaacatccagaaggaccggggcatctccatccccggctgccccatcggcatcgactccgactccgaggccggcggctcccgggactactcctgcggcaagatgaagaagcagcacccctccatcgcctgcatcgacgacgacgagtacacccggtacgtgaagggcgtgctgctggacgccgagttcgagtacaagaagctggccgccatggacaaggagcaccccgaccactccaagtacaaggacgacaagttcatcgccgtgtgcaaggacctggacaacgtgaagcggatcctgggcgcctccggctccgagacccccggcacctccgagtccgccacccccgagtcccccaagaagaagcggaaggtgcctgccgctaagagagtgaagctggactccgagtccgccacccccgagtccgtgtccggctggcggctgttcaagaagatctcctagctagcaccagcctcaagaacacccgaatggagtctctaagctacataataccaacttacactttacaaaatgttgtcccccaaaatgtagccattcgtatctgctcctaataaaaagaaagtttcttcacattctctcgagaaaaaaaaaaaatggaaaaaaaaaaaacggaaaaaaaaaaaaggtaaaaaaaaaaaatataaaaaaaaaaaacataaaaaaaaaaaacgaaaaaaaaaaaacgtaaaaaaaaaaaactcaaaaaaaaaaaagataaaaaaaaaaaacctaaaaaaaaaaaatgtaaaaaaaaaaaagggaaaaaaaaaaaacgcaaaaaaaaaaaacacaaaaaaaaaaaatgcaaaaaaaaaaaatcgaaaaaaaaaaaatctaaaaaaaaaaaacgaaaaaaaaaaaacccaaaaaaaaaaaagacaaaaaaaaaaaatagaaaaaaaaaaagttaaaaaaaaaaaactgaaaaaaaaaaaatttaaaaaaaaaaaatctag

SEQ ID NO: 2527 - DNA, 7549 bp, synthetic construct
  misc_feature 1..7549: note = Synthetic
  source 1..7549: mol_type = other DNA
aggaagctcagaataaacgctcaactttggccggatctgccaccatgaagcggcccgccgccaccaagaaggccggccaggccaagaagaagaaggacaagaagtactccatcggcctggacatcggcaccaactccgtgggctgggccgtgatcaccgacgagtacaaggtgccctccaagaagttcaaggtgctgggcaacaccgaccggcactccatcaagaagaacctgatcggcgccctgctgttcgactccggcgagaccgccgaggccacccggctgaagcggaccgcccggcggcggtacacccggcggaagaaccggatctgctacctgcaggagatcttctccaacgagatggccaaggtggacgactccttcttccaccggctggaggagtccttcctggtggaggaggacaagaagcacgagcggcaccccatcttcggcaacatcgtggacgaggtggcctaccacgagaagtaccccaccatctaccacctgcggaagaagctggtggactccaccgacaaggccgacctgcggctgatctacctggccctggcccacatgatcaagttccggggccacttcctgatcgagggcgacctgaaccccgacaactccgacgtggacaagctgttcatccagctggtgcagacctacaaccagctgttcgaggagaaccccatcaacgcctccggcgtggacgccaaggccatcctgtccgcccggctgtccaagtcccggcggctggagaacctgatcgcccagctgcccggcgagaagaagaacggcctgttcggcaacctgatcgccctgtccctgggcctgacccccaacttcaagtccaacttcgacctggccgaggacgccaagctgcagctgtccaaggacacctacgacgacgacctggacaacctgctggcccagatcggcgaccagtacgccgacctgttcctggccgccaagaacctgtccgacgccatcctgctgtccgacatcctgcgggtgaacaccgagatcaccaaggcccccctgtccgcctccatgatcaagcggtacgacgagcaccaccaggacctgaccctgctgaaggccctggtgcggcagcagctgcccgagaagtacaaggagatcttcttcgaccagtccaagaacggctacgccggctacatcgacggcggcgcctcccaggaggagttctacaagttcatcaagcccatcctggagaagatggacggcaccgaggagctgctggtgaagctgaaccgggaggacctgctgcggaagcagcggaccttcgacaacggctccatcccccaccagatccacctgggcgagctgcacgccatcctgcggcggcaggaggacttctaccccttcctgaaggacaaccgggagaagatcgagaagatcctgaccttccggatcccctactacgtgggccccctggcccggggcaactcccggttcgcctggatgacccggaagtccgaggagaccatcaccccctggaacttcgaggaggtggtggacaagggcgcctccgcccagtccttcatcgagcggatgaccaacttcgacaagaacctgcccaacgagaaggtgctgcccaagcactccctgctgtacgagtacttcaccgtgtacaacgagctgaccaaggtgaagtacgtgaccgagggcatgcggaagcccgccttcctgtccggcgagcagaagaaggccatcgtggacctgctgttcaagaccaaccggaaggtgaccgtgaagcagctgaaggaggactacttcaagaagatcgagtgcttcgactccgtggagatctccggcgtggaggaccggttcaacgcctccctgggcacctaccacgacctgctgaagatcatcaaggacaaggacttcctggacaacgaggagaacgaggacatcctggaggacatcgtgctgaccctgaccctgttcgaggaccgggagatgatcgaggagcggctgaagacctacgcccacctgttcgacgacaaggtgatgaagcagctgaagcggcggcggtacaccggctggggccggctgtcccggaagctgatcaacggcatccgggacaagcagtccggcaagaccatcctggacttcctgaagtccgacggcttcgccaaccggaacttcatgcagctgatccacgacgactccctgaccttcaaggaggacatccagaaggcccaggtgtccggccagggcgactccctgcacgagcacatcgccaacctggccggctcccccgccatcaagaagggcatcctgcagaccgtgaaggtggtggacgagctggtgaaggtgatgggccggcacaagcccgagaacatcgtgatcgagatggcccgggagaaccagaccacccagaagggccagaagaactcccgggagcggatgaagcggatcgaggagggcatcaaggagctgggctcccagatcctgaaggagcaccccgtggagaacacccagctgcagaacgagaagctgtacctgtactacctgcagaacggccgggacatgtacgtggaccaggagctggacatcaaccggctgtccgactacgacgtggacgccatcgtgccccagtccttcctgaaggacgactccatcgacaacaaggtgctgacccggtccgacaagaaccggggcaagtccgacaacgtgccctccgaggaggtggtgaagaagatgaagaactactggcggcagctgctgaacgccaagctgatcacccagcggaagttcgacaacctgaccaaggccgagcggggcggcctgtccgagctggacaaggccggcttcatcaagcggcagctggtggagacccggcagatcaccaagcacgtggcccagatcctggactcccggatgaacaccaagtacgacgagaacgacaagctgatccgggaggtgaaggtgatcaccctgaagtccaagctggtgtccgacttccggaaggacttccagttctacaaggtgcgggagatcaacaactaccaccacgcccacgacgcctacctgaacgccgtggtgggcaccgccctgatcaagaagtaccccaagctggagtccgagttcgtgtacggcgactacaaggtgtacgacgtgcggaagatgatcgccaagtccgagcaggagatcggcaaggccaccgccaagtacttcttctactccaacatcatgaacttcttcaagaccgagatcaccctggccaacggcgagatccggaagcggcccctgatcgagaccaacggcgagaccggcgagatcgtgtgggacaagggccgggacttcgccaccgtgcggaaggtgctgtccatgccccaggtgaacatcgtgaagaagaccgaggtgcagaccggcggcttctccaaggagtccatcctgcccaagcggaactccgacaagctgatcgcccggaagaaggactgggaccccaagaagtacggcggcttcgactcccccaccgtggcctactccgtgctggtggtggccaaggtggagaagggcaagtccaagaagctgaagtccgtgaaggagctgctgggcatcaccatcatggagcggtcctccttcgagaagaaccccatcgacttcctggaggccaagggctacaaggaggtgaagaaggacctgatcatcaagctgcccaagtactccctgttcgagctggagaacggccggaagcggatgctggcctccgccggcgagctgcagaagggcaacgagctggccctgccctccaagtacgtgaacttcctgtacctggcctcccactacgagaagctgaagggctcccccgaggacaacgagcagaagcagctgttcgtggagcagcacaagcactacctggacgagatcatcgagcagatctccgagttctccaagcgggtgatcctggccgacgccaacctggacaaggtgctgtccgcctacaacaagcaccgggacaagcccatccgggagcaggccgagaacatcatccacctgttcaccctgaccaacctgggcgcccccgccgccttcaagtacttcgacaccaccatcgaccggaagcggtacacctccaccaaggaggtgctggacgccaccctgatccaccagtccatcaccggcctgtacgagacccggatcgacctgtcccagctgggcggcgacggtaccaaggacagcaccaaagatatcccggaaaccccgagcaaggaccccaagaagaagcggaaggtgggtaccaaggacagcaccaaagatatcccggaaaccccgagcaaggacatgaagatcgccgtggtggacaaggccctgaacaacacccggtacgacaagcacttccagctgtacggcgaggaggtggacgtgttccacatgtgcaacgagaagctgtccggccggctgctgaagaagcacatcaccatcggcacccccgagaaccccttcgaccccaacgactacgacttcgtgatcctggtgggcgccgagcccttcctgtacttcgccggcaagaagggcatcggcgactacaccggcaagcgggtggagtacaacggctacgccaactggatcgcctccatctcccccgcccagctgcacttcaagcccgagatgaagcccgtgttcgacgccaccgtggagaacatccacgacatcatcaacggccgggagaagatcgccaaggccggcgactaccggcccatcaccgaccccgacgaggccgaggagtacatcaagatggtgtacaacatggtgatcggccccgtggccttcgcctccgccacctccgccctgtactgccgggacggctacctgctgggcgtgtccatctcccaccaggagtaccagggcgtgtacatcgactccgactgcctgaccgaggtggccgtgtactacctgcagaagatcctggactccgagaaccacaccatcgtgttccacaacctgaagttcgacatgcacttctacaagtaccacctgggcctgaccttcgacaaggcccacaaggagcggcggctgcacgacaccatgctgcagcactacgtgctggacgagcggcggggcacccacggcctgaagtccctggccatgaagtacaccgacatgggcgactacgacttcgagctggacaagttcaaggacgactactgcaaggcccacaagatcaagaaggaggacttcacctacgacctgatccccttcgacatcatgtggccctacgccgccaaggacaccgacgccaccatccggctgcacaacttcttcctgcccaagatcgagaagaacgagaagctgtgctccctgtactacgacgtgctgatgcccggctgcgtgttcctgcagcgggtggaggaccggggcgtgcccatctccatcgaccggctgaaggaggcccagtaccagctgacccacaacctgaacaaggcccgggagaagctgtacacctaccccgaggtgaagcagctggagcaggaccagaacgaggccttcaaccccaactccgtgaagcagctgcgggtgctgctgttcgactacgtgggcctgacccccaccggcaagctgaccgacaccggcgccgactccaccgacgccgaggccctgaacgagctggccacccagcaccccatcgccaagaccctgctggagatccggaagctgaccaagctgatctccacctacgtggagaagatcctgctgtccatcgacgccgacggctgcatccggaccggcttccacgagcacatgaccacctccggccggctgtcctcctccggcaagctgaacctgcagcagctgccccgggacgagtccatcatcaagggctgcgtggtggccccccccggctaccgggtgatcgcctgggacctgaccaccgccgaggtgtactacgccgccgtgctgtccggcgaccggaacatgcagcaggtgttcatcaacatgcggaacgagcccgacaagtaccccgacttccactccaacatcgcccacatggtgttcaagctgcagtgcgagccccgggacgtgaagaagctgttccccgccctgcggcaggccgccaaggccatcaccttcggcatcctgtacggctccggccccgccaaggtggcccactccgtgaacgaggccctgctggagcaggccgccaagaccggcgagcccttcgtggagtgcaccgtggccgacgccaaggagtacatcgagacctacttcggccagttcccccagctgaagcggtggatcgacaagtgccacgaccagatcaagaaccacggcttcatctactcccacttcggccggaagcggcggctgcacaacatccactccgaggaccggggcgtgcagggcgaggagatccggtccggcttcaacgccatcatccagtccgcctcctccgactccctgctgctgggcgccgtggacgccgacaacgagatcatctccctgggcctggagcaggagatgaagatcgtgatgctggtgcacgactccgtggtggccatcgtgcgggaggacctgatcgaccagtacaacgagatcctgatccggaacatccagaaggaccggggcatctccatccccggctgccccatcggcatcgactccgactccgaggccggcggctcccgggactactcctgcggcaagatgaagaagcagcacccctccatcgcctgcatcgacgacgacgagtacacccggtacgtgaagggcgtgctgctggacgccgagttcgagtacaagaagctggccgccatggacaaggagcaccccgaccactccaagtacaaggacgacaagttcatcgccgtgtgcaaggacctggacaacgtgaagcggatcctgggcgcctccggctccgagacccccggcacctccgagtccgccacccccgagtcccccaagaagaagcggaaggtgcctgccgctaagagagtgaagctggactccgagtccgccacccccgagtccgtgtccggctggcggctgttcaagaagatctcctagctagcaccagcctcaagaacacccgaatggagtctctaagctacataataccaacttacactttacaaaatgttgtcccccaaaatgtagccattcgtatctgctcctaataaaaagaaagtttcttcacattctctcgagaaaaaaaaaaaatggaaaaaaaaaaaacggaaaaaaaaaaaaggtaaaaaaaaaaaatataaaaaaaaaaaacataaaaaaaaaaaacgaaaaaaaaaaaacgtaaaaaaaaaaaactcaaaaaaaaaaaagataaaaaaaaaaaacctaaaaaaaaaaaatgtaaaaaaaaaaaagggaaaaaaaaaaaacgcaaaaaaaaaaaacacaaaaaaaaaaaatgcaaaaaaaaaaaatcgaaaaaaaaaaaatctaaaaaaaaaaaacgaaaaaaaaaaaacccaaaaaaaaaaaagacaaaaaaaaaaaatagaaaaaaaaaaagttaaaaaaaaaaaactgaaaaaaaaaaaatttaaaaaaaaaaaatctag

SEQ ID NO: 2528 - DNA, 7694 bp, synthetic construct
  misc_feature 1..7694: note = Synthetic
  source 1..7694: mol_type = other DNA
aggactcactatttgttttcgcgcccagttgcaaaaagtgtcgaagctcagaataaacgctcaactttggccggatctgccaccatgggcaagcggcccgccgccaccaagaaggccggccaggccaagaagaagaaggacaagaagtactccatcggcctggacatcggcaccaactccgtgggctgggccgtgatcaccgacgagtacaaggtgccctccaagaagttcaaggtgctgggcaacaccgaccggcactccatcaagaagaacctgatcggcgccctgctgttcgactccggcgagaccgccgaggccacccggctgaagcggaccgcccggcggcggtacacccggcggaagaaccggatctgctacctgcaggagatcttctccaacgagatggccaaggtggacgactccttcttccaccggctggaggagtccttcctggtggaggaggacaagaagcacgagcggcaccccatcttcggcaacatcgtggacgaggtggcctaccacgagaagtaccccaccatctaccacctgcggaagaagctggtggactccaccgacaaggccgacctgcggctgatctacctggccctggcccacatgatcaagttccggggccacttcctgatcgagggcgacctgaaccccgacaactccgacgtggacaagctgttcatccagctggtgcagacctacaaccagctgttcgaggagaaccccatcaacgcctccggcgtggacgccaaggccatcctgtccgcccggctgtccaagtcccggcggctggagaacctgatcgcccagctgcccggcgagaagaagaacggcctgttcggcaacctgatcgccctgtccctgggcctgacccccaacttcaagtccaacttcgacctggccgaggacgccaagctgcagctgtccaaggacacctacgacgacgacctggacaacctgctggcccagatcggcgaccagtacgccgacctgttcctggccgccaagaacctgtccgacgccatcctgctgtccgacatcctgcgggtgaacaccgagatcaccaaggcccccctgtccgcctccatgatcaagcggtacgacgagcaccaccaggacctgaccctgctgaaggccctggtgcggcagcagctgcccgagaagtacaaggagatcttcttcgaccagtccaagaacggctacgccggctacatcgacggcggcgcctcccaggaggagttctacaagttcatcaagcccatcctggagaagatggacggcaccgaggagctgctggtgaagctgaaccgggaggacctgctgcggaagcagcggaccttcgacaacggctccatcccccaccagatccacctgggcgagctgcacgccatcctgcggcggcaggaggacttctaccccttcctgaaggacaaccgggagaagatcgagaagatcctgaccttccggatcccctactacgtgggccccctggcccggggcaactcccggttcgcctggatgacccggaagtccgaggagaccatcaccccctggaacttcgaggaggtggtggacaagggcgcctccgcccagtccttcatcgagcggatgaccaacttcgacaagaacctgcccaacgagaaggtgctgcccaagcactccctgctgtacgagtacttcaccgtgtacaacgagctgaccaaggtgaagtacgtgaccgagggcatgcggaagcccgccttcctgtccggcgagcagaagaaggccatcgtggacctgctgttcaagaccaaccggaaggtgaccgtgaagcagctgaaggaggactacttcaagaagatcgagtgcttcgactccgtggagatctccggcgtggaggaccggttcaacgcctccctgggcacctaccacgacctgctgaagatcatcaaggacaaggacttcctggacaacgaggagaacgaggacatcctggaggacatcgtgctgaccctgaccctgttcgaggaccgggagatgatcgaggagcggctgaagacctacgcccacctgttcgacgacaaggtgatgaagcagctgaagcggcggcggtacaccggctggggccggctgtcccggaagctgatcaacggcatccgggacaagcagtccggcaagaccatcctggacttcctgaagtccgacggcttcgccaaccggaacttcatgcagctgatccacgacgactccctgaccttcaaggaggacatccagaaggcccaggtgtccggccagggcgactccctgcacgagcacatcgccaacctggccggctcccccgccatcaagaagggcatcctgcagaccgtgaaggtggtggacgagctggtgaaggtgatgggccggcacaagcccgagaacatcgtgatcgagatggcccgggagaaccagaccacccagaagggccagaagaactcccgggagcggatgaagcggatcgaggagggcatcaaggagctgggctcccagatcctgaaggagcaccccgtggagaacacccagctgcagaacgagaagctgtacctgtactacctgcagaacggccgggacatgtacgtggaccaggagctggacatcaaccggctgtccgactacgacgtggacgccatcgtgccccagtccttcctgaaggacgactccatcgacaacaaggtgctgacccggtccgacaagaaccggggcaagtccgacaacgtgccctccgaggaggtggtgaagaagatgaagaactactggcggcagctgctgaacgccaagctgatcacccagcggaagttcgacaacctgaccaaggccgagcggggcggcctgtccgagctggacaaggccggcttcatcaagcggcagctggtggagacccggcagatcaccaagcacgtggcccagatcctggactcccggatgaacaccaagtacgacgagaacgacaagctgatccgggaggtgaaggtgatcaccctgaagtccaagctggtgtccgacttccggaaggacttccagttctacaaggtgcgggagatcaacaactaccaccacgcccacgacgcctacctgaacgccgtggtgggcaccgccctgatcaagaagtaccccaagctggagtccgagttcgtgtacggcgactacaaggtgtacgacgtgcggaagatgatcgccaagtccgagcaggagatcggcaaggccaccgccaagtacttcttctactccaacatcatgaacttcttcaagaccgagatcaccctggccaacggcgagatccggaagcggcccctgatcgagaccaacggcgagaccggcgagatcgtgtgggacaagggccgggacttcgccaccgtgcggaaggtgctgtccatgccccaggtgaacatcgtgaagaagaccgaggtgcagaccggcggcttctccaaggagtccatcctgcccaagcggaactccgacaagctgatcgcccggaagaaggactgggaccccaagaagtacggcggcttcgactcccccaccgtggcctactccgtgctggtggtggccaaggtggagaagggcaagtccaagaagctgaagtccgtgaaggagctgctgggcatcaccatcatggagcggtcctccttcgagaagaaccccatcgacttcctggaggccaagggctacaaggaggtgaagaaggacctgatcatcaagctgcccaagtactccctgttcgagctggagaacggccggaagcggatgctggcctccgccggcgagctgcagaagggcaacgagctggccctgccctccaagtacgtgaacttcctgtacctggcctcccactacgagaagctgaagggctcccccgaggacaacgagcagaagcagctgttcgtggagcagcacaagcactacctggacgagatcatcgagcagatctccgagttctccaagcgggtgatcctggccgacgccaacctggacaaggtgctgtccgcctacaacaagcaccgggacaagcccatccgggagcaggccgagaacatcatccacctgttcaccctgaccaacctgggcgcccccgccgccttcaagtacttcgacaccaccatcgaccggaagcggtacacctccaccaaggaggtgctggacgccaccctgatccaccagtccatcaccggcctgtacgagacccggatcgacctgtcccagctgggcggcgacggcgcccccgagtccgccaccgagtccggcggcacctccaccgagtccgagggctccgccggccccaagaagaagcggaaggtgacctccaccgagtccgagggctccgccggctccgccggctccacctccggctcctcctccggcatgaagatcgccgtggtggacaaggccctgaacaacacccggtacgacaagcacttccagctgtacggcgaggaggtggacgtgttccacatgtgcaacgagaagctgtccggccggctgctgaagaagcacatcaccatcggcacccccgagaaccccttcgaccccaacgactacgacttcgtgatcctggtgggcgccgagcccttcctgtacttcgccggcaagaagggcatcggcgactacaccggcaagcgggtggagtacaacggctacgccaactggatcgcctccatctcccccgcccagctgcacttcaagcccgagatgaagcccgtgttcgacgccaccgtggagaacatccacgacatcatcaacggccgggagaagatcgccaaggccggcgactaccggcccatcaccgaccccgacgaggccgaggagtacatcaagatggtgtacaacatggtgatcggccccgtggccttcgcctccgccacctccgccctgtactgccgggacggctacctgctgggcgtgtccatctcccaccaggagtaccagggcgtgtacatcgactccgactgcctgaccgaggtggccgtgtactacctgcagaagatcctggactccgagaaccacaccatcgtgttccacaacctgaagttcgacatgcacttctacaagtaccacctgggcctgaccttcgacaaggcccacaaggagcggcggctgcacgacaccatgctgcagcactacgtgctggacgagcggcggggcacccacggcctgaagtccctggccatgaagtacaccgacatgggcgactacgacttcgagctggacaagttcaaggacgactactgcaaggcccacaagatcaagaaggaggacttcacctacgacctgatccccttcgacatcatgtggccctacgccgccaaggacaccgacgccaccatccggctgcacaacttcttcctgcccaagatcgagaagaacgagaagctgtgctccctgtactacgacgtgctgatgcccggctgcgtgttcctgcagcgggtggaggaccggggcgtgcccatctccatcgaccggctgaaggaggcccagtaccagctgacccacaacctgaacaaggcccgggagaagctgtacacctaccccgaggtgaagcagctggagcaggaccagaacgaggccttcaaccccaactccgtgaagcagctgcgggtgctgctgttcgactacgtgggcctgacccccaccggcaagctgaccgacaccggcgccgactccaccgacgccgaggccctgaacgagctggccacccagcaccccatcgccaagaccctgctggagatccggaagctgaccaagctgatctccacctacgtggagaagatcctgctgtccatcgacgccgacggctgcatccggaccggcttccacgagcacatgaccacctccggccggctgtcctcctccggcaagctgaacctgcagcagctgccccgggacgagtccatcatcaagggctgcgtggtggccccccccggctaccgggtgatcgcctgggacctgaccaccgccgaggtgtactacgccgccgtgctgtccggcgaccggaacatgcagcaggtgttcatcaacatgcggaacgagcccgacaagtaccccgacttccactccaacatcgcccacatggtgttcaagctgcagtgcgagccccgggacgtgaagaagctgttccccgccctgcggcaggccgccaaggccatcaccttcggcatcctgtacggctccggccccgccaaggtggcccactccgtgaacgaggccctgctggagcaggccgccaagaccggcgagcccttcgtggagtgcaccgtggccgacgccaaggagtacatcgagacctacttcggccagttcccccagctgaagcggtggatcgacaagtgccacgaccagatcaagaaccacggcttcatctactcccacttcggccggaagcggcggctgcacaacatccactccgaggaccggggcgtgcagggcgaggagatccggtccggcttcaacgccatcatccagtccgcctcctccgactccctgctgctgggcgccgtggacgccgacaacgagatcatctccctgggcctggagcaggagatgaagatcgtgatgctggtgcacgactccgtggtggccatcgtgcgggaggacctgatcgaccagtacaacgagatcctgatccggaacatccagaaggaccggggcatctccatccccggctgccccatcggcatcgactccgactccgaggccggcggctcccgggactactcctgcggcaagatgaagaagcagcacccctccatcgcctgcatcgacgacgacgagtacacccggtacgtgaagggcgtgctgctggacgccgagttcgagtacaagaagctggccgccatggacaaggagcaccccgaccactccaagtacaaggacgacaagttcatcgccgtgtgcaaggacctggacaacgtgaagcggatcctgggcgccggcggcggctccggcaagcggaccgccgacggctccggcggcggctcccccaagaagaagcggaaggtgcctgccgctaagagagtgaagctggacggcggcggctccggcaagcggaccgccgacggctccggcggcggctccatcgccgccctggagaaggagatcgccgccctggagaaggagaacgccgccctggagtgggagatcgccgccctggagaagtagctagcaccagcctcaagaacacccgaatggagtctctaagctacataataccaacttacactttacaaaatgttgtcccccaaaatgtagccattcgtatctgctcctaataaaaagaaagtttcttcacattctctcgagaaaaaaaaaaaatggaaaaaaaaaaaacggaaaaaaaaaaaaggtaaaaaaaaaaaatataaaaaaaaaaaacataaaaaaaaaaaacgaaaaaaaaaaaacgtaaaaaaaaaaaactcaaaaaaaaaaaagataaaaaaaaaaaacctaaaaaaaaaaaatgtaaaaaaaaaaaagggaaaaaaaaaaaacgcaaaaaaaaaaaacacaaaaaaaaaaaatgcaaaaaaaaaaaatcgaaaaaaaaaaaatctaaaaaaaaaaaacgaaaaaaaaaaaacccaaaaaaaaaaaagacaaaaaaaaaaaatagaaaaaaaaaaagttaaaaaaaaaaaactgaaaaaaaaaaaatttaaaaaaaaaaaatctag

SEQ ID NO: 2529 - DNA, 7694 bp, synthetic construct
  misc_feature 1..7694: note = Synthetic
  source 1..7694: mol_type = other DNA
aggactcactatttgttttcgcgcccagttgcaaaaagtgtcgaagctcagaataaacgctcaactttggccggatctgccaccatgggcaagcggcccgccgccaccaagaaggccggccaggccaagaagaagaaggacaagaagtactccatcggcctggacatcggcaccaactccgtgggctgggccgtgatcaccgacgagtacaaggtgccctccaagaagttcaaggtgctgggcaacaccgaccggcactccatcaagaagaacctgatcggcgccctgctgttcgactccggcgagaccgccgaggccacccggctgaagcggaccgcccggcggcggtacacccggcggaagaaccggatctgctacctgcaggagatcttctccaacgagatggccaaggtggacgactccttcttccaccggctggaggagtccttcctggtggaggaggacaagaagcacgagcggcaccccatcttcggcaacatcgtggacgaggtggcctaccacgagaagtaccccaccatctaccacctgcggaagaagctggtggactccaccgacaaggccgacctgcggctgatctacctggccctggcccacatgatcaagttccggggccacttcctgatcgagggcgacctgaaccccgacaactccgacgtggacaagctgttcatccagctggtgcagacctacaaccagctgttcgaggagaaccccatcaacgcctccggcgtggacgccaaggccatcctgtccgcccggctgtccaagtcccggcggctggagaacctgatcgcccagctgcccggcgagaagaagaacggcctgttcggcaacctgatcgccctgtccctgggcctgacccccaacttcaagtccaacttcgacctggccgaggacgccaagctgcagctgtccaaggacacctacgacgacgacctggacaacctgctggcccagatcggcgaccagtacgccgacctgttcctggccgccaagaacctgtccgacgccatcctgctgtccgacatcctgcgggtgaacaccgagatcaccaaggcccccctgtccgcctccatgatcaagcggtacgacgagcaccaccaggacctgaccctgctgaaggccctggtgcggcagcagctgcccgagaagtacaaggagatcttcttcgaccagtccaagaacggctacgccggctacatcgacggcggcgcctcccaggaggagttctacaagttcatcaagcccatcctggagaagatggacggcaccgaggagctgctggtgaagctgaaccgggaggacctgctgcggaagcagcggaccttcgacaacggctccatcccccaccagatccacctgggcgagctgcacgccatcctgcggcggcaggaggacttctaccccttcctgaaggacaaccgggagaagatcgagaagatcctgaccttccggatcccctactacgtgggccccctggcccggggcaactcccggttcgcctggatgacccggaagtccgaggagaccatcaccccctggaacttcgaggaggtggtggacaagggcgcctccgcccagtccttcatcgagcggatgaccaacttcgacaagaacctgcccaacgagaaggtgctgcccaagcactccctgctgtacgagtacttcaccgtgtacaacgagctgaccaaggtgaagtacgtgaccgagggcatgcggaagcccgccttcctgtccggcgagcagaagaaggccatcgtggacctgctgttcaagaccaaccggaaggtgaccgtgaagcagctgaaggaggactacttcaagaagatcgagtgcttcgactccgtggagatctccggcgtggaggaccggttcaacgcctccctgggcacctaccacgacctgctgaagatcatcaaggacaaggacttcctggacaacgaggagaacgaggacatcctggaggacatcgtgctgaccctgaccctgttcgaggaccgggagatgatcgaggagcggctgaagacctacgcccacctgttcgacgacaaggtgatgaagcagctgaagcggcggcggtacaccggctggggccggctgtcccggaagctgatcaacggcatccgggacaagcagtccggcaagaccatcctggacttcctgaagtccgacggcttcgccaaccggaacttcatgcagctgatccacgacgactccctgaccttcaaggaggacatccagaaggcccaggtgtccggccagggcgactccctgcacgagcacatcgccaacctggccggctcccccgccatcaagaagggcatcctgcagaccgtgaaggtggtggacgagctggtgaaggtgatgggccggcacaagcccgagaacatcgtgatcgagatggcccgggagaaccagaccacccagaagggccagaagaactcccgggagcggatgaagcggatcgaggagggcatcaaggagctgggctcccagatcctgaaggagcaccccgtggagaacacccagctgcagaacgagaagctgtacctgtactacctgcagaacggccgggacatgtacgtggaccaggagctggacatcaaccggctgtccgactacgacgtggacgccatcgtgccccagtccttcctgaaggacgactccatcgacaacaaggtgctgacccggtccgacaagaaccggggcaagtccgacaacgtgccctccgaggaggtggtgaagaagatgaagaactactggcggcagctgctgaacgccaagctgatcacccagcggaagttcgacaacctgaccaaggccgagcggggcggcctgtccgagctggacaaggccggcttcatcaagcggcagctggtggagacccggcagatcaccaagcacgtggcccagatcctggactcccggatgaacaccaagtacgacgagaacgacaagctgatccgggaggtgaaggtgatcaccctgaagtccaagctggtgtccgacttccggaaggacttccagttctacaaggtgcgggagatcaacaactaccaccacgcccacgacgcctacctgaacgccgtggtgggcaccgccctgatcaagaagtaccccaagctggagtccgagttcgtgtacggcgactacaaggtgtacgacgtgcggaagatgatcgccaagtccgagcaggagatcggcaaggccaccgccaagtacttcttctactccaacatcatgaacttcttcaagaccgagatcaccctggccaacggcgagatccggaagcggcccctgatcgagaccaacggcgagaccggcgagatcgtgtgggacaagggccgggacttcgccaccgtgcggaaggtgctgtccatgccccaggtgaacatcgtgaagaagaccgaggtgcagaccggcggcttctccaaggagtccatcctgcccaagcggaactccgacaagctgatcgcccggaagaaggactgggaccccaagaagtacggcggcttcgactcccccaccgtggcctactccgtgctggtggtggccaaggtggagaagggcaagtccaagaagctgaagtccgtgaaggagctgctgggcatcaccatcatggagcggtcctccttcgagaagaaccccatcgacttcctggaggccaagggctacaaggaggtgaagaaggacctgatcatcaagctgcccaagtactccctgttcgagctggagaacggccggaagcggatgctggcctccgccggcgagctgcagaagggcaacgagctggccctgccctccaagtacgtgaacttcctgtacctggcctcccactacgagaagctgaagggctcccccgaggacaacgagcagaagcagctgttcgtggagcagcacaagcactacctggacgagatcatcgagcagatctccgagttctccaagcgggtgatcctggccgacgccaacctggacaaggtgctgtccgcctacaacaagcaccgggacaagcccatccgggagcaggccgagaacatcatccacctgttcaccctgaccaacctgggcgcccccgccgccttcaagtacttcgacaccaccatcgaccggaagcggtacacctccaccaaggaggtgctggacgccaccctgatccaccagtccatcaccggcctgtacgagacccggatcgacctgtcccagctgggcggcgacggcgcccccgagtccgccaccgagtccggcggcacctccaccgagtccgagggctccgccggccccaagaagaagcggaaggtgacctccaccgagtccgagggctccgccggctccgccggctccacctccggctcctcctccggcatgaagatcgccgtggtggacaaggccctgaacaacacccggtacgacaagcacttccagctgtacggcgaggaggtggacgtgttccacatgtgcaacgagaagctgtccggccggctgctgaagaagcacatcaccatcggcacccccgagaaccccttcgaccccaacgactacgacttcgtgatcctggtgggcgccgagcccttcctgtacttcgccggcaagaagggcatcggcgactacaccggcaagcgggtggagtacaacggctacgccaactggatcgcctccatctcccccgcccagctgcacttcaagcccgagatgaagcccgtgttcgacgccaccgtggagaacatccacgacatcatcaacggccgggagaagatcgccaaggccggcgactaccggcccatcaccgaccccgacgaggccgaggagtacatcaagatggtgtacaacatggtgatcggccccgtggccttcgcctccgccacctccgccctgtactgccgggacggctacctgctgggcgtgtccatctcccaccaggagtaccagggcgtgtacatcgactccgactgcctgaccgaggtggccgtgtactacctgcagaagatcctggactccgagaaccacaccatcgtgttccacaacctgaagttcgacatgcacttctacaagtaccacctgggcctgaccttcgacaaggcccacaaggagcggcggctgcacgacaccatgctgcagcactacgtgctggacgagcggcggggcacccacggcctgaagtccctggccatgaagtacaccgacatgggcgactacgacttcgagctggacaagttcaaggacgactactgcaaggcccacaagatcaagaaggaggacttcacctacgacctgatccccttcgacatcatgtggccctacgccgccaaggacaccgacgccaccatccggctgcacaacttcttcctgcccaagatcgagaagaacgagaagctgtgctccctgtactacgacgtgctgatgcccggctgcgtgttcctgcagcgggtggaggaccggggcgtgcccatctccatcgaccggctgaaggaggcccagtaccagctgacccacaacctgaacaaggcccgggagaagctgtacacctaccccgaggtgaagcagctggagcaggaccagaacgaggccttcaaccccaactccgtgaagcagctgcgggtgctgctgttcgactacgtgggcctgacccccaccggcaagctgaccgacaccggcgccgactccaccgacgccgaggccctgaacgagctggccacccagcaccccatcgccaagaccctgctggagatccggaagctgaccaagctgatctccacctacgtggagaagatcctgctgtccatcgacgccgacggctgcatccggaccggcttccacgagcacatgaccacctccggccggctgtcctcctccggcaagctgaacctgcagcagctgccccgggacgagtccatcatcaagggctgcgtggtggccccccccggctaccgggtgatcgcctgggacctgaccaccgccgaggtgtactacgccgccgtgctgtccggcgaccggaacatgcagcaggtgttcatcaacatgcggaacgagcccgacaagtaccccgacttccactccaacatcgcccacatggtgttcaagctgcagtgcgagccccgggacgtgaagaagctgttccccgccctgcggcaggccgccaaggccatcaccttcggcatcctgtacggctccggccccgccaaggtggcccactccgtgaacgaggccctgctggagcaggccgccaagaccggcgagcccttcgtggagtgcaccgtggccgacgccaaggagtacatcgagacctacttcggccagttcccccagctgaagcggtggatcgacaagtgccacgaccagatcaagaaccacggcttcatctactcccacttcggccggaagcggcggctgcacaacatccactccgaggaccggggcgtgcagggcgaggagatccggtccggcttcaacgccatcatccagtccgcctcctccgactccctgctgctgggcgccgtggacgccgacaacgagatcatctccctgggcctggagcaggagatgaagatcgtgatgctggtgcacgactccgtggtggccatcgtgcgggaggacctgatcgaccagtacaacgagatcctgatccggaacatccagaaggaccggggcatctccatccccggctgccccatcggcatcgactccgactccgaggccggcggctcccgggactactcctgcggcaagatgaagaagcagcacccctccatcgcctgcatcgacgacgacgagtacacccggtacgtgaagggcgtgctgctggacgccgagttcgagtacaagaagctggccgccatggacaaggagcaccccgaccactccaagtacaaggacgacaagttcatcgccgtgtgcaaggacctggacaacgtgaagcggatcctgggcgcctccggctccgagacccccggcacctccgagtccgccacccccgagtcccccaagaagaagcggaaggtgcctgccgctaagagagtgaagctggactccggctccgagacccccggcacctccgagtccgccacccccgagtccatcgccgccctggagaaggagatcgccgccctggagaaggagaacgccgccctggagtgggagatcgccgccctggagaagtagctagcaccagcctcaagaacacccgaatggagtctctaagctacataataccaacttacactttacaaaatgttgtcccccaaaatgtagccattcgtatctgctcctaataaaaagaaagtttcttcacattctctcgagaaaaaaaaaaaatggaaaaaaaaaaaacggaaaaaaaaaaaaggtaaaaaaaaaaaatataaaaaaaaaaaacataaaaaaaaaaaacgaaaaaaaaaaaacgtaaaaaaaaaaaactcaaaaaaaaaaaagataaaaaaaaaaaacctaaaaaaaaaaaatgtaaaaaaaaaaaagggaaaaaaaaaaaacgcaaaaaaaaaaaacacaaaaaaaaaaaatgcaaaaaaaaaaaatcgaaaaaaaaaaaatctaaaaaaaaaaaacgaaaaaaaaaaaacccaaaaaaaaaaaagacaaaaaaaaaaaatagaaaaaaaaaaagttaaaaaaaaaaaactgaaaaaaaaaaaatttaaaaaaaaaaaatctag

SEQ ID NO: 2530 - DNA, 7694 bp, synthetic construct
  misc_feature 1..7694: note = Synthetic
  source 1..7694: mol_type = other DNA
aggactcactatttgttttcgcgcccagttgcaaaaagtgtcgaagctcagaataaacgctcaactttggccggatctgccaccatgggcaagcggcccgccgccaccaagaaggccggccaggccaagaagaagaaggacaagaagtactccatcggcctggacatcggcaccaactccgtgggctgggccgtgatcaccgacgagtacaaggtgccctccaagaagttcaaggtgctgggcaacaccgaccggcactccatcaagaagaacctgatcggcgccctgctgttcgactccggcgagaccgccgaggccacccggctgaagcggaccgcccggcggcggtacacccggcggaagaaccggatctgctacctgcaggagatcttctccaacgagatggccaaggtggacgactccttcttccaccggctggaggagtccttcctggtggaggaggacaagaagcacgagcggcaccccatcttcggcaacatcgtggacgaggtggcctaccacgagaagtaccccaccatctaccacctgcggaagaagctggtggactccaccgacaaggccgacctgcggctgatctacctggccctggcccacatgatcaagttccggggccacttcctgatcgagggcgacctgaaccccgacaactccgacgtggacaagctgttcatccagctggtgcagacctacaaccagctgttcgaggagaaccccatcaacgcctccggcgtggacgccaaggccatcctgtccgcccggctgtccaagtcccggcggctggagaacctgatcgcccagctgcccggcgagaagaagaacggcctgttcggcaacctgatcgccctgtccctgggcctgacccccaacttcaagtccaacttcgacctggccgaggacgccaagctgcagctgtccaaggacacctacgacgacgacctggacaacctgctggcccagatcggcgaccagtacgccgacctgttcctggccgccaagaacctgtccgacgccatcctgctgtccgacatcctgcgggtgaacaccgagatcaccaaggcccccctgtccgcctccatgatcaagcggtacgacgagcaccaccaggacctgaccctgctgaaggccctggtgcggcagcagctgcccgagaagtacaaggagatcttcttcgaccagtccaagaacggctacgccggctacatcgacggcggcgcctcccaggaggagttctacaagttcatcaagcccatcctggagaagatggacggcaccgaggagctgctggtgaagctgaaccgggaggacctgctgcggaagcagcggaccttcgacaacggctccatcccccaccagatccacctgggcgagctgcacgccatcctgcggcggcaggaggacttctaccccttcctgaaggacaaccgggagaagatcgagaagatcctgaccttccggatcccctactacgtgggccccctggcccggggcaactcccggttcgcctggatgacccggaagtccgaggagaccatcaccccctggaacttcgaggaggtggtggacaagggcgcctccgcccagtccttcatcgagcggatgaccaacttcgacaagaacctgcccaacgagaaggtgctgcccaagcactccctgctgtacgagtacttcaccgtgtacaacgagctgaccaaggtgaagtacgtgaccgagggcatgcggaagcccgccttcctgtccggcgagcagaagaaggccatcgtggacctgctgttcaagaccaaccggaaggtgaccgtgaagcagctgaaggaggactacttcaagaagatcgagtgcttcgactccgtggagatctccggcgtggaggaccggttcaacgcctccctgggcacctaccacgacctgctgaagatcatcaaggacaaggacttcctggacaacgaggagaacgaggacatcctggaggacatcgtgctgaccctgaccctgttcgaggaccgggagatgatcgaggagcggctgaagacctacgcccacctgttcgacgacaaggtgatgaagcagctgaagcggcggcggtacaccggctggggccggctgtcccggaagctgatcaacggcatccgggacaagcagtccggcaagaccatcctggacttcctgaagtccgacggcttcgccaaccggaacttcatgcagctgatccacgacgactccctgaccttcaaggaggacatccagaaggcccaggtgtccggccagggcgactccctgcacgagcacatcgccaacctggccggctcccccgccatcaagaagggcatcctgcagaccgtgaaggtggtggacgagctggtgaaggtgatgggccggcacaagcccgagaacatcgtgatcgagatggcccgggagaaccagaccacccagaagggccagaagaactcccgggagcggatgaagcggatcgaggagggcatcaaggagctgggctcccagatcctgaaggagcaccccgtggagaacacccagctgcagaacgagaagctgtacctgtactacctgcagaacggccgggacatgtacgtggaccaggagctggacatcaaccggctgtccgactacgacgtggacgccatcgtgccccagtccttcctgaaggacgactccatcgacaacaaggtgctgacccggtccgacaagaaccggggcaagtccgacaacgtgccctccgaggaggtggtgaagaagatgaagaactactggcggcagctgctgaacgccaagctgatcacccagcggaagttcgacaacctgaccaaggccgagcggggcggcctgtccgagctggacaaggccggcttcatcaagcggcagctggtggagacccggcagatcaccaagcacgtggcccagatcctggactcccggatgaacaccaagtacgacgagaacgacaagctgatccgggaggtgaaggtgatcaccctgaagtccaagctggtgtccgacttccggaaggacttccagttctacaaggtgcgggagatcaacaactaccaccacgcccacgacgcctacctgaacgccgtggtgggcaccgccctgatcaagaagtaccccaagctggagtccgagttcgtgtacggcgactacaaggtgtacgacgtgcggaagatgatcgccaagtccgagcaggagatcggcaaggccaccgccaagtacttcttctactccaacatcatgaacttcttcaagaccgagatcaccctggccaacggcgagatccggaagcggcccctgatcgagaccaacggcgagaccggcgagatcgtgtgggacaagggccgggacttcgccaccgtgcggaaggtgctgtccatgccccaggtgaacatcgtgaagaagaccgaggtgcagaccggcggcttctccaaggagtccatcctgcccaagcggaactccgacaagctgatcgcccggaagaaggactgggaccccaagaagtacggcggcttcgactcccccaccgtggcctactccgtgctggtggtggccaaggtggagaagggcaagtccaagaagctgaagtccgtgaaggagctgctgggcatcaccatcatggagcggtcctccttcgagaagaaccccatcgacttcctggaggccaagggctacaaggaggtgaagaaggacctgatcatcaagctgcccaagtactccctgttcgagctggagaacggccggaagcggatgctggcctccgccggcgagctgcagaagggcaacgagctggccctgccctccaagtacgtgaacttcctgtacctggcctcccactacgagaagctgaagggctcccccgaggacaacgagcagaagcagctgttcgtggagcagcacaagcactacctggacgagatcatcgagcagatctccgagttctccaagcgggtgatcctggccgacgccaacctggacaaggtgctgtccgcctacaacaagcaccgggacaagcccatccgggagcaggccgagaacatcatccacctgttcaccctgaccaacctgggcgcccccgccgccttcaagtacttcgacaccaccatcgaccggaagcggtacacctccaccaaggaggtgctggacgccaccctgatccaccagtccatcaccggcctgtacgagacccggatcgacctgtcccagctgggcggcgacggcgcccccgagtccgccaccgagtccggcggcacctccaccgagtccgagggctccgccggccccaagaagaagcggaaggtgacctccaccgagtccgagggctccgccggctccgccggctccacctccggctcctcctccggcatgaagatcgccgtggtggacaaggccctgaacaacacccggtacgacaagcacttccagctgtacggcgaggaggtggacgtgttccacatgtgcaacgagaagctgtccggccggctgctgaagaagcacatcaccatcggcacccccgagaaccccttcgaccccaacgactacgacttcgtgatcctggtgggcgccgagcccttcctgtacttcgccggcaagaagggcatcggcgactacaccggcaagcgggtggagtacaacggctacgccaactggatcgcctccatctcccccgcccagctgcacttcaagcccgagatgaagcccgtgttcgacgccaccgtggagaacatccacgacatcatcaacggccgggagaagatcgccaaggccggcgactaccggcccatcaccgaccccgacgaggccgaggagtacatcaagatggtgtacaacatggtgatcggccccgtggccttcgcctccgccacctccgccctgtactgccgggacggctacctgctgggcgtgtccatctcccaccaggagtaccagggcgtgtacatcgactccgactgcctgaccgaggtggccgtgtactacctgcagaagatcctggactccgagaaccacaccatcgtgttccacaacctgaagttcgacatgcacttctacaagtaccacctgggcctgaccttcgacaaggcccacaaggagcggcggctgcacgacaccatgctgcagcactacgtgctggacgagcggcggggcacccacggcctgaagtccctggccatgaagtacaccgacatgggcgactacgacttcgagctggacaagttcaaggacgactactgcaaggcccacaagatcaagaaggaggacttcacctacgacctgatccccttcgacatcatgtggccctacgccgccaaggacaccgacgccaccatccggctgcacaacttcttcctgcccaagatcgagaagaacgagaagctgtgctccctgtactacgacgtgctgatgcccggctgcgtgttcctgcagcgggtggaggaccggggcgtgcccatctccatcgaccggctgaaggaggcccagtaccagctgacccacaacctgaacaaggcccgggagaagctgtacacctaccccgaggtgaagcagctggagcaggaccagaacgaggccttcaaccccaactccgtgaagcagctgcgggtgctgctgttcgactacgtgggcctgacccccaccggcaagctgaccgacaccggcgccgactccaccgacgccgaggccctgaacgagctggccacccagcaccccatcgccaagaccctgctggagatccggaagctgaccaagctgatctccacctacgtggagaagatcctgctgtccatcgacgccgacggctgcatccggaccggcttccacgagcacatgaccacctccggccggctgtcctcctccggcaagctgaacctgcagcagctgccccgggacgagtccatcatcaagggctgcgtggtggccccccccggctaccgggtgatcgcctgggacctgaccaccgccgaggtgtactacgccgccgtgctgtccggcgaccggaacatgcagcaggtgttcatcaacatgcggaacgagcccgacaagtaccccgacttccactccaacatcgcccacatggtgttcaagctgcagtgcgagccccgggacgtgaagaagctgttccccgccctgcggcaggccgccaaggccatcaccttcggcatcctgtacggctccggccccgccaaggtggcccactccgtgaacgaggccctgctggagcaggccgccaagaccggcgagcccttcgtggagtgcaccgtggccgacgccaaggagtacatcgagacctacttcggccagttcccccagctgaagcggtggatcgacaagtgccacgaccagatcaagaaccacggcttcatctactcccacttcggccggaagcggcggctgcacaacatccactccgaggaccggggcgtgcagggcgaggagatccggtccggcttcaacgccatcatccagtccgcctcctccgactccctgctgctgggcgccgtggacgccgacaacgagatcatctccctgggcctggagcaggagatgaagatcgtgatgctggtgcacgactccgtggtggccatcgtgcgggaggacctgatcgaccagtacaacgagatcctgatccggaacatccagaaggaccggggcatctccatccccggctgccccatcggcatcgactccgactccgaggccggcggctcccgggactactcctgcggcaagatgaagaagcagcacccctccatcgcctgcatcgacgacgacgagtacacccggtacgtgaagggcgtgctgctggacgccgagttcgagtacaagaagctggccgccatggacaaggagcaccccgaccactccaagtacaaggacgacaagttcatcgccgtgtgcaaggacctggacaacgtgaagcggatcctgggcgcctccggctccgagacccccggcacctccgagtccgccacccccgagtccatcgccgccctggagaaggagatcgccgccctggagaaggagaacgccgccctggagtgggagatcgccgccctggagaagtccggctccgagacccccggcacctccgagtccgccacccccgagtcccccaagaagaagcggaaggtgcctgccgctaagagagtgaagctggactagctagcaccagcctcaagaacacccgaatggagtctctaagctacataataccaacttacactttacaaaatgttgtcccccaaaatgtagccattcgtatctgctcctaataaaaagaaagtttcttcacattctctcgagaaaaaaaaaaaatggaaaaaaaaaaaacggaaaaaaaaaaaaggtaaaaaaaaaaaatataaaaaaaaaaaacataaaaaaaaaaaacgaaaaaaaaaaaacgtaaaaaaaaaaaactcaaaaaaaaaaaagataaaaaaaaaaaacctaaaaaaaaaaaatgtaaaaaaaaaaaagggaaaaaaaaaaaacgcaaaaaaaaaaaacacaaaaaaaaaaaatgcaaaaaaaaaaaatcgaaaaaaaaaaaatctaaaaaaaaaaaacgaaaaaaaaaaaacccaaaaaaaaaaaagacaaaaaaaaaaaatagaaaaaaaaaaagttaaaaaaaaaaaactgaaaaaaaaaaaatttaaaaaaaaaaaatctag

SEQ ID NO: 2531 - DNA, 7562 bp, synthetic construct
  misc_feature 1..7562: note = Synthetic
  source 1..7562: mol_type = other DNA
aggactcactatttgttttcgcgcccagttgcaaaaagtgtcgaagctcagaataaacgctcaactttggccggatctgccaccatgggcaagcggcccgccgccaccaagaaggccggccaggccaagaagaagaaggacaagaagtactccatcggcctggacatcggcaccaactccgtgggctgggccgtgatcaccgacgagtacaaggtgccctccaagaagttcaaggtgctgggcaacaccgaccggcactccatcaagaagaacctgatcggcgccctgctgttcgactccggcgagaccgccgaggccacccggctgaagcggaccgcccggcggcggtacacccggcggaagaaccggatctgctacctgcaggagatcttctccaacgagatggccaaggtggacgactccttcttccaccggctggaggagtccttcctggtggaggaggacaagaagcacgagcggcaccccatcttcggcaacatcgtggacgaggtggcctaccacgagaagtaccccaccatctaccacctgcggaagaagctggtggactccaccgacaaggccgacctgcggctgatctacctggccctggcccacatgatcaagttccggggccacttcctgatcgagggcgacctgaaccccgacaactccgacgtggacaagctgttcatccagctggtgcagacctacaaccagctgttcgaggagaaccccatcaacgcctccggcgtggacgccaaggccatcctgtccgcccggctgtccaagtcccggcggctggagaacctgatcgcccagctgcccggcgagaagaagaacggcctgttcggcaacctgatcgccctgtccctgggcctgacccccaacttcaagtccaacttcgacctggccgaggacgccaagctgcagctgtccaaggacacctacgacgacgacctggacaacctgctggcccagatcggcgaccagtacgccgacctgttcctggccgccaagaacctgtccgacgccatcctgctgtccgacatcctgcgggtgaacaccgagatcaccaaggcccccctgtccgcctccatgatcaagcggtacgacgagcaccaccaggacctgaccctgctgaaggccctggtgcggcagcagctgcccgagaagtacaaggagatcttcttcgaccagtccaagaacggctacgccggctacatcgacggcggcgcctcccaggaggagttctacaagttcatcaagcccatcctggagaagatggacggcaccgaggagctgctggtgaagctgaaccgggaggacctgctgcggaagcagcggaccttcgacaacggctccatcccccaccagatccacctgggcgagctgcacgccatcctgcggcggcaggaggacttctaccccttcctgaaggacaaccgggagaagatcgagaagatcctgaccttccggatcccctactacgtgggccccctggcccggggcaactcccggttcgcctggatgacccggaagtccgaggagaccatcaccccctggaacttcgaggaggtggtggacaagggcgcctccgcccagtccttcatcgagcggatgaccaacttcgacaagaacctgcccaacgagaaggtgctgcccaagcactccctgctgtacgagtacttcaccgtgtacaacgagctgaccaaggtgaagtacgtgaccgagggcatgcggaagcccgccttcctgtccggcgagcagaagaaggccatcgtggacctgctgttcaagaccaaccggaaggtgaccgtgaagcagctgaaggaggactacttcaagaagatcgagtgcttcgactccgtggagatctccggcgtggaggaccggttcaacgcctccctgggcacctaccacgacctgctgaagatcatcaaggacaaggacttcctggacaacgaggagaacgaggacatcctggaggacatcgtgctgaccctgaccctgttcgaggaccgggagatgatcgaggagcggctgaagacctacgcccacctgttcgacgacaaggtgatgaagcagctgaagcggcggcggtacaccggctggggccggctgtcccggaagctgatcaacggcatccgggacaagcagtccggcaagaccatcctggacttcctgaagtccgacggcttcgccaaccggaacttcatgcagctgatccacgacgactccctgaccttcaaggaggacatccagaaggcccaggtgtccggccagggcgactccctgcacgagcacatcgccaacctggccggctcccccgccatcaagaagggcatcctgcagaccgtgaaggtggtggacgagctggtgaaggtgatgggccggcacaagcccgagaacatcgtgatcgagatggcccgggagaaccagaccacccagaagggccagaagaactcccgggagcggatgaagcggatcgaggagggcatcaaggagctgggctcccagatcctgaaggagcaccccgtggagaacacccagctgcagaacgagaagctgtacctgtactacctgcagaacggccgggacatgtacgtggaccaggagctggacatcaaccggctgtccgactacgacgtggacgccatcgtgccccagtccttcctgaaggacgactccatcgacaacaaggtgctgacccggtccgacaagaaccggggcaagtccgacaacgtgccctccgaggaggtggtgaagaagatgaagaactactggcggcagctgctgaacgccaagctgatcacccagcggaagttcgacaacctgaccaaggccgagcggggcggcctgtccgagctggacaaggccggcttcatcaagcggcagctggtggagacccggcagatcaccaagcacgtggcccagatcctggactcccggatgaacaccaagtacgacgagaacgacaagctgatccgggaggtgaaggtgatcaccctgaagtccaagctggtgtccgacttccggaaggacttccagttctacaaggtgcgggagatcaacaactaccaccacgcccacgacgcctacctgaacgccgtggtgggcaccgccctgatcaagaagtaccccaagctggagtccgagttcgtgtacggcgactacaaggtgtacgacgtgcggaagatgatcgccaagtccgagcaggagatcggcaaggccaccgccaagtacttcttctactccaacatcatgaacttcttcaagaccgagatcaccctggccaacggcgagatccggaagcggcccctgatcgagaccaacggcgagaccggcgagatcgtgtgggacaagggccgggacttcgccaccgtgcggaaggtgctgtccatgccccaggtgaacatcgtgaagaagaccgaggtgcagaccggcggcttctccaaggagtccatcctgcccaagcggaactccgacaagctgatcgcccggaagaaggactgggaccccaagaagtacggcggcttcgactcccccaccgtggcctactccgtgctggtggtggccaaggtggagaagggcaagtccaagaagctgaagtccgtgaaggagctgctgggcatcaccatcatggagcggtcctccttcgagaagaaccccatcgacttcctggaggccaagggctacaaggaggtgaagaaggacctgatcatcaagctgcccaagtactccctgttcgagctggagaacggccggaagcggatgctggcctccgccggcgagctgcagaagggcaacgagctggccctgccctccaagtacgtgaacttcctgtacctggcctcccactacgagaagctgaagggctcccccgaggacaacgagcagaagcagctgttcgtggagcagcacaagcactacctggacgagatcatcgagcagatctccgagttctccaagcgggtgatcctggccgacgccaacctggacaaggtgctgtccgcctacaacaagcaccgggacaagcccatccgggagcaggccgagaacatcatccacctgttcaccctgaccaacctgggcgcccccgccgccttcaagtacttcgacaccaccatcgaccggaagcggtacacctccaccaaggaggtgctggacgccaccctgatccaccagtccatcaccggcctgtacgagacccggatcgacctgtcccagctgggcggcgacggcaccaaggactccaccaaggacatccccgagaccccctccaaggacggcaccaaggactccaccaaggacatccccgagaccccctccaaggacggcaccaaggactccaccaaggacatccccgagaccccctccaaggacatgaagatcgccgtggtggacaaggccctgaacaacacccggtacgacaagcacttccagctgtacggcgaggaggtggacgtgttccacatgtgcaacgagaagctgtccggccggctgctgaagaagcacatcaccatcggcacccccgagaaccccttcgaccccaacgactacgacttcgtgatcctggtgggcgccgagcccttcctgtacttcgccggcaagaagggcatcggcgactacaccggcaagcgggtggagtacaacggctacgccaactggatcgcctccatctcccccgcccagctgcacttcaagcccgagatgaagcccgtgttcgacgccaccgtggagaacatccacgacatcatcaacggccgggagaagatcgccaaggccggcgactaccggcccatcaccgaccccgacgaggccgaggagtacatcaagatggtgtacaacatggtgatcggccccgtggccttcgcctccgccacctccgccctgtactgccgggacggctacctgctgggcgtgtccatctcccaccaggagtaccagggcgtgtacatcgactccgactgcctgaccgaggtggccgtgtactacctgcagaagatcctggactccgagaaccacaccatcgtgttccacaacctgaagttcgacatgcacttctacaagtaccacctgggcctgaccttcgacaaggcccacaaggagcggcggctgcacgacaccatgctgcagcactacgtgctggacgagcggcggggcacccacggcctgaagtccctggccatgaagtacaccgacatgggcgactacgacttcgagctggacaagttcaaggacgactactgcaaggcccacaagatcaagaaggaggacttcacctacgacctgatccccttcgacatcatgtggccctacgccgccaaggacaccgacgccaccatccggctgcacaacttcttcctgcccaagatcgagaagaacgagaagctgtgctccctgtactacgacgtgctgatgcccggctgcgtgttcctgcagcgggtggaggaccggggcgtgcccatctccatcgaccggctgaaggaggcccagtaccagctgacccacaacctgaacaaggcccgggagaagctgtacacctaccccgaggtgaagcagctggagcaggaccagaacgaggccttcaaccccaactccgtgaagcagctgcgggtgctgctgttcgactacgtgggcctgacccccaccggcaagctgaccgacaccggcgccgactccaccgacgccgaggccctgaacgagctggccacccagcaccccatcgccaagaccctgctggagatccggaagctgaccaagctgatctccacctacgtggagaagatcctgctgtccatcgacgccgacggctgcatccggaccggcttccacgagcacatgaccacctccggccggctgtcctcctccggcaagctgaacctgcagcagctgccccgggacgagtccatcatcaagggctgcgtggtggccccccccggctaccgggtgatcgcctgggacctgaccaccgccgaggtgtactacgccgccgtgctgtccggcgaccggaacatgcagcaggtgttcatcaacatgcggaacgagcccgacaagtaccccgacttccactccaacatcgcccacatggtgttcaagctgcagtgcgagccccgggacgtgaagaagctgttccccgccctgcggcaggccgccaaggccatcaccttcggcatcctgtacggctccggccccgccaaggtggcccactccgtgaacgaggccctgctggagcaggccgccaagaccggcgagcccttcgtggagtgcaccgtggccgacgccaaggagtacatcgagacctacttcggccagttcccccagctgaagcggtggatcgacaagtgccacgaccagatcaagaaccacggcttcatctactcccacttcggccggaagcggcggctgcacaacatccactccgaggaccggggcgtgcagggcgaggagatccggtccggcttcaacgccatcatccagtccgcctcctccgactccctgctgctgggcgccgtggacgccgacaacgagatcatctccctgggcctggagcaggagatgaagatcgtgatgctggtgcacgactccgtggtggccatcgtgcgggaggacctgatcgaccagtacaacgagatcctgatccggaacatccagaaggaccggggcatctccatccccggctgccccatcggcatcgactccgactccgaggccggcggctcccgggactactcctgcggcaagatgaagaagcagcacccctccatcgcctgcatcgacgacgacgagtacacccggtacgtgaagggcgtgctgctggacgccgagttcgagtacaagaagctggccgccatggacaaggagcaccccgaccactccaagtacaaggacgacaagttcatcgccgtgtgcaaggacctggacaacgtgaagcggatcctgggcgcctccggctccgagacccccggcacctccgagtccgccacccccgagtcccccaagaagaagcggaaggtgcctgccgctaagagagtgaagctggactagctagcaccagcctcaagaacacccgaatggagtctctaagctacataataccaacttacactttacaaaatgttgtcccccaaaatgtagccattcgtatctgctcctaataaaaagaaagtttcttcacattctctcgagaaaaaaaaaaaatggaaaaaaaaaaaacggaaaaaaaaaaaaggtaaaaaaaaaaaatataaaaaaaaaaaacataaaaaaaaaaaacgaaaaaaaaaaaacgtaaaaaaaaaaaactcaaaaaaaaaaaagataaaaaaaaaaaacctaaaaaaaaaaaatgtaaaaaaaaaaaagggaaaaaaaaaaaacgcaaaaaaaaaaaacacaaaaaaaaaaaatgcaaaaaaaaaaaatcgaaaaaaaaaaaatctaaaaaaaaaaaacgaaaaaaaaaaaacccaaaaaaaaaaaagacaaaaaaaaaaaatagaaaaaaaaaaagttaaaaaaaaaaaactgaaaaaaaaaaaatttaaaaaaaaaaaatctag

SEQ ID NO: 2532 - DNA, 7691 bp, synthetic construct
  misc_feature 1..7691: note = Synthetic
  source 1..7691: mol_type = other DNA
aggactcactatttgttttcgcgcccagttgcaaaaagtgtcgaagctcagaataaacgctcaactttggccggatctgccaccatgggcaagcggcccgccgccaccaagaaggccggccaggccaagaagaagaaggacaagaagtactccatcggcctggacatcggcaccaactccgtgggctgggccgtgatcaccgacgagtacaaggtgccctccaagaagttcaaggtgctgggcaacaccgaccggcactccatcaagaagaacctgatcggcgccctgctgttcgactccggcgagaccgccgaggccacccggctgaagcggaccgcccggcggcggtacacccggcggaagaaccggatctgctacctgcaggagatcttctccaacgagatggccaaggtggacgactccttcttccaccggctggaggagtccttcctggtggaggaggacaagaagcacgagcggcaccccatcttcggcaacatcgtggacgaggtggcctaccacgagaagtaccccaccatctaccacctgcggaagaagctggtggactccaccgacaaggccgacctgcggctgatctacctggccctggcccacatgatcaagttccggggccacttcctgatcgagggcgacctgaaccccgacaactccgacgtggacaagctgttcatccagctggtgcagacctacaaccagctgttcgaggagaaccccatcaacgcctccggcgtggacgccaaggccatcctgtccgcccggctgtccaagtcccggcggctggagaacctgatcgcccagctgcccggcgagaagaagaacggcctgttcggcaacctgatcgccctgtccctgggcctgacccccaacttcaagtccaacttcgacctggccgaggacgccaagctgcagctgtccaaggacacctacgacgacgacctggacaacctgctggcccagatcggcgaccagtacgccgacctgttcctggccgccaagaacctgtccgacgccatcctgctgtccgacatcctgcgggtgaacaccgagatcaccaaggcccccctgtccgcctccatgatcaagcggtacgacgagcaccaccaggacctgaccctgctgaaggccctggtgcggcagcagctgcccgagaagtacaaggagatcttcttcgaccagtccaagaacggctacgccggctacatcgacggcggcgcctcccaggaggagttctacaagttcatcaagcccatcctggagaagatggacggcaccgaggagctgctggtgaagctgaaccgggaggacctgctgcggaagcagcggaccttcgacaacggctccatcccccaccagatccacctgggcgagctgcacgccatcctgcggcggcaggaggacttctaccccttcctgaaggacaaccgggagaagatcgagaagatcctgaccttccggatcccctactacgtgggccccctggcccggggcaactcccggttcgcctggatgacccggaagtccgaggagaccatcaccccctggaacttcgaggaggtggtggacaagggcgcctccgcccagtccttcatcgagcggatgaccaacttcgacaagaacctgcccaacgagaaggtgctgcccaagcactccctgctgtacgagtacttcaccgtgtacaacgagctgaccaaggtgaagtacgtgaccgagggcatgcggaagcccgccttcctgtccggcgagcagaagaaggccatcgtggacctgctgttcaagaccaaccggaaggtgaccgtgaagcagctgaaggaggactacttcaagaagatcgagtgcttcgactccgtggagatctccggcgtggaggaccggttcaacgcctccctgggcacctaccacgacctgctgaagatcatcaaggacaaggacttcctggacaacgaggagaacgaggacatcctggaggacatcgtgctgaccctgaccctgttcgaggaccgggagatgatcgaggagcggctgaagacctacgcccacctgttcgacgacaaggtgatgaagcagctgaagcggcggcggtacaccggctggggccggctgtcccggaagctgatcaacggcatccgggacaagcagtccggcaagaccatcctggacttcctgaagtccgacggcttcgccaaccggaacttcatgcagctgatccacgacgactccctgaccttcaaggaggacatccagaaggcccaggtgtccggccagggcgactccctgcacgagcacatcgccaacctggccggctcccccgccatcaagaagggcatcctgcagaccgtgaaggtggtggacgagctggtgaaggtgatgggccggcacaagcccgagaacatcgtgatcgagatggcccgggagaaccagaccacccagaagggccagaagaactcccgggagcggatgaagcggatcgaggagggcatcaaggagctgggctcccagatcctgaaggagcaccccgtggagaacacccagctgcagaacgagaagctgtacctgtactacctgcagaacggccgggacatgtacgtggaccaggagctggacatcaaccggctgtccgactacgacgtggacgccatcgtgccccagtccttcctgaaggacgactccatcgacaacaaggtgctgacccggtccgacaagaaccggggcaagtccgacaacgtgccctccgaggaggtggtgaagaagatgaagaactactggcggcagctgctgaacgccaagctgatcacccagcggaagttcgacaacctgaccaaggccgagcggggcggcctgtccgagctggacaaggccggcttcatcaagcggcagctggtggagacccggcagatcaccaagcacgtggcccagatcctggactcccggatgaacaccaagtacgacgagaacgacaagctgatccgggaggtgaaggtgatcaccctgaagtccaagctggtgtccgacttccggaaggacttccagttctacaaggtgcgggagatcaacaactaccaccacgcccacgacgcctacctgaacgccgtggtgggcaccgccctgatcaagaagtaccccaagctggagtccgagttcgtgtacggcgactacaaggtgtacgacgtgcggaagatgatcgccaagtccgagcaggagatcggcaaggccaccgccaagtacttcttctactccaacatcatgaacttcttcaagaccgagatcaccctggccaacggcgagatccggaagcggcccctgatcgagaccaacggcgagaccggcgagatcgtgtgggacaagggccgggacttcgccaccgtgcggaaggtgctgtccatgccccaggtgaacatcgtgaagaagaccgaggtgcagaccggcggcttctccaaggagtccatcctgcccaagcggaactccgacaagctgatcgcccggaagaaggactgggaccccaagaagtacggcggcttcgactcccccaccgtggcctactccgtgctggtggtggccaaggtggagaagggcaagtccaagaagctgaagtccgtgaaggagctgctgggcatcaccatcatggagcggtcctccttcgagaagaaccccatcgacttcctggaggccaagggctacaaggaggtgaagaaggacctgatcatcaagctgcccaagtactccctgttcgagctggagaacggccggaagcggatgctggcctccgccggcgagctgcagaagggcaacgagctggccctgccctccaagtacgtgaacttcctgtacctggcctcccactacgagaagctgaagggctcccccgaggacaacgagcagaagcagctgttcgtggagcagcacaagcactacctggacgagatcatcgagcagatctccgagttctccaagcgggtgatcctggccgacgccaacctggacaaggtgctgtccgcctacaacaagcaccgggacaagcccatccgggagcaggccgagaacatcatccacctgttcaccctgaccaacctgggcgcccccgccgccttcaagtacttcgacaccaccatcgaccggaagcggtacacctccaccaaggaggtgctggacgccaccctgatccaccagtccatcaccggcctgtacgagacccggatcgacctgtcccagctgggcggcgacggcaccaaggactccaccaaggacatccccgagaccccctccaaggacggcaccaaggactccaccaaggacatccccgagaccccctccaaggacggcaccaaggactccaccaaggacatccccgagaccccctccaaggacatgaagatcgccgtggtggacaaggccctgaacaacacccggtacgacaagcacttccagctgtacggcgaggaggtggacgtgttccacatgtgcaacgagaagctgtccggccggctgctgaagaagcacatcaccatcggcacccccgagaaccccttcgaccccaacgactacgacttcgtgatcctggtgggcgccgagcccttcctgtacttcgccggcaagaagggcatcggcgactacaccggcaagcgggtggagtacaacggctacgccaactggatcgcctccatctcccccgcccagctgcacttcaagcccgagatgaagcccgtgttcgacgccaccgtggagaacatccacgacatcatcaacggccgggagaagatcgccaaggccggcgactaccggcccatcaccgaccccgacgaggccgaggagtacatcaagatggtgtacaacatggtgatcggccccgtggccttcgcctccgccacctccgccctgtactgccgggacggctacctgctgggcgtgtccatctcccaccaggagtaccagggcgtgtacatcgactccgactgcctgaccgaggtggccgtgtactacctgcagaagatcctggactccgagaaccacaccatcgtgttccacaacctgaagttcgacatgcacttctacaagtaccacctgggcctgaccttcgacaaggcccacaaggagcggcggctgcacgacaccatgctgcagcactacgtgctggacgagcggcggggcacccacggcctgaagtccctggccatgaagtacaccgacatgggcgactacgacttcgagctggacaagttcaaggacgactactgcaaggcccacaagatcaagaaggaggacttcacctacgacctgatccccttcgacatcatgtggccctacgccgccaaggacaccgacgccaccatccggctgcacaacttcttcctgcccaagatcgagaagaacgagaagctgtgctccctgtactacgacgtgctgatgcccggctgcgtgttcctgcagcgggtggaggaccggggcgtgcccatctccatcgaccggctgaaggaggcccagtaccagctgacccacaacctgaacaaggcccgggagaagctgtacacctaccccgaggtgaagcagctggagcaggaccagaacgaggccttcaaccccaactccgtgaagcagctgcgggtgctgctgttcgactacgtgggcctgacccccaccggcaagctgaccgacaccggcgccgactccaccgacgccgaggccctgaacgagctggccacccagcaccccatcgccaagaccctgctggagatccggaagctgaccaagctgatctccacctacgtggagaagatcctgctgtccatcgacgccgacggctgcatccggaccggcttccacgagcacatgaccacctccggccggctgtcctcctccggcaagctgaacctgcagcagctgccccgggacgagtccatcatcaagggctgcgtggtggccccccccggctaccgggtgatcgcctgggacctgaccaccgccgaggtgtactacgccgccgtgctgtccggcgaccggaacatgcagcaggtgttcatcaacatgcggaacgagcccgacaagtaccccgacttccactccaacatcgcccacatggtgttcaagctgcagtgcgagccccgggacgtgaagaagctgttccccgccctgcggcaggccgccaaggccatcaccttcggcatcctgtacggctccggccccgccaaggtggcccactccgtgaacgaggccctgctggagcaggccgccaagaccggcgagcccttcgtggagtgcaccgtggccgacgccaaggagtacatcgagacctacttcggccagttcccccagctgaagcggtggatcgacaagtgccacgaccagatcaagaaccacggcttcatctactcccacttcggccggaagcggcggctgcacaacatccactccgaggaccggggcgtgcagggcgaggagatccggtccggcttcaacgccatcatccagtccgcctcctccgactccctgctgctgggcgccgtggacgccgacaacgagatcatctccctgggcctggagcaggagatgaagatcgtgatgctggtgcacgactccgtggtggccatcgtgcgggaggacctgatcgaccagtacaacgagatcctgatccggaacatccagaaggaccggggcatctccatccccggctgccccatcggcatcgactccgactccgaggccggcggctcccgggactactcctgcggcaagatgaagaagcagcacccctccatcgcctgcatcgacgacgacgagtacacccggtacgtgaagggcgtgctgctggacgccgagttcgagtacaagaagctggccgccatggacaaggagcaccccgaccactccaagtacaaggacgacaagttcatcgccgtgtgcaaggacctggacaacgtgaagcggatcctgggcgcctccggctccgagacccccggcacctccgagtccgccacccccgagtcccccaagaagaagcggaaggtgcctgccgctaagagagtgaagctggactccggctccgagacccccggcacctccgagtccgccacccccgagtccatcgccgccctggagaaggagatcgccgccctggagaaggagaacgccgccctggagtgggagatcgccgccctggagaagtagctagcaccagcctcaagaacacccgaatggagtctctaagctacataataccaacttacactttacaaaatgttgtcccccaaaatgtagccattcgtatctgctcctaataaaaagaaagtttcttcacattctctcgagaaaaaaaaaaaatggaaaaaaaaaaaacggaaaaaaaaaaaaggtaaaaaaaaaaaatataaaaaaaaaaaacataaaaaaaaaaaacgaaaaaaaaaaaacgtaaaaaaaaaaaactcaaaaaaaaaaaagataaaaaaaaaaaacctaaaaaaaaaaaatgtaaaaaaaaaaaagggaaaaaaaaaaaacgcaaaaaaaaaaaacacaaaaaaaaaaaatgcaaaaaaaaaaaatcgaaaaaaaaaaaatctaaaaaaaaaaaacgaaaaaaaaaaaacccaaaaaaaaaaaagacaaaaaaaaaaaatagaaaaaaaaaaagttaaaaaaaaaaaactgaaaaaaaaaaaatttaaaaaaaaaaaatctag

SEQ ID NO: 2533 - DNA, 7585 bp, synthetic construct
  misc_feature 1..7585: note = Synthetic
  source 1..7585: mol_type = other DNA
aggactcactatttgttttcgcgcccagttgcaaaaagtgtcgaaaaaaaaaaaaccaaaaaaaaaaaacaaaaaaaaaaaataattgactaaaagctcagaataaacgctcaactttggccggatctgccaccatgaagcggcccgccgccaccaagaaggccggccaggccaagaagaagaaggacaagaagtactccatcggcctggacatcggcaccaactccgtgggctgggccgtgatcaccgacgagtacaaggtgccctccaagaagttcaaggtgctgggcaacaccgaccggcactccatcaagaagaacctgatcggcgccctgctgttcgactccggcgagaccgccgaggccacccggctgaagcggaccgcccggcggcggtacacccggcggaagaaccggatctgctacctgcaggagatcttctccaacgagatggccaaggtggacgactccttcttccaccggctggaggagtccttcctggtggaggaggacaagaagcacgagcggcaccccatcttcggcaacatcgtggacgaggtggcctaccacgagaagtaccccaccatctaccacctgcggaagaagctggtggactccaccgacaaggccgacctgcggctgatctacctggccctggcccacatgatcaagttccggggccacttcctgatcgagggcgacctgaaccccgacaactccgacgtggacaagctgttcatccagctggtgcagacctacaaccagctgttcgaggagaaccccatcaacgcctccggcgtggacgccaaggccatcctgtccgcccggctgtccaagtcccggcggctggagaacctgatcgcccagctgcccggcgagaagaagaacggcctgttcggcaacctgatcgccctgtccctgggcctgacccccaacttcaagtccaacttcgacctggccgaggacgccaagctgcagctgtccaaggacacctacgacgacgacctggacaacctgctggcccagatcggcgaccagtacgccgacctgttcctggccgccaagaacctgtccgacgccatcctgctgtccgacatcctgcgggtgaacaccgagatcaccaaggcccccctgtccgcctccatgatcaagcggtacgacgagcaccaccaggacctgaccctgctgaaggccctggtgcggcagcagctgcccgagaagtacaaggagatcttcttcgaccagtccaagaacggctacgccggctacatcgacggcggcgcctcccaggaggagttctacaagttcatcaagcccatcctggagaagatggacggcaccgaggagctgctggtgaagctgaaccgggaggacctgctgcggaagcagcggaccttcgacaacggctccatcccccaccagatccacctgggcgagctgcacgccatcctgcggcggcaggaggacttctaccccttcctgaaggacaaccgggagaagatcgagaagatcctgaccttccggatcccctactacgtgggccccctggcccggggcaactcccggttcgcctggatgacccggaagtccgaggagaccatcaccccctggaacttcgaggaggtggtggacaagggcgcctccgcccagtccttcatcgagcggatgaccaacttcgacaagaacctgcccaacgagaaggtgctgcccaagcactccctgctgtacgagtacttcaccgtgtacaacgagctgaccaaggtgaagtacgtgaccgagggcatgcggaagcccgccttcctgtccggcgagcagaagaaggccatcgtggacctgctgttcaagaccaaccggaaggtgaccgtgaagcagctgaaggaggactacttcaagaagatcgagtgcttcgactccgtggagatctccggcgtggaggaccggttcaacgcctccctgggcacctaccacgacctgctgaagatcatcaaggacaaggacttcctggacaacgaggagaacgaggacatcctggaggacatcgtgctgaccctgaccctgttcgaggaccgggagatgatcgaggagcggctgaagacctacgcccacctgttcgacgacaaggtgatgaagcagctgaagcggcggcggtacaccggctggggccggctgtcccggaagctgatcaacggcatccgggacaagcagtccggcaagaccatcctggacttcctgaagtccgacggcttcgccaaccggaacttcatgcagctgatccacgacgactccctgaccttcaaggaggacatccagaaggcccaggtgtccggccagggcgactccctgcacgagcacatcgccaacctggccggctcccccgccatcaagaagggcatcctgcagaccgtgaaggtggtggacgagctggtgaaggtgatgggccggcacaagcccgagaacatcgtgatcgagatggcccgggagaaccagaccacccagaagggccagaagaactcccgggagcggatgaagcggatcgaggagggcatcaaggagctgggctcccagatcctgaaggagcaccccgtggagaacacccagctgcagaacgagaagctgtacctgtactacctgcagaacggccgggacatgtacgtggaccaggagctggacatcaaccggctgtccgactacgacgtggactccatcgtgccccagtccttcctgaaggacgactccatcgacaacaaggtgctgacccggtccgacaagaaccggggcaagtccgacaacgtgccctccgaggaggtggtgaagaagatgaagaactactggcggcagctgctgaacgccaagctgatcacccagcggaagttcgacaacctgaccaaggccgagcggggcggcctgtccgagctggacaaggccggcttcatcaagcggcagctggtggagacccggcagatcaccaagcacgtggcccagatcctggactcccggatgaacaccaagtacgacgagaacgacaagctgatccgggaggtgaaggtgatcaccctgaagtccaagctggtgtccgacttccggaaggacttccagttctacaaggtgcgggagatcaacaactaccaccacgcccacgacgcctacctgaacgccgtggtgggcaccgccctgatcaagaagtaccccaagctggagtccgagttcgtgtacggcgactacaaggtgtacgacgtgcggaagatgatcgccaagtccgagcaggagatcggcaaggccaccgccaagtacttcttctactccaacatcatgaacttcttcaagaccgagatcaccctggccaacggcgagatccggaagcggcccctgatcgagaccaacggcgagaccggcgagatcgtgtgggacaagggccgggacttcgccaccgtgcggaaggtgctgtccatgccccaggtgaacatcgtgaagaagaccgaggtgcagaccggcggcttctccaaggagtccatcctgcccaagcggaactccgacaagctgatcgcccggaagaaggactgggaccccaagaagtacggcggcttcgactcccccaccgtggcctactccgtgctggtggtggccaaggtggagaagggcaagtccaagaagctgaagtccgtgaaggagctgctgggcatcaccatcatggagcggtcctccttcgagaagaaccccatcgacttcctggaggccaagggctacaaggaggtgaagaaggacctgatcatcaagctgcccaagtactccctgttcgagctggagaacggccggaagcggatgctggcctccgccggcgagctgcagaagggcaacgagctggccctgccctccaagtacgtgaacttcctgtacctggcctcccactacgagaagctgaagggctcccccgaggacaacgagcagaagcagctgttcgtggagcagcacaagcactacctggacgagatcatcgagcagatctccgagttctccaagcgggtgatcctggccgacgccaacctggacaaggtgctgtccgcctacaacaagcaccgggacaagcccatccgggagcaggccgagaacatcatccacctgttcaccctgaccaacctgggcgcccccgccgccttcaagtacttcgacaccaccatcgaccggaagcggtacacctccaccaaggaggtgctggacgccaccctgatccaccagtccatcaccggcctgtacgagacccggatcgacctgtcccagctgggcggcgacggcgcccccgagtccgccaccgagtccggcggcacctccaccgagtccgagggctccgccggccccaagaagaagcggaaggtgacctccaccgagtccgagggctccgccggctccgccggctccacctccggctcctcctccggcatgaagatcgccgtggtggacaaggccctgaacaacacccggtacgacaagcacttccagctgtacggcgaggaggtggacgtgttccacatgtgcaacgagaagctgtccggccggctgctgaagaagcacatcaccatcggcacccccgagaaccccttcgaccccaacgactacgacttcgtgatcctggtgggcgccgagcccttcctgtacttcgccggcaagaagggcatcggcgactacaccggcaagcgggtggagtacaacggctacgccaactggatcgcctccatctcccccgcccagctgcacttcaagcccgagatgaagcccgtgttcgacgccaccgtggagaacatccacgacatcatcaacggccgggagaagatcgccaaggccggcgactaccggcccatcaccgaccccgacgaggccgaggagtacatcaagatggtgtacaacatggtgatcggccccgtggccttcgcctccgccacctccgccctgtactgccgggacggctacctgctgggcgtgtccatctcccaccaggagtaccagggcgtgtacatcgactccgactgcctgaccgaggtggccgtgtactacctgcagaagatcctggactccgagaaccacaccatcgtgttccacaacctgaagttcgacatgcacttctacaagtaccacctgggcctgaccttcgacaaggcccacaaggagcggcggctgcacgacaccatgctgcagcactacgtgctggacgagcggcggggcacccacggcctgaagtccctggccatgaagtacaccgacatgggcgactacgacttcgagctggacaagttcaaggacgactactgcaaggcccacaagatcaagaaggaggacttcacctacgacctgatccccttcgacatcatgtggccctacgccgccaaggacaccgacgccaccatccggctgcacaacttcttcctgcccaagatcgagaagaacgagaagctgtgctccctgtactacgacgtgctgatgcccggctgcgtgttcctgcagcgggtggaggaccggggcgtgcccatctccatcgaccggctgaaggaggcccagtaccagctgacccacaacctgaacaaggcccgggagaagctgtacacctaccccgaggtgaagcagctggagcaggaccagaacgaggccttcaaccccaactccgtgaagcagctgcgggtgctgctgttcgactacgtgggcctgacccccaccggcaagctgaccgacaccggcgccgactccaccgacgccgaggccctgaacgagctggccacccagcaccccatcgccaagaccctgctggagatccggaagctgaccaagctgatctccacctacgtggagaagatcctgctgtccatcgacgccgacggctgcatccggaccggcttccacgagcacatgaccacctccggccggctgtcctcctccggcaagctgaacctgcagcagctgccccgggacgagtccatcatcaagggctgcgtggtggccccccccggctaccgggtgatcgcctgggacctgaccaccgccgaggtgtactacgccgccgtgctgtccggcgaccggaacatgcagcaggtgttcatcaacatgcggaacgagcccgacaagtaccccgacttccactccaacatcgcccacatggtgttcaagctgcagtgcgagccccgggacgtgaagaagctgttccccgccctgcggcaggccgccaaggccatcaccttcggcatcctgtacggctccggccccgccaaggtggcccactccgtgaacgaggccctgctggagcaggccgccaagaccggcgagcccttcgtggagtgcaccgtggccgacgccaaggagtacatcgagacctacttcggccagttcccccagctgaagcggtggatcgacaagtgccacgaccagatcaagaaccacggcttcatctactcccacttcggccggaagcggcggctgcacaacatccactccgaggaccggggcgtgcagggcgaggagatccggtccggcttcaacgccatcatccagtccgcctcctccgactccctgctgctgggcgccgtggacgccgacaacgagatcatctccctgggcctggagcaggagatgaagatcgtgatgctggtgcacgactccgtggtggccatcgtgcgggaggacctgatcgaccagtacaacgagatcctgatccggaacatccagaaggaccggggcatctccatccccggctgccccatcggcatcgactccgactccgaggccggcggctcccgggactactcctgcggcaagatgaagaagcagcacccctccatcgcctgcatcgacgacgacgagtacacccggtacgtgaagggcgtgctgctggacgccgagttcgagtacaagaagctggccgccatggacaaggagcaccccgaccactccaagtacaaggacgacaagttcatcgccgtgtgcaaggacctggacaacgtgaagcggatcctgggcgcctccggctccgagacccccggcacctccgagtccgccacccccgagtcccccaagaagaagcggaaggtgtagctagcaccagcctcaagaacacccgaatggagtctctaagctacataataccaacttacactttacaaaatgttgtcccccaaaatgtagccattcgtatctgctcctaataaaaagaaagtttcttcacattctctcgagaaaaaaaaaaaatggaaaaaaaaaaaacggaaaaaaaaaaaaggtaaaaaaaaaaaatataaaaaaaaaaaacataaaaaaaaaaaacgaaaaaaaaaaaacgtaaaaaaaaaaaactcaaaaaaaaaaaagataaaaaaaaaaaacctaaaaaaaaaaaatgtaaaaaaaaaaaagggaaaaaaaaaaaacgcaaaaaaaaaaaacacaaaaaaaaaaaatgcaaaaaaaaaaaatcgaaaaaaaaaaaatctaaaaaaaaaaaacgaaaaaaaaaaaacccaaaaaaaaaaaagacaaaaaaaaaaaatagaaaaaaaaaaagttaaaaaaaaaaaactgaaaaaaaaaaaatttaaaaaaaaaaaatctag

SEQ ID NO: 2534 - DNA, 7555 bp, synthetic construct
  misc_feature 1..7555: note = Synthetic
  source 1..7555: mol_type = other DNA
aggactcactatttgttttcgcgcccagttgcaaaaagtgtcgaaaaaaaaaaaaccaaaaaaaaaaaacaaaaaaaaaaaataattgactaaaagctcagaataaacgctcaactttggccggatctgccaccatgaagcggcccgccgccaccaagaaggccggccaggccaagaagaagaaggacaagaagtactccatcggcctggacatcggcaccaactccgtgggctgggccgtgatcaccgacgagtacaaggtgccctccaagaagttcaaggtgctgggcaacaccgaccggcactccatcaagaagaacctgatcggcgccctgctgttcgactccggcgagaccgccgaggccacccggctgaagcggaccgcccggcggcggtacacccggcggaagaaccggatctgctacctgcaggagatcttctccaacgagatggccaaggtggacgactccttcttccaccggctggaggagtccttcctggtggaggaggacaagaagcacgagcggcaccccatcttcggcaacatcgtggacgaggtggcctaccacgagaagtaccccaccatctaccacctgcggaagaagctggtggactccaccgacaaggccgacctgcggctgatctacctggccctggcccacatgatcaagttccggggccacttcctgatcgagggcgacctgaaccccgacaactccgacgtggacaagctgttcatccagctggtgcagacctacaaccagctgttcgaggagaaccccatcaacgcctccggcgtggacgccaaggccatcctgtccgcccggctgtccaagtcccggcggctggagaacctgatcgcccagctgcccggcgagaagaagaacggcctgttcggcaacctgatcgccctgtccctgggcctgacccccaacttcaagtccaacttcgacctggccgaggacgccaagctgcagctgtccaaggacacctacgacgacgacctggacaacctgctggcccagatcggcgaccagtacgccgacctgttcctggccgccaagaacctgtccgacgccatcctgctgtccgacatcctgcgggtgaacaccgagatcaccaaggcccccctgtccgcctccatgatcaagcggtacgacgagcaccaccaggacctgaccctgctgaaggccctggtgcggcagcagctgcccgagaagtacaaggagatcttcttcgaccagtccaagaacggctacgccggctacatcgacggcggcgcctcccaggaggagttctacaagttcatcaagcccatcctggagaagatggacggcaccgaggagctgctggtgaagctgaaccgggaggacctgctgcggaagcagcggaccttcgacaacggctccatcccccaccagatccacctgggcgagctgcacgccatcctgcggcggcaggaggacttctaccccttcctgaaggacaaccgggagaagatcgagaagatcctgaccttccggatcccctactacgtgggccccctggcccggggcaactcccggttcgcctggatgacccggaagtccgaggagaccatcaccccctggaacttcgaggaggtggtggacaagggcgcctccgcccagtccttcatcgagcggatgaccaacttcgacaagaacctgcccaacgagaaggtgctgcccaagcactccctgctgtacgagtacttcaccgtgtacaacgagctgaccaaggtgaagtacgtgaccgagggcatgcggaagcccgccttcctgtccggcgagcagaagaaggccatcgtggacctgctgttcaagaccaaccggaaggtgaccgtgaagcagctgaaggaggactacttcaagaagatcgagtgcttcgactccgtggagatctccggcgtggaggaccggttcaacgcctccctgggcacctaccacgacctgctgaagatcatcaaggacaaggacttcctggacaacgaggagaacgaggacatcctggaggacatcgtgctgaccctgaccctgttcgaggaccgggagatgatcgaggagcggctgaagacctacgcccacctgttcgacgacaaggtgatgaagcagctgaagcggcggcggtacaccggctggggccggctgtcccggaagctgatcaacggcatccgggacaagcagtccggcaagaccatcctggacttcctgaagtccgacggcttcgccaaccggaacttcatgcagctgatccacgacgactccctgaccttcaaggaggacatccagaaggcccaggtgtccggccagggcgactccctgcacgagcacatcgccaacctggccggctcccccgccatcaagaagggcatcctgcagaccgtgaaggtggtggacgagctggtgaaggtgatgggccggcacaagcccgagaacatcgtgatcgagatggcccgggagaaccagaccacccagaagggccagaagaactcccgggagcggatgaagcggatcgaggagggcatcaaggagctgggctcccagatcctgaaggagcaccccgtggagaacacccagctgcagaacgagaagctgtacctgtactacctgcagaacggccgggacatgtacgtggaccaggagctggacatcaaccggctgtccgactacgacgtggactccatcgtgccccagtccttcctgaaggacgactccatcgacaacaaggtgctgacccggtccgacaagaaccggggcaagtccgacaacgtgccctccgaggaggtggtgaagaagatgaagaactactggcggcagctgctgaacgccaagctgatcacccagcggaagttcgacaacctgaccaaggccgagcggggcggcctgtccgagctggacaaggccggcttcatcaagcggcagctggtggagacccggcagatcaccaagcacgtggcccagatcctggactcccggatgaacaccaagtacgacgagaacgacaagctgatccgggaggtgaaggtgatcaccctgaagtccaagctggtgtccgacttccggaaggacttccagttctacaaggtgcgggagatcaacaactaccaccacgcccacgacgcctacctgaacgccgtggtgggcaccgccctgatcaagaagtaccccaagctggagtccgagttcgtgtacggcgactacaaggtgtacgacgtgcggaagatgatcgccaagtccgagcaggagatcggcaaggccaccgccaagtacttcttctactccaacatcatgaacttcttcaagaccgagatcaccctggccaacggcgagatccggaagcggcccctgatcgagaccaacggcgagaccggcgagatcgtgtgggacaagggccgggacttcgccaccgtgcggaaggtgctgtccatgccccaggtgaacatcgtgaagaagaccgaggtgcagaccggcggcttctccaaggagtccatcctgcccaagcggaactccgacaagctgatcgcccggaagaaggactgggaccccaagaagtacggcggcttcgactcccccaccgtggcctactccgtgctggtggtggccaaggtggagaagggcaagtccaagaagctgaagtccgtgaaggagctgctgggcatcaccatcatggagcggtcctccttcgagaagaaccccatcgacttcctggaggccaagggctacaaggaggtgaagaaggacctgatcatcaagctgcccaagtactccctgttcgagctggagaacggccggaagcggatgctggcctccgccggcgagctgcagaagggcaacgagctggccctgccctccaagtacgtgaacttcctgtacctggcctcccactacgagaagctgaagggctcccccgaggacaacgagcagaagcagctgttcgtggagcagcacaagcactacctggacgagatcatcgagcagatctccgagttctccaagcgggtgatcctggccgacgccaacctggacaaggtgctgtccgcctacaacaagcaccgggacaagcccatccgggagcaggccgagaacatcatccacctgttcaccctgaccaacctgggcgcccccgccgccttcaagtacttcgacaccaccatcgaccggaagcggtacacctccaccaaggaggtgctggacgccaccctgatccaccagtccatcaccggcctgtacgagacccggatcgacctgtcccagctgggcggcgacggtaccaaggacagcaccaaagatatcccggaaaccccgagcaaggaccccaagaagaagcggaaggtgggtaccaaggacagcaccaaagatatcccggaaaccccgagcaaggacatgaagatcgccgtggtggacaaggccctgaacaacacccggtacgacaagcacttccagctgtacggcgaggaggtggacgtgttccacatgtgcaacgagaagctgtccggccggctgctgaagaagcacatcaccatcggcacccccgagaaccccttcgaccccaacgactacgacttcgtgatcctggtgggcgccgagcccttcctgtacttcgccggcaagaagggcatcggcgactacaccggcaagcgggtggagtacaacggctacgccaactggatcgcctccatctcccccgcccagctgcacttcaagcccgagatgaagcccgtgttcgacgccaccgtggagaacatccacgacatcatcaacggccgggagaagatcgccaaggccggcgactaccggcccatcaccgaccccgacgaggccgaggagtacatcaagatggtgtacaacatggtgatcggccccgtggccttcgcctccgccacctccgccctgtactgccgggacggctacctgctgggcgtgtccatctcccaccaggagtaccagggcgtgtacatcgactccgactgcctgaccgaggtggccgtgtactacctgcagaagatcctggactccgagaaccacaccatcgtgttccacaacctgaagttcgacatgcacttctacaagtaccacctgggcctgaccttcgacaaggcccacaaggagcggcggctgcacgacaccatgctgcagcactacgtgctggacgagcggcggggcacccacggcctgaagtccctggccatgaagtacaccgacatgggcgactacgacttcgagctggacaagttcaaggacgactactgcaaggcccacaagatcaagaaggaggacttcacctacgacctgatccccttcgacatcatgtggccctacgccgccaaggacaccgacgccaccatccggctgcacaacttcttcctgcccaagatcgagaagaacgagaagctgtgctccctgtactacgacgtgctgatgcccggctgcgtgttcctgcagcgggtggaggaccggggcgtgcccatctccatcgaccggctgaaggaggcccagtaccagctgacccacaacctgaacaaggcccgggagaagctgtacacctaccccgaggtgaagcagctggagcaggaccagaacgaggccttcaaccccaactccgtgaagcagctgcgggtgctgctgttcgactacgtgggcctgacccccaccggcaagctgaccgacaccggcgccgactccaccgacgccgaggccctgaacgagctggccacccagcaccccatcgccaagaccctgctggagatccggaagctgaccaagctgatctccacctacgtggagaagatcctgctgtccatcgacgccgacggctgcatccggaccggcttccacgagcacatgaccacctccggccggctgtcctcctccggcaagctgaacctgcagcagctgccccgggacgagtccatcatcaagggctgcgtggtggccccccccggctaccgggtgatcgcctgggacctgaccaccgccgaggtgtactacgccgccgtgctgtccggcgaccggaacatgcagcaggtgttcatcaacatgcggaacgagcccgacaagtaccccgacttccactccaacatcgcccacatggtgttcaagctgcagtgcgagccccgggacgtgaagaagctgttccccgccctgcggcaggccgccaaggccatcaccttcggcatcctgtacggctccggccccgccaaggtggcccactccgtgaacgaggccctgctggagcaggccgccaagaccggcgagcccttcgtggagtgcaccgtggccgacgccaaggagtacatcgagacctacttcggccagttcccccagctgaagcggtggatcgacaagtgccacgaccagatcaagaaccacggcttcatctactcccacttcggccggaagcggcggctgcacaacatccactccgaggaccggggcgtgcagggcgaggagatccggtccggcttcaacgccatcatccagtccgcctcctccgactccctgctgctgggcgccgtggacgccgacaacgagatcatctccctgggcctggagcaggagatgaagatcgtgatgctggtgcacgactccgtggtggccatcgtgcgggaggacctgatcgaccagtacaacgagatcctgatccggaacatccagaaggaccggggcatctccatccccggctgccccatcggcatcgactccgactccgaggccggcggctcccgggactactcctgcggcaagatgaagaagcagcacccctccatcgcctgcatcgacgacgacgagtacacccggtacgtgaagggcgtgctgctggacgccgagttcgagtacaagaagctggccgccatggacaaggagcaccccgaccactccaagtacaaggacgacaagttcatcgccgtgtgcaaggacctggacaacgtgaagcggatcctgggcgcctccggctccgagacccccggcacctccgagtccgccacccccgagtcccccaagaagaagcggaaggtgtagctagcaccagcctcaagaacacccgaatggagtctctaagctacataataccaacttacactttacaaaatgttgtcccccaaaatgtagccattcgtatctgctcctaataaaaagaaagtttcttcacattctctcgagaaaaaaaaaaaatggaaaaaaaaaaaacggaaaaaaaaaaaaggtaaaaaaaaaaaatataaaaaaaaaaaacataaaaaaaaaaaacgaaaaaaaaaaaacgtaaaaaaaaaaaactcaaaaaaaaaaaagataaaaaaaaaaaacctaaaaaaaaaaaatgtaaaaaaaaaaaagggaaaaaaaaaaaacgcaaaaaaaaaaaacacaaaaaaaaaaaatgcaaaaaaaaaaaatcgaaaaaaaaaaaatctaaaaaaaaaaaacgaaaaaaaaaaaacccaaaaaaaaaaaagacaaaaaaaaaaaatagaaaaaaaaaaagttaaaaaaaaaaaactgaaaaaaaaaaaatttaaaaaaaaaaaatctag

SEQ ID NO: 2535 - DNA, 7505 bp, synthetic construct
  misc_feature 1..7505: note = Synthetic
  source 1..7505: mol_type = other DNA
aggactcactatttgttttcgcgcccagttgcaaaaagtgtcgaagctcagaataaacgctcaactttggccggatctgccaccatgaagcggcccgccgccaccaagaaggccggccaggccaagaagaagaaggacaagaagtactccatcggcctggacatcggcaccaactccgtgggctgggccgtgatcaccgacgagtacaaggtgccctccaagaagttcaaggtgctgggcaacaccgaccggcactccatcaagaagaacctgatcggcgccctgctgttcgactccggcgagaccgccgaggccacccggctgaagcggaccgcccggcggcggtacacccggcggaagaaccggatctgctacctgcaggagatcttctccaacgagatggccaaggtggacgactccttcttccaccggctggaggagtccttcctggtggaggaggacaagaagcacgagcggcaccccatcttcggcaacatcgtggacgaggtggcctaccacgagaagtaccccaccatctaccacctgcggaagaagctggtggactccaccgacaaggccgacctgcggctgatctacctggccctggcccacatgatcaagttccggggccacttcctgatcgagggcgacctgaaccccgacaactccgacgtggacaagctgttcatccagctggtgcagacctacaaccagctgttcgaggagaaccccatcaacgcctccggcgtggacgccaaggccatcctgtccgcccggctgtccaagtcccggcggctggagaacctgatcgcccagctgcccggcgagaagaagaacggcctgttcggcaacctgatcgccctgtccctgggcctgacccccaacttcaagtccaacttcgacctggccgaggacgccaagctgcagctgtccaaggacacctacgacgacgacctggacaacctgctggcccagatcggcgaccagtacgccgacctgttcctggccgccaagaacctgtccgacgccatcctgctgtccgacatcctgcgggtgaacaccgagatcaccaaggcccccctgtccgcctccatgatcaagcggtacgacgagcaccaccaggacctgaccctgctgaaggccctggtgcggcagcagctgcccgagaagtacaaggagatcttcttcgaccagtccaagaacggctacgccggctacatcgacggcggcgcctcccaggaggagttctacaagttcatcaagcccatcctggagaagatggacggcaccgaggagctgctggtgaagctgaaccgggaggacctgctgcggaagcagcggaccttcgacaacggctccatcccccaccagatccacctgggcgagctgcacgccatcctgcggcggcaggaggacttctaccccttcctgaaggacaaccgggagaagatcgagaagatcctgaccttccggatcccctactacgtgggccccctggcccggggcaactcccggttcgcctggatgacccggaagtccgaggagaccatcaccccctggaacttcgaggaggtggtggacaagggcgcctccgcccagtccttcatcgagcggatgaccaacttcgacaagaacctgcccaacgagaaggtgctgcccaagcactccctgctgtacgagtacttcaccgtgtacaacgagctgaccaaggtgaagtacgtgaccgagggcatgcggaagcccgccttcctgtccggcgagcagaagaaggccatcgtggacctgctgttcaagaccaaccggaaggtgaccgtgaagcagctgaaggaggactacttcaagaagatcgagtgcttcgactccgtggagatctccggcgtggaggaccggttcaacgcctccctgggcacctaccacgacctgctgaagatcatcaaggacaaggacttcctggacaacgaggagaacgaggacatcctggaggacatcgtgctgaccctgaccctgttcgaggaccgggagatgatcgaggagcggctgaagacctacgcccacctgttcgacgacaaggtgatgaagcagctgaagcggcggcggtacaccggctggggccggctgtcccggaagctgatcaacggcatccgggacaagcagtccggcaagaccatcctggacttcctgaagtccgacggcttcgccaaccggaacttcatgcagctgatccacgacgactccctgaccttcaaggaggacatccagaaggcccaggtgtccggccagggcgactccctgcacgagcacatcgccaacctggccggctcccccgccatcaagaagggcatcctgcagaccgtgaaggtggtggacgagctggtgaaggtgatgggccggcacaagcccgagaacatcgtgatcgagatggcccgggagaaccagaccacccagaagggccagaagaactcccgggagcggatgaagcggatcgaggagggcatcaaggagctgggctcccagatcctgaaggagcaccccgtggagaacacccagctgcagaacgagaagctgtacctgtactacctgcagaacggccgggacatgtacgtggaccaggagctggacatcaaccggctgtccgactacgacgtggactccatcgtgccccagtccttcctgaaggacgactccatcgacaacaaggtgctgacccggtccgacaagaaccggggcaagtccgacaacgtgccctccgaggaggtggtgaagaagatgaagaactactggcggcagctgctgaacgccaagctgatcacccagcggaagttcgacaacctgaccaaggccgagcggggcggcctgtccgagctggacaaggccggcttcatcaagcggcagctggtggagacccggcagatcaccaagcacgtggcccagatcctggactcccggatgaacaccaagtacgacgagaacgacaagctgatccgggaggtgaaggtgatcaccctgaagtccaagctggtgtccgacttccggaaggacttccagttctacaaggtgcgggagatcaacaactaccaccacgcccacgacgcctacctgaacgccgtggtgggcaccgccctgatcaagaagtaccccaagctggagtccgagttcgtgtacggcgactacaaggtgtacgacgtgcggaagatgatcgccaagtccgagcaggagatcggcaaggccaccgccaagtacttcttctactccaacatcatgaacttcttcaagaccgagatcaccctggccaacggcgagatccggaagcggcccctgatcgagaccaacggcgagaccggcgagatcgtgtgggacaagggccgggacttcgccaccgtgcggaaggtgctgtccatgccccaggtgaacatcgtgaagaagaccgaggtgcagaccggcggcttctccaaggagtccatcctgcccaagcggaactccgacaagctgatcgcccggaagaaggactgggaccccaagaagtacggcggcttcgactcccccaccgtggcctactccgtgctggtggtggccaaggtggagaagggcaagtccaagaagctgaagtccgtgaaggagctgctgggcatcaccatcatggagcggtcctccttcgagaagaaccccatcgacttcctggaggccaagggctacaaggaggtgaagaaggacctgatcatcaagctgcccaagtactccctgttcgagctggagaacggccggaagcggatgctggcctccgccggcgagctgcagaagggcaacgagctggccctgccctccaagtacgtgaacttcctgtacctggcctcccactacgagaagctgaagggctcccccgaggacaacgagcagaagcagctgttcgtggagcagcacaagcactacctggacgagatcatcgagcagatctccgagttctccaagcgggtgatcctggccgacgccaacctggacaaggtgctgtccgcctacaacaagcaccgggacaagcccatccgggagcaggccgagaacatcatccacctgttcaccctgaccaacctgggcgcccccgccgccttcaagtacttcgacaccaccatcgaccggaagcggtacacctccaccaaggaggtgctggacgccaccctgatccaccagtccatcaccggcctgtacgagacccggatcgacctgtcccagctgggcggcgacggtaccaaggacagcaccaaagatatcccggaaaccccgagcaaggaccccaagaagaagcggaaggtgggtaccaaggacagcaccaaagatatcccggaaaccccgagcaaggacatgaagatcgccgtggtggacaaggccctgaacaacacccggtacgacaagcacttccagctgtacggcgaggaggtggacgtgttccacatgtgcaacgagaagctgtccggccggctgctgaagaagcacatcaccatcggcacccccgagaaccccttcgaccccaacgactacgacttcgtgatcctggtgggcgccgagcccttcctgtacttcgccggcaagaagggcatcggcgactacaccggcaagcgggtggagtacaacggctacgccaactggatcgcctccatctcccccgcccagctgcacttcaagcccgagatgaagcccgtgttcgacgccaccgtggagaacatccacgacatcatcaacggccgggagaagatcgccaaggccggcgactaccggcccatcaccgaccccgacgaggccgaggagtacatcaagatggtgtacaacatggtgatcggccccgtggccttcgcctccgccacctccgccctgtactgccgggacggctacctgctgggcgtgtccatctcccaccaggagtaccagggcgtgtacatcgactccgactgcctgaccgaggtggccgtgtactacctgcagaagatcctggactccgagaaccacaccatcgtgttccacaacctgaagttcgacatgcacttctacaagtaccacctgggcctgaccttcgacaaggcccacaaggagcggcggctgcacgacaccatgctgcagcactacgtgctggacgagcggcggggcacccacggcctgaagtccctggccatgaagtacaccgacatgggcgactacgacttcgagctggacaagttcaaggacgactactgcaaggcccacaagatcaagaaggaggacttcacctacgacctgatccccttcgacatcatgtggccctacgccgccaaggacaccgacgccaccatccggctgcacaacttcttcctgcccaagatcgagaagaacgagaagctgtgctccctgtactacgacgtgctgatgcccggctgcgtgttcctgcagcgggtggaggaccggggcgtgcccatctccatcgaccggctgaaggaggcccagtaccagctgacccacaacctgaacaaggcccgggagaagctgtacacctaccccgaggtgaagcagctggagcaggaccagaacgaggccttcaaccccaactccgtgaagcagctgcgggtgctgctgttcgactacgtgggcctgacccccaccggcaagctgaccgacaccggcgccgactccaccgacgccgaggccctgaacgagctggccacccagcaccccatcgccaagaccctgctggagatccggaagctgaccaagctgatctccacctacgtggagaagatcctgctgtccatcgacgccgacggctgcatccggaccggcttccacgagcacatgaccacctccggccggctgtcctcctccggcaagctgaacctgcagcagctgccccgggacgagtccatcatcaagggctgcgtggtggccccccccggctaccgggtgatcgcctgggacctgaccaccgccgaggtgtactacgccgccgtgctgtccggcgaccggaacatgcagcaggtgttcatcaacatgcggaacgagcccgacaagtaccccgacttccactccaacatcgcccacatggtgttcaagctgcagtgcgagccccgggacgtgaagaagctgttccccgccctgcggcaggccgccaaggccatcaccttcggcatcctgtacggctccggccccgccaaggtggcccactccgtgaacgaggccctgctggagcaggccgccaagaccggcgagcccttcgtggagtgcaccgtggccgacgccaaggagtacatcgagacctacttcggccagttcccccagctgaagcggtggatcgacaagtgccacgaccagatcaagaaccacggcttcatctactcccacttcggccggaagcggcggctgcacaacatccactccgaggaccggggcgtgcagggcgaggagatccggtccggcttcaacgccatcatccagtccgcctcctccgactccctgctgctgggcgccgtggacgccgacaacgagatcatctccctgggcctggagcaggagatgaagatcgtgatgctggtgcacgactccgtggtggccatcgtgcgggaggacctgatcgaccagtacaacgagatcctgatccggaacatccagaaggaccggggcatctccatccccggctgccccatcggcatcgactccgactccgaggccggcggctcccgggactactcctgcggcaagatgaagaagcagcacccctccatcgcctgcatcgacgacgacgagtacacccggtacgtgaagggcgtgctgctggacgccgagttcgagtacaagaagctggccgccatggacaaggagcaccccgaccactccaagtacaaggacgacaagttcatcgccgtgtgcaaggacctggacaacgtgaagcggatcctgggcgcctccggctccgagacccccggcacctccgagtccgccacccccgagtcccccaagaagaagcggaaggtgtagctagcaccagcctcaagaacacccgaatggagtctctaagctacataataccaacttacactttacaaaatgttgtcccccaaaatgtagccattcgtatctgctcctaataaaaagaaagtttcttcacattctctcgagaaaaaaaaaaaatggaaaaaaaaaaaacggaaaaaaaaaaaaggtaaaaaaaaaaaatataaaaaaaaaaaacataaaaaaaaaaaacgaaaaaaaaaaaacgtaaaaaaaaaaaactcaaaaaaaaaaaagataaaaaaaaaaaacctaaaaaaaaaaaatgtaaaaaaaaaaaagggaaaaaaaaaaaacgcaaaaaaaaaaaacacaaaaaaaaaaaatgcaaaaaaaaaaaatcgaaaaaaaaaaaatctaaaaaaaaaaaacgaaaaaaaaaaaacccaaaaaaaaaaaagacaaaaaaaaaaaatagaaaaaaaaaaagttaaaaaaaaaaaactgaaaaaaaaaaaatttaaaaaaaaaaaatctag

SEQ ID NO: 2536 - DNA, 7579 bp, synthetic construct
  misc_feature 1..7579: note = Synthetic
  source 1..7579: mol_type = other DNA
aggaagctcagaataaacgctcaactttggccggatctgccaccatgaaacgacccgccgccaccaagaaagcaggacaagctaagaagaagaaggacaagaagtactccatcggcctggacatcggcaccaactccgtgggctgggccgtgatcaccgacgagtacaaggtgccctccaagaagttcaaggtgctgggcaacaccgaccggcactccatcaagaagaacctgatcggcgccctgctgttcgactccggcgagaccgccgaggccacccggctgaagcggaccgcccggcggcggtacacccggcggaagaaccggatctgctacctgcaggagatcttctccaacgagatggccaaggtggacgactccttcttccaccggctggaggagtccttcctggtggaggaggacaagaagcacgagcggcaccccatcttcggcaacatcgtggacgaggtggcctaccacgagaagtaccccaccatctaccacctgcggaagaagctggtggactccaccgacaaggccgacctgcggctgatctacctggccctggcccacatgatcaagttccggggccacttcctgatcgagggcgacctgaaccccgacaactccgacgtggacaagctgttcatccagctggtgcagacctacaaccagctgttcgaggagaaccccatcaacgcctccggcgtggacgccaaggccatcctgtccgcccggctgtccaagtcccggcggctggagaacctgatcgcccagctgcccggcgagaagaagaacggcctgttcggcaacctgatcgccctgtccctgggcctgacccccaacttcaagtccaacttcgacctggccgaggacgccaagctgcagctgtccaaggacacctacgacgacgacctggacaacctgctggcccagatcggcgaccagtacgccgacctgttcctggccgccaagaacctgtccgacgccatcctgctgtccgacatcctgcgggtgaacaccgagatcaccaaggcccccctgtccgcctccatgatcaagcggtacgacgagcaccaccaggacctgaccctgctgaaggccctggtgcggcagcagctgcccgagaagtacaaggagatcttcttcgaccagtccaagaacggctacgccggctacatcgacggcggcgcctcccaggaggagttctacaagttcatcaagcccatcctggagaagatggacggcaccgaggagctgctggtgaagctgaaccgggaggacctgctgcggaagcagcggaccttcgacaacggctccatcccccaccagatccacctgggcgagctgcacgccatcctgcggcggcaggaggacttctaccccttcctgaaggacaaccgggagaagatcgagaagatcctgaccttccggatcccctactacgtgggccccctggcccggggcaactcccggttcgcctggatgacccggaagtccgaggagaccatcaccccctggaacttcgaggaggtggtggacaagggcgcctccgcccagtccttcatcgagcggatgaccaacttcgacaagaacctgcccaacgagaaggtgctgcccaagcactccctgctgtacgagtacttcaccgtgtacaacgagctgaccaaggtgaagtacgtgaccgagggcatgcggaagcccgccttcctgtccggcgagcagaagaaggccatcgtggacctgctgttcaagaccaaccggaaggtgaccgtgaagcagctgaaggaggactacttcaagaagatcgagtgcttcgactccgtggagatctccggcgtggaggaccggttcaacgcctccctgggcacctaccacgacctgctgaagatcatcaaggacaaggacttcctggacaacgaggagaacgaggacatcctggaggacatcgtgctgaccctgaccctgttcgaggaccgggagatgatcgaggagcggctgaagacctacgcccacctgttcgacgacaaggtgatgaagcagctgaagcggcggcggtacaccggctggggccggctgtcccggaagctgatcaacggcatccgggacaagcagtccggcaagaccatcctggacttcctgaagtccgacggcttcgccaaccggaacttcatgcagctgatccacgacgactccctgaccttcaaggaggacatccagaaggcccaggtgtccggccagggcgactccctgcacgagcacatcgccaacctggccggctcccccgccatcaagaagggcatcctgcagaccgtgaaggtggtggacgagctggtgaaggtgatgggccggcacaagcccgagaacatcgtgatcgagatggcccgggagaaccagaccacccagaagggccagaagaactcccgggagcggatgaagcggatcgaggagggcatcaaggagctgggctcccagatcctgaaggagcaccccgtggagaacacccagctgcagaacgagaagctgtacctgtactacctgcagaacggccgggacatgtacgtggaccaggagctggacatcaaccggctgtccgactacgacgtggacgccatcgtgccccagtccttcctgaaggacgactccatcgacaacaaggtgctgacccggtccgacaagaaccggggcaagtccgacaacgtgccctccgaggaggtggtgaagaagatgaagaactactggcggcagctgctgaacgccaagctgatcacccagcggaagttcgacaacctgaccaaggccgagcggggcggcctgtccgagctggacaaggccggcttcatcaagcggcagctggtggagacccggcagatcaccaagcacgtggcccagatcctggactcccggatgaacaccaagtacgacgagaacgacaagctgatccgggaggtgaaggtgatcaccctgaagtccaagctggtgtccgacttccggaaggacttccagttctacaaggtgcgggagatcaacaactaccaccacgcccacgacgcctacctgaacgccgtggtgggcaccgccctgatcaagaagtaccccaagctggagtccgagttcgtgtacggcgactacaaggtgtacgacgtgcggaagatgatcgccaagtccgagcaggagatcggcaaggccaccgccaagtacttcttctactccaacatcatgaacttcttcaagaccgagatcaccctggccaacggcgagatccggaagcggcccctgatcgagaccaacggcgagaccggcgagatcgtgtgggacaagggccgggacttcgccaccgtgcggaaggtgctgtccatgccccaggtgaacatcgtgaagaagaccgaggtgcagaccggcggcttctccaaggagtccatcctgcccaagcggaactccgacaagctgatcgcccggaagaaggactgggaccccaagaagtacggcggcttcgactcccccaccgtggcctactccgtgctggtggtggccaaggtggagaagggcaagtccaagaagctgaagtccgtgaaggagctgctgggcatcaccatcatggagcggtcctccttcgagaagaaccccatcgacttcctggaggccaagggctacaaggaggtgaagaaggacctgatcatcaagctgcccaagtactccctgttcgagctggagaacggccggaagcggatgctggcctccgccggcgagctgcagaagggcaacgagctggccctgccctccaagtacgtgaacttcctgtacctggcctcccactacgagaagctgaagggctcccccgaggacaacgagcagaagcagctgttcgtggagcagcacaagcactacctggacgagatcatcgagcagatctccgagttctccaagcgggtgatcctggccgacgccaacctggacaaggtgctgtccgcctacaacaagcaccgggacaagcccatccgggagcaggccgagaacatcatccacctgttcaccctgaccaacctgggcgcccccgccgccttcaagtacttcgacaccaccatcgaccggaagcggtacacctccaccaaggaggtgctggacgccaccctgatccaccagtccatcaccggcctgtacgagacccggatcgacctgtcccagctgggcggcgacggcgcccccgagtccgccaccgagtccggcggcacctccaccgagtccgagggctccgccggccccaagaagaagcggaaggtgacctccaccgagtccgagggctccgccggctccgccggctccacctccggctcctcctccggcatgaagatcgccgtggtggacaaggccctgaacaacacccggtacgacaagcacttccagctgtacggcgaggaggtggacgtgttccacatgtgcaacgagaagctgtccggccggctgctgaagaagcacatcaccatcggcacccccgagaaccccttcgaccccaacgactacgacttcgtgatcctggtgggcgccgagcccttcctgtacttcgccggcaagaagggcatcggcgactacaccggcaagcgggtggagtacaacggctacgccaactggatcgcctccatctcccccgcccagctgcacttcaagcccgagatgaagcccgtgttcgacgccaccgtggagaacatccacgacatcatcaacggccgggagaagatcgccaaggccggcgactaccggcccatcaccgaccccgacgaggccgaggagtacatcaagatggtgtacaacatggtgatcggccccgtggccttcgcctccgccacctccgccctgtactgccgggacggctacctgctgggcgtgtccatctcccaccaggagtaccagggcgtgtacatcgactccgactgcctgaccgaggtggccgtgtactacctgcagaagatcctggactccgagaaccacaccatcgtgttccacaacctgaagttcgacatgcacttctacaagtaccacctgggcctgaccttcgacaaggcccacaaggagcggcggctgcacgacaccatgctgcagcactacgtgctggacgagcggcggggcacccacggcctgaagtccctggccatgaagtacaccgacatgggcgactacgacttcgagctggacaagttcaaggacgactactgcaaggcccacaagatcaagaaggaggacttcacctacgacctgatccccttcgacatcatgtggccctacgccgccaaggacaccgacgccaccatccggctgcacaacttcttcctgcccaagatcgagaagaacgagaagctgtgctccctgtactacgacgtgctgatgcccggctgcgtgttcctgcagcgggtggaggaccggggcgtgcccatctccatcgaccggctgaaggaggcccagtaccagctgacccacaacctgaacaaggcccgggagaagctgtacacctaccccgaggtgaagcagctggagcaggaccagaacgaggccttcaaccccaactccgtgaagcagctgcgggtgctgctgttcgactacgtgggcctgacccccaccggcaagctgaccgacaccggcgccgactccaccgacgccgaggccctgaacgagctggccacccagcaccccatcgccaagaccctgctggagatccggaagctgaccaagctgatctccacctacgtggagaagatcctgctgtccatcgacgccgacggctgcatccggaccggcttccacgagcacatgaccacctccggccggctgtcctcctccggcaagctgaacctgcagcagctgccccgggacgagtccatcatcaagggctgcgtggtggccccccccggctaccgggtgatcgcctgggacctgaccaccgccgaggtgtactacgccgccgtgctgtccggcgaccggaacatgcagcaggtgttcatcaacatgcggaacgagcccgacaagtaccccgacttccactccaacatcgcccacatggtgttcaagctgcagtgcgagccccgggacgtgaagaagctgttccccgccctgcggcaggccgccaaggccatcaccttcggcatcctgtacggctccggccccgccaaggtggcccactccgtgaacgaggccctgctggagcaggccgccaagaccggcgagcccttcgtggagtgcaccgtggccgacgccaaggagtacatcgagacctacttcggccagttcccccagctgaagcggtggatcgacaagtgccacgaccagatcaagaaccacggcttcatctactcccacttcggccggaagcggcggctgcacaacatccactccgaggaccggggcgtgcagggcgaggagatccggtccggcttcaacgccatcatccagtccgcctcctccgactccctgctgctgggcgccgtggacgccgacaacgagatcatctccctgggcctggagcaggagatgaagatcgtgatgctggtgcacgactccgtggtggccatcgtgcgggaggacctgatcgaccagtacaacgagatcctgatccggaacatccagaaggaccggggcatctccatccccggctgccccatcggcatcgactccgactccgaggccggcggctcccgggactactcctgcggcaagatgaagaagcagcacccctccatcgcctgcatcgacgacgacgagtacacccggtacgtgaagggcgtgctgctggacgccgagttcgagtacaagaagctggccgccatggacaaggagcaccccgaccactccaagtacaaggacgacaagttcatcgccgtgtgcaaggacctggacaacgtgaagcggatcctgggcgccggcggcggctccggcaagcggaccgccgacggctccggcggcggctcccccaagaagaagcggaaggtgcctgccgctaagagagtgaagctggactccgagtccgccacccccgagtccgtgtccggctggcggctgttcaagaagatctcctagctagcaccagcctcaagaacacccgaatggagtctctaagctacataataccaacttacactttacaaaatgttgtcccccaaaatgtagccattcgtatctgctcctaataaaaagaaagtttcttcacattctctcgagaaaaaaaaaaaatggaaaaaaaaaaaacggaaaaaaaaaaaaggtaaaaaaaaaaaatataaaaaaaaaaaacataaaaaaaaaaaacgaaaaaaaaaaaacgtaaaaaaaaaaaactcaaaaaaaaaaaagataaaaaaaaaaaacctaaaaaaaaaaaatgtaaaaaaaaaaaagggaaaaaaaaaaaacgcaaaaaaaaaaaacacaaaaaaaaaaaatgcaaaaaaaaaaaatcgaaaaaaaaaaaatctaaaaaaaaaaaacgaaaaaaaaaaaacccaaaaaaaaaaaagacaaaaaaaaaaaatagaaaaaaaaaaagttaaaaaaaaaaaactgaaaaaaaaaaaatttaaaaaaaaaaaatctag

SEQ ID NO: 2537 - DNA, 6526 bp, synthetic construct
  misc_feature 1..6526: note = Synthetic
  source 1..6526: mol_type = other DNA
gggaagctcagaataaacgctcaactttggccggatctgccaccatgaagcggaccgccgacggctccgagttcgagtcccccaagaagaagcggaaggtggacaagaagtactccatcggcctggacatcggcaccaactccgtgggctgggccgtgatcaccgacgagtacaaggtgccctccaagaagttcaaggtgctgggcaacaccgaccggcactccatcaagaagaacctgatcggcgccctgctgttcgactccggcgagaccgccgaggccacccggctgaagcggaccgcccggcggcggtacacccggcggaagaaccggatctgctacctgcaggagatcttctccaacgagatggccaaggtggacgactccttcttccaccggctggaggagtccttcctggtggaggaggacaagaagcacgagcggcaccccatcttcggcaacatcgtggacgaggtggcctaccacgagaagtaccccaccatctaccacctgcggaagaagctggtggactccaccgacaaggccgacctgcggctgatctacctggccctggcccacatgatcaagttccggggccacttcctgatcgagggcgacctgaaccccgacaactccgacgtggacaagctgttcatccagctggtgcagacctacaaccagctgttcgaggagaaccccatcaacgcctccggcgtggacgccaaggccatcctgtccgcccggctgtccaagtcccggcggctggagaacctgatcgcccagctgcccggcgagaagaagaacggcctgttcggcaacctgatcgccctgtccctgggcctgacccccaacttcaagtccaacttcgacctggccgaggacgccaagctgcagctgtccaaggacacctacgacgacgacctggacaacctgctggcccagatcggcgaccagtacgccgacctgttcctggccgccaagaacctgtccgacgccatcctgctgtccgacatcctgcgggtgaacaccgagatcaccaaggcccccctgtccgcctccatgatcaagcggtacgacgagcaccaccaggacctgaccctgctgaaggccctggtgcggcagcagctgcccgagaagtacaaggagatcttcttcgaccagtccaagaacggctacgccggctacatcgacggcggcgcctcccaggaggagttctacaagttcatcaagcccatcctggagaagatggacggcaccgaggagctgctggtgaagctgaaccgggaggacctgctgcggaagcagcggaccttcgacaacggctccatcccccaccagatccacctgggcgagctgcacgccatcctgcggcggcaggaggacttctaccccttcctgaaggacaaccgggagaagatcgagaagatcctgaccttccggatcccctactacgtgggccccctggcccggggcaactcccggttcgcctggatgacccggaagtccgaggagaccatcaccccctggaacttcgaggaggtggtggacaagggcgcctccgcccagtccttcatcgagcggatgaccaacttcgacaagaacctgcccaacgagaaggtgctgcccaagcactccctgctgtacgagtacttcaccgtgtacaacgagctgaccaaggtgaagtacgtgaccgagggcatgcggaagcccgccttcctgtccggcgagcagaagaaggccatcgtggacctgctgttcaagaccaaccggaaggtgaccgtgaagcagctgaaggaggactacttcaagaagatcgagtgcttcgactccgtggagatctccggcgtggaggaccggttcaacgcctccctgggcacctaccacgacctgctgaagatcatcaaggacaaggacttcctggacaacgaggagaacgaggacatcctggaggacatcgtgctgaccctgaccctgttcgaggaccgggagatgatcgaggagcggctgaagacctacgcccacctgttcgacgacaaggtgatgaagcagctgaagcggcggcggtacaccggctggggccggctgtcccggaagctgatcaacggcatccgggacaagcagtccggcaagaccatcctggacttcctgaagtccgacggcttcgccaaccggaacttcatgcagctgatccacgacgactccctgaccttcaaggaggacatccagaaggcccaggtgtccggccagggcgactccctgcacgagcacatcgccaacctggccggctcccccgccatcaagaagggcatcctgcagaccgtgaaggtggtggacgagctggtgaaggtgatgggccggcacaagcccgagaacatcgtgatcgagatggcccgggagaaccagaccacccagaagggccagaagaactcccgggagcggatgaagcggatcgaggagggcatcaaggagctgggctcccagatcctgaaggagcaccccgtggagaacacccagctgcagaacgagaagctgtacctgtactacctgcagaacggccgggacatgtacgtggaccaggagctggacatcaaccggctgtccgactacgacgtggacgccatcgtgccccagtccttcctgaaggacgactccatcgacaacaaggtgctgacccggtccgacaagaaccggggcaagtccgacaacgtgccctccgaggaggtggtgaagaagatgaagaactactggcggcagctgctgaacgccaagctgatcacccagcggaagttcgacaacctgaccaaggccgagcggggcggcctgtccgagctggacaaggccggcttcatcaagcggcagctggtggagacccggcagatcaccaagcacgtggcccagatcctggactcccggatgaacaccaagtacgacgagaacgacaagctgatccgggaggtgaaggtgatcaccctgaagtccaagctggtgtccgacttccggaaggacttccagttctacaaggtgcgggagatcaacaactaccaccacgcccacgacgcctacctgaacgccgtggtgggcaccgccctgatcaagaagtaccccaagctggagtccgagttcgtgtacggcgactacaaggtgtacgacgtgcggaagatgatcgccaagtccgagcaggagatcggcaaggccaccgccaagtacttcttctactccaacatcatgaacttcttcaagaccgagatcaccctggccaacggcgagatccggaagcggcccctgatcgagaccaacggcgagaccggcgagatcgtgtgggacaagggccgggacttcgccaccgtgcggaaggtgctgtccatgccccaggtgaacatcgtgaagaagaccgaggtgcagaccggcggcttctccaaggagtccatcctgcccaagcggaactccgacaagctgatcgcccggaagaaggactgggaccccaagaagtacggcggcttcgactcccccaccgtggcctactccgtgctggtggtggccaaggtggagaagggcaagtccaagaagctgaagtccgtgaaggagctgctgggcatcaccatcatggagcggtcctccttcgagaagaaccccatcgacttcctggaggccaagggctacaaggaggtgaagaaggacctgatcatcaagctgcccaagtactccctgttcgagctggagaacggccggaagcggatgctggcctccgccggcgagctgcagaagggcaacgagctggccctgccctccaagtacgtgaacttcctgtacctggcctcccactacgagaagctgaagggctcccccgaggacaacgagcagaagcagctgttcgtggagcagcacaagcactacctggacgagatcatcgagcagatctccgagttctccaagcgggtgatcctggccgacgccaacctggacaaggtgctgtccgcctacaacaagcaccgggacaagcccatccgggagcaggccgagaacatcatccacctgttcaccctgaccaacctgggcgcccccgccgccttcaagtacttcgacaccaccatcgaccggaagcggtacacctccaccaaggaggtgctggacgccaccctgatccaccagtccatcaccggcctgtacgagacccggatcgacctgtcccagctgggcggcgactccggcggctcctccggcggctccaagcggaccgccgacggctccgagttcgagtcccccaagaagaagcggaaggtgtccggcggctcctccggcggctccatggactccaccaaggagaagtgcgactcctacaaggacgacctgctgctgcggatgggcctgaacgacaacaaggccggcatggagggcctggacaaggagaagatcaacaagatcatcatggaggccaccaagggctcccggttctacggcaacgagctgaagaaggagaagcaggtgaaccagcggatcgagaacatgatgcagcagaaggcccagatcacctcccagcagctgcggaaggcccagctgcaggtggaccggttcgccatggagctggagcagtcccggaacctgtccaacaccatcgtgcacatcgacatggacgccttctacgccgccgtggagatgcgggacaaccccgagctgaaggacaagcccatcgccgtgggctccatgtccatgctgtccacctccaactaccacgcccggcggttcggcgtgcgggccgccatgcccggcttcatcgccaagcggctgtgcccccagctgatcatcgtgccccccaacttcgacaagtaccgggccgtgtccaaggaggtgaaggagatcctggccgactacgaccccaacttcatggccatgtccctggacgaggcctacctgaacatcaccaagcacctggaggagcggcagaactggcccgaggacaagcggcggtacttcatcaagatgggctcctccgtggagaacgacaaccccggcaaggaggtgaacaagctgtccgagcacgagcggtccatctcccccctgctgttcgaggagtccccctccgacgtgcagccccccggcgaccccttccaggtgaacttcgaggagcagaacaacccccagatcctgcagaactccgtggtgttcggcacctccgcccaggaggtggtgaaggagatccggttccggatcgagcagaagaccaccctgaccgcctccgccggcatcgcccccaacaccatgctggccaaggtgtgctccgacaagaacaagcccaacggccagtaccagatcctgcccaaccggcaggccgtgatggacttcatcaaggacctgcccatccggaaggtgtccggcatcggcaaggtgaccgagaagatgctgaaggccctgggcatcatcacctgcaccgagctgtaccagcagcgggccctgctgtccctgctgttctccgagacctcctggcactacttcctgcacatctccctgggcctgggctccacccacctgacccgggaccgggtgcggaagtccatgtccgtggagcggaccttctccgagatcaacaaggccgaggagcagtactccctgtgccaggagctgtgctccgagctggcccaggacctgcagaaggagcggctgaagggccggaccgtgaccatcaagctgaagaacgtgaacttcgaggtgaagacccgggcctccaccgtgtcctccgtggtgtccaccgccgaggagatcttcgccatcgccaaggagctgctgaagaccgagatcgacgccgacttcccccaccccctgcggctgcggctgatgggcgtgcggatctcctccttccccaacgaggaggaccggaagcaccagcagggcggcggctccggcaagcggaccgccgacggctccggcggcggctcccccaagaagaagcggaaggtgtccgagtccgccacccccgagtccgtgtccggctggcggctgttcaagaagatctcctagctagcaccagcctcaagaacacccgaatggagtctctaagctacataataccaacttacactttacaaaatgttgtcccccaaaatgtagccattcgtatctgctcctaataaaaagaaagtttcttcacattctctcgagaaaaaaaaaaaatggaaaaaaaaaaaacggaaaaaaaaaaaaggtaaaaaaaaaaaatataaaaaaaaaaaacataaaaaaaaaaaacgaaaaaaaaaaaacgtaaaaaaaaaaaactcaaaaaaaaaaaagataaaaaaaaaaaacctaaaaaaaaaaaatgtaaaaaaaaaaaagggaaaaaaaaaaaacgcaaaaaaaaaaaacacaaaaaaaaaaaatgcaaaaaaaaaaaatcgaaaaaaaaaaaatctaaaaaaaaaaaacgaaaaaaaaaaaacccaaaaaaaaaaaagacaaaaaaaaaaaatagaaaaaaaaaaagttaaaaaaaaaaaactgaaaaaaaaaaaatttaaaaaaaaaaaatctag

SEQ ID NO: 2538 - DNA, 6524 bp, synthetic construct
  misc_feature 1..6524: note = Synthetic
  source 1..6524: mol_type = other DNA
aggactcactatttgttttcgcgcccagttgcaaaaagtgtcgaagctcagaataaacgctcaactttggccggatctgccaccatgaagcggaccgccgacggctccgagttcgagtcccccaagaagaagcggaaggtggacaagaagtactccatcggcctggacatcggcaccaactccgtgggctgggccgtgatcaccgacgagtacaaggtgccctccaagaagttcaaggtgctgggcaacaccgaccggcactccatcaagaagaacctgatcggcgccctgctgttcgactccggcgagaccgccgaggccacccggctgaagcggaccgcccggcggcggtacacccggcggaagaaccggatctgctacctgcaggagatcttctccaacgagatggccaaggtggacgactccttcttccaccggctggaggagtccttcctggtggaggaggacaagaagcacgagcggcaccccatcttcggcaacatcgtggacgaggtggcctaccacgagaagtaccccaccatctaccacctgcggaagaagctggtggactccaccgacaaggccgacctgcggctgatctacctggccctggcccacatgatcaagttccggggccacttcctgatcgagggcgacctgaaccccgacaactccgacgtggacaagctgttcatccagctggtgcagacctacaaccagctgttcgaggagaaccccatcaacgcctccggcgtggacgccaaggccatcctgtccgcccggctgtccaagtcccggcggctggagaacctgatcgcccagctgcccggcgagaagaagaacggcctgttcggcaacctgatcgccctgtccctgggcctgacccccaacttcaagtccaacttcgacctggccgaggacgccaagctgcagctgtccaaggacacctacgacgacgacctggacaacctgctggcccagatcggcgaccagtacgccgacctgttcctggccgccaagaacctgtccgacgccatcctgctgtccgacatcctgcgggtgaacaccgagatcaccaaggcccccctgtccgcctccatgatcaagcggtacgacgagcaccaccaggacctgaccctgctgaaggccctggtgcggcagcagctgcccgagaagtacaaggagatcttcttcgaccagtccaagaacggctacgccggctacatcgacggcggcgcctcccaggaggagttctacaagttcatcaagcccatcctggagaagatggacggcaccgaggagctgctggtgaagctgaaccgggaggacctgctgcggaagcagcggaccttcgacaacggctccatcccccaccagatccacctgggcgagctgcacgccatcctgcggcggcaggaggacttctaccccttcctgaaggacaaccgggagaagatcgagaagatcctgaccttccggatcccctactacgtgggccccctggcccggggcaactcccggttcgcctggatgacccggaagtccgaggagaccatcaccccctggaacttcgaggaggtggtggacaagggcgcctccgcccagtccttcatcgagcggatgaccaacttcgacaagaacctgcccaacgagaaggtgctgcccaagcactccctgctgtacgagtacttcaccgtgtacaacgagctgaccaaggtgaagtacgtgaccgagggcatgcggaagcccgccttcctgtccggcgagcagaagaaggccatcgtggacctgctgttcaagaccaaccggaaggtgaccgtgaagcagctgaaggaggactacttcaagaagatcgagtgcttcgactccgtggagatctccggcgtggaggaccggttcaacgcctccctgggcacctaccacgacctgctgaagatcatcaaggacaaggacttcctggacaacgaggagaacgaggacatcctggaggacatcgtgctgaccctgaccctgttcgaggaccgggagatgatcgaggagcggctgaagacctacgcccacctgttcgacgacaaggtgatgaagcagctgaagcggcggcggtacaccggctggggccggctgtcccggaagctgatcaacggcatccgggacaagcagtccggcaagaccatcctggacttcctgaagtccgacggcttcgccaaccggaacttcatgcagctgatccacgacgactccctgaccttcaaggaggacatccagaaggcccaggtgtccggccagggcgactccctgcacgagcacatcgccaacctggccggctcccccgccatcaagaagggcatcctgcagaccgtgaaggtggtggacgagctggtgaaggtgatgggccggcacaagcccgagaacatcgtgatcgagatggcccgggagaaccagaccacccagaagggccagaagaactcccgggagcggatgaagcggatcgaggagggcatcaaggagctgggctcccagatcctgaaggagcaccccgtggagaacacccagctgcagaacgagaagctgtacctgtactacctgcagaacggccgggacatgtacgtggaccaggagctggacatcaaccggctgtccgactacgacgtggacgccatcgtgccccagtccttcctgaaggacgactccatcgacaacaaggtgctgacccggtccgacaagaaccggggcaagtccgacaacgtgccctccgaggaggtggtgaagaagatgaagaactactggcggcagctgctgaacgccaagctgatcacccagcggaagttcgacaacctgaccaaggccgagcggggcggcctgtccgagctggacaaggccggcttcatcaagcggcagctggtggagacccggcagatcaccaagcacgtggcccagatcctggactcccggatgaacaccaagtacgacgagaacgacaagctgatccgggaggtgaaggtgatcaccctgaagtccaagctggtgtccgacttccggaaggacttccagttctacaaggtgcgggagatcaacaactaccaccacgcccacgacgcctacctgaacgccgtggtgggcaccgccctgatcaagaagtaccccaagctggagtccgagttcgtgtacggcgactacaaggtgtacgacgtgcggaagatgatcgccaagtccgagcaggagatcggcaaggccaccgccaagtacttcttctactccaacatcatgaacttcttcaagaccgagatcaccctggccaacggcgagatccggaagcggcccctgatcgagaccaacggcgagaccggcgagatcgtgtgggacaagggccgggacttcgccaccgtgcggaaggtgctgtccatgccccaggtgaacatcgtgaagaagaccgaggtgcagaccggcggcttctccaaggagtccatcctgcccaagcggaactccgacaagctgatcgcccggaagaaggactgggaccccaagaagtacggcggcttcgactcccccaccgtggcctactccgtgctggtggtggccaaggtggagaagggcaagtccaagaagctgaagtccgtgaaggagctgctgggcatcaccatcatggagcggtcctccttcgagaagaaccccatcgacttcctggaggccaagggctacaaggaggtgaagaaggacctgatcatcaagctgcccaagtactccctgttcgagctggagaacggccggaagcggatgctggcctccgccggcgagctgcagaagggcaacgagctggccctgccctccaagtacgtgaacttcctgtacctggcctcccactacgagaagctgaagggctcccccgaggacaacgagcagaagcagctgttcgtggagcagcacaagcactacctggacgagatcatcgagcagatctccgagttctccaagcgggtgatcctggccgacgccaacctggacaaggtgctgtccgcctacaacaagcaccgggacaagcccatccgggagcaggccgagaacatcatccacctgttcaccctgaccaacctgggcgcccccgccgccttcaagtacttcgacaccaccatcgaccggaagcggtacacctccaccaaggaggtgctggacgccaccctgatccaccagtccatcaccggcctgtacgagacccggatcgacctgtcccagctgggcggcgacggtaccaaggacagcaccaaagatatcccggaaaccccgagcaaggaccccaagaagaagcggaaggtgggtaccaaggacagcaccaaagatatcccggaaaccccgagcaaggacatggactccaccaaggagaagtgcgactcctacaaggacgacctgctgctgcggatgggcctgaacgacaacaaggccggcatggagggcctggacaaggagaagatcaacaagatcatcatggaggccaccaagggctcccggttctacggcaacgagctgaagaaggagaagcaggtgaaccagcggatcgagaacatgatgcagcagaaggcccagatcacctcccagcagctgcggaaggcccagctgcaggtggaccggttcgccatggagctggagcagtcccggaacctgtccaacaccatcgtgcacatcgacatggacgccttctacgccgccgtggagatgcgggacaaccccgagctgaaggacaagcccatcgccgtgggctccatgtccatgctgtccacctccaactaccacgcccggcggttcggcgtgcgggccgccatgcccggcttcatcgccaagcggctgtgcccccagctgatcatcgtgccccccaacttcgacaagtaccgggccgtgtccaaggaggtgaaggagatcctggccgactacgaccccaacttcatggccatgtccctggacgaggcctacctgaacatcaccaagcacctggaggagcggcagaactggcccgaggacaagcggcggtacttcatcaagatgggctcctccgtggagaacgacaaccccggcaaggaggtgaacaagctgtccgagcacgagcggtccatctcccccctgctgttcgaggagtccccctccgacgtgcagccccccggcgaccccttccaggtgaacttcgaggagcagaacaacccccagatcctgcagaactccgtggtgttcggcacctccgcccaggaggtggtgaaggagatccggttccggatcgagcagaagaccaccctgaccgcctccgccggcatcgcccccaacaccatgctggccaaggtgtgctccgacaagaacaagcccaacggccagtaccagatcctgcccaaccggcaggccgtgatggacttcatcaaggacctgcccatccggaaggtgtccggcatcggcaaggtgaccgagaagatgctgaaggccctgggcatcatcacctgcaccgagctgtaccagcagcgggccctgctgtccctgctgttctccgagacctcctggcactacttcctgcacatctccctgggcctgggctccacccacctgacccgggaccgggtgcggaagtccatgtccgtggagcggaccttctccgagatcaacaaggccgaggagcagtactccctgtgccaggagctgtgctccgagctggcccaggacctgcagaaggagcggctgaagggccggaccgtgaccatcaagctgaagaacgtgaacttcgaggtgaagacccgggcctccaccgtgtcctccgtggtgtccaccgccgaggagatcttcgccatcgccaaggagctgctgaagaccgagatcgacgccgacttcccccaccccctgcggctgcggctgatgggcgtgcggatctcctccttccccaacgaggaggaccggaagcaccagcagtccggctccgagacccccggcacctccgagtccgccacccccgagtcccccaagaagaagcggaaggtgtagctagcaccagcctcaagaacacccgaatggagtctctaagctacataataccaacttacactttacaaaatgttgtcccccaaaatgtagccattcgtatctgctcctaataaaaagaaagtttcttcacattctctcgagaaaaaaaaaaaatggaaaaaaaaaaaacggaaaaaaaaaaaaggtaaaaaaaaaaaatataaaaaaaaaaaacataaaaaaaaaaaacgaaaaaaaaaaaacgtaaaaaaaaaaaactcaaaaaaaaaaaagataaaaaaaaaaaacctaaaaaaaaaaaatgtaaaaaaaaaaaagggaaaaaaaaaaaacgcaaaaaaaaaaaacacaaaaaaaaaaaatgcaaaaaaaaaaaatcgaaaaaaaaaaaatctaaaaaaaaaaaacgaaaaaaaaaaaacccaaaaaaaaaaaagacaaaaaaaaaaaatagaaaaaaaaaaagttaaaaaaaaaaaactgaaaaaaaaaaaatttaaaaaaaaaaaatctag

SEQ ID NO: 2539 - DNA, 6574 bp, synthetic construct
  misc_feature 1..6574: note = Synthetic
  source 1..6574: mol_type = other DNA
aggactcactatttgttttcgcgcccagttgcaaaaagtgtcgaaaaaaaaaaaaccaaaaaaaaaaaacaaaaaaaaaaaataattgactaaaagctcagaataaacgctcaactttggccggatctgccaccatgaagcggaccgccgacggctccgagttcgagtcccccaagaagaagcggaaggtggacaagaagtactccatcggcctggacatcggcaccaactccgtgggctgggccgtgatcaccgacgagtacaaggtgccctccaagaagttcaaggtgctgggcaacaccgaccggcactccatcaagaagaacctgatcggcgccctgctgttcgactccggcgagaccgccgaggccacccggctgaagcggaccgcccggcggcggtacacccggcggaagaaccggatctgctacctgcaggagatcttctccaacgagatggccaaggtggacgactccttcttccaccggctggaggagtccttcctggtggaggaggacaagaagcacgagcggcaccccatcttcggcaacatcgtggacgaggtggcctaccacgagaagtaccccaccatctaccacctgcggaagaagctggtggactccaccgacaaggccgacctgcggctgatctacctggccctggcccacatgatcaagttccggggccacttcctgatcgagggcgacctgaaccccgacaactccgacgtggacaagctgttcatccagctggtgcagacctacaaccagctgttcgaggagaaccccatcaacgcctccggcgtggacgccaaggccatcctgtccgcccggctgtccaagtcccggcggctggagaacctgatcgcccagctgcccggcgagaagaagaacggcctgttcggcaacctgatcgccctgtccctgggcctgacccccaacttcaagtccaacttcgacctggccgaggacgccaagctgcagctgtccaaggacacctacgacgacgacctggacaacctgctggcccagatcggcgaccagtacgccgacctgttcctggccgccaagaacctgtccgacgccatcctgctgtccgacatcctgcgggtgaacaccgagatcaccaaggcccccctgtccgcctccatgatcaagcggtacgacgagcaccaccaggacctgaccctgctgaaggccctggtgcggcagcagctgcccgagaagtacaaggagatcttcttcgaccagtccaagaacggctacgccggctacatcgacggcggcgcctcccaggaggagttctacaagttcatcaagcccatcctggagaagatggacggcaccgaggagctgctggtgaagctgaaccgggaggacctgctgcggaagcagcggaccttcgacaacggctccatcccccaccagatccacctgggcgagctgcacgccatcctgcggcggcaggaggacttctaccccttcctgaaggacaaccgggagaagatcgagaagatcctgaccttccggatcccctactacgtgggccccctggcccggggcaactcccggttcgcctggatgacccggaagtccgaggagaccatcaccccctggaacttcgaggaggtggtggacaagggcgcctccgcccagtccttcatcgagcggatgaccaacttcgacaagaacctgcccaacgagaaggtgctgcccaagcactccctgctgtacgagtacttcaccgtgtacaacgagctgaccaaggtgaagtacgtgaccgagggcatgcggaagcccgccttcctgtccggcgagcagaagaaggccatcgtggacctgctgttcaagaccaaccggaaggtgaccgtgaagcagctgaaggaggactacttcaagaagatcgagtgcttcgactccgtggagatctccggcgtggaggaccggttcaacgcctccctgggcacctaccacgacctgctgaagatcatcaaggacaaggacttcctggacaacgaggagaacgaggacatcctggaggacatcgtgctgaccctgaccctgttcgaggaccgggagatgatcgaggagcggctgaagacctacgcccacctgttcgacgacaaggtgatgaagcagctgaagcggcggcggtacaccggctggggccggctgtcccggaagctgatcaacggcatccgggacaagcagtccggcaagaccatcctggacttcctgaagtccgacggcttcgccaaccggaacttcatgcagctgatccacgacgactccctgaccttcaaggaggacatccagaaggcccaggtgtccggccagggcgactccctgcacgagcacatcgccaacctggccggctcccccgccatcaagaagggcatcctgcagaccgtgaaggtggtggacgagctggtgaaggtgatgggccggcacaagcccgagaacatcgtgatcgagatggcccgggagaaccagaccacccagaagggccagaagaactcccgggagcggatgaagcggatcgaggagggcatcaaggagctgggctcccagatcctgaaggagcaccccgtggagaacacccagctgcagaacgagaagctgtacctgtactacctgcagaacggccgggacatgtacgtggaccaggagctggacatcaaccggctgtccgactacgacgtggacgccatcgtgccccagtccttcctgaaggacgactccatcgacaacaaggtgctgacccggtccgacaagaaccggggcaagtccgacaacgtgccctccgaggaggtggtgaagaagatgaagaactactggcggcagctgctgaacgccaagctgatcacccagcggaagttcgacaacctgaccaaggccgagcggggcggcctgtccgagctggacaaggccggcttcatcaagcggcagctggtggagacccggcagatcaccaagcacgtggcccagatcctggactcccggatgaacaccaagtacgacgagaacgacaagctgatccgggaggtgaaggtgatcaccctgaagtccaagctggtgtccgacttccggaaggacttccagttctacaaggtgcgggagatcaacaactaccaccacgcccacgacgcctacctgaacgccgtggtgggcaccgccctgatcaagaagtaccccaagctggagtccgagttcgtgtacggcgactacaaggtgtacgacgtgcggaagatgatcgccaagtccgagcaggagatcggcaaggccaccgccaagtacttcttctactccaacatcatgaacttcttcaagaccgagatcaccctggccaacggcgagatccggaagcggcccctgatcgagaccaacggcgagaccggcgagatcgtgtgggacaagggccgggacttcgccaccgtgcggaaggtgctgtccatgccccaggtgaacatcgtgaagaagaccgaggtgcagaccggcggcttctccaaggagtccatcctgcccaagcggaactccgacaagctgatcgcccggaagaaggactgggaccccaagaagtacggcggcttcgactcccccaccgtggcctactccgtgctggtggtggccaaggtggagaagggcaagtccaagaagctgaagtccgtgaaggagctgctgggcatcaccatcatggagcggtcctccttcgagaagaaccccatcgacttcctggaggccaagggctacaaggaggtgaagaaggacctgatcatcaagctgcccaagtactccctgttcgagctggagaacggccggaagcggatgctggcctccgccggcgagctgcagaagggcaacgagctggccctgccctccaagtacgtgaacttcctgtacctggcctcccactacgagaagctgaagggctcccccgaggacaacgagcagaagcagctgttcgtggagcagcacaagcactacctggacgagatcatcgagcagatctccgagttctccaagcgggtgatcctggccgacgccaacctggacaaggtgctgtccgcctacaacaagcaccgggacaagcccatccgggagcaggccgagaacatcatccacctgttcaccctgaccaacctgggcgcccccgccgccttcaagtacttcgacaccaccatcgaccggaagcggtacacctccaccaaggaggtgctggacgccaccctgatccaccagtccatcaccggcctgtacgagacccggatcgacctgtcccagctgggcggcgacggtaccaaggacagcaccaaagatatcccggaaaccccgagcaaggaccccaagaagaagcggaaggtgggtaccaaggacagcaccaaagatatcccggaaaccccgagcaaggacatggactccaccaaggagaagtgcgactcctacaaggacgacctgctgctgcggatgggcctgaacgacaacaaggccggcatggagggcctggacaaggagaagatcaacaagatcatcatggaggccaccaagggctcccggttctacggcaacgagctgaagaaggagaagcaggtgaaccagcggatcgagaacatgatgcagcagaaggcccagatcacctcccagcagctgcggaaggcccagctgcaggtggaccggttcgccatggagctggagcagtcccggaacctgtccaacaccatcgtgcacatcgacatggacgccttctacgccgccgtggagatgcgggacaaccccgagctgaaggacaagcccatcgccgtgggctccatgtccatgctgtccacctccaactaccacgcccggcggttcggcgtgcgggccgccatgcccggcttcatcgccaagcggctgtgcccccagctgatcatcgtgccccccaacttcgacaagtaccgggccgtgtccaaggaggtgaaggagatcctggccgactacgaccccaacttcatggccatgtccctggacgaggcctacctgaacatcaccaagcacctggaggagcggcagaactggcccgaggacaagcggcggtacttcatcaagatgggctcctccgtggagaacgacaaccccggcaaggaggtgaacaagctgtccgagcacgagcggtccatctcccccctgctgttcgaggagtccccctccgacgtgcagccccccggcgaccccttccaggtgaacttcgaggagcagaacaacccccagatcctgcagaactccgtggtgttcggcacctccgcccaggaggtggtgaaggagatccggttccggatcgagcagaagaccaccctgaccgcctccgccggcatcgcccccaacaccatgctggccaaggtgtgctccgacaagaacaagcccaacggccagtaccagatcctgcccaaccggcaggccgtgatggacttcatcaaggacctgcccatccggaaggtgtccggcatcggcaaggtgaccgagaagatgctgaaggccctgggcatcatcacctgcaccgagctgtaccagcagcgggccctgctgtccctgctgttctccgagacctcctggcactacttcctgcacatctccctgggcctgggctccacccacctgacccgggaccgggtgcggaagtccatgtccgtggagcggaccttctccgagatcaacaaggccgaggagcagtactccctgtgccaggagctgtgctccgagctggcccaggacctgcagaaggagcggctgaagggccggaccgtgaccatcaagctgaagaacgtgaacttcgaggtgaagacccgggcctccaccgtgtcctccgtggtgtccaccgccgaggagatcttcgccatcgccaaggagctgctgaagaccgagatcgacgccgacttcccccaccccctgcggctgcggctgatgggcgtgcggatctcctccttccccaacgaggaggaccggaagcaccagcagtccggctccgagacccccggcacctccgagtccgccacccccgagtcccccaagaagaagcggaaggtgtagctagcaccagcctcaagaacacccgaatggagtctctaagctacataataccaacttacactttacaaaatgttgtcccccaaaatgtagccattcgtatctgctcctaataaaaagaaagtttcttcacattctctcgagaaaaaaaaaaaatggaaaaaaaaaaaacggaaaaaaaaaaaaggtaaaaaaaaaaaatataaaaaaaaaaaacataaaaaaaaaaaacgaaaaaaaaaaaacgtaaaaaaaaaaaactcaaaaaaaaaaaagataaaaaaaaaaaacctaaaaaaaaaaaatgtaaaaaaaaaaaagggaaaaaaaaaaaacgcaaaaaaaaaaaacacaaaaaaaaaaaatgcaaaaaaaaaaaatcgaaaaaaaaaaaatctaaaaaaaaaaaacgaaaaaaaaaaaacccaaaaaaaaaaaagacaaaaaaaaaaaatagaaaaaaaaaaagttaaaaaaaaaaaactgaaaaaaaaaaaatttaaaaaaaaaaaatctag

SEQ ID NO: 2540 - DNA, 6512 bp, synthetic construct
  misc_feature 1..6512: note = Synthetic
  source 1..6512: mol_type = other DNA
aggactcactatttgttttcgcgcccagttgcaaaaagtgtcgaagctcagaataaacgctcaactttggccggatctgccaccatgggcaagcggaccgccgacggctccgagttcgagtcccccaagaagaagcggaaggtggacaagaagtactccatcggcctggacatcggcaccaactccgtgggctgggccgtgatcaccgacgagtacaaggtgccctccaagaagttcaaggtgctgggcaacaccgaccggcactccatcaagaagaacctgatcggcgccctgctgttcgactccggcgagaccgccgaggccacccggctgaagcggaccgcccggcggcggtacacccggcggaagaaccggatctgctacctgcaggagatcttctccaacgagatggccaaggtggacgactccttcttccaccggctggaggagtccttcctggtggaggaggacaagaagcacgagcggcaccccatcttcggcaacatcgtggacgaggtggcctaccacgagaagtaccccaccatctaccacctgcggaagaagctggtggactccaccgacaaggccgacctgcggctgatctacctggccctggcccacatgatcaagttccggggccacttcctgatcgagggcgacctgaaccccgacaactccgacgtggacaagctgttcatccagctggtgcagacctacaaccagctgttcgaggagaaccccatcaacgcctccggcgtggacgccaaggccatcctgtccgcccggctgtccaagtcccggcggctggagaacctgatcgcccagctgcccggcgagaagaagaacggcctgttcggcaacctgatcgccctgtccctgggcctgacccccaacttcaagtccaacttcgacctggccgaggacgccaagctgcagctgtccaaggacacctacgacgacgacctggacaacctgctggcccagatcggcgaccagtacgccgacctgttcctggccgccaagaacctgtccgacgccatcctgctgtccgacatcctgcgggtgaacaccgagatcaccaaggcccccctgtccgcctccatgatcaagcggtacgacgagcaccaccaggacctgaccctgctgaaggccctggtgcggcagcagctgcccgagaagtacaaggagatcttcttcgaccagtccaagaacggctacgccggctacatcgacggcggcgcctcccaggaggagttctacaagttcatcaagcccatcctggagaagatggacggcaccgaggagctgctggtgaagctgaaccgggaggacctgctgcggaagcagcggaccttcgacaacggctccatcccccaccagatccacctgggcgagctgcacgccatcctgcggcggcaggaggacttctaccccttcctgaaggacaaccgggagaagatcgagaagatcctgaccttccggatcccctactacgtgggccccctggcccggggcaactcccggttcgcctggatgacccggaagtccgaggagaccatcaccccctggaacttcgaggaggtggtggacaagggcgcctccgcccagtccttcatcgagcggatgaccaacttcgacaagaacctgcccaacgagaaggtgctgcccaagcactccctgctgtacgagtacttcaccgtgtacaacgagctgaccaaggtgaagtacgtgaccgagggcatgcggaagcccgccttcctgtccggcgagcagaagaaggccatcgtggacctgctgttcaagaccaaccggaaggtgaccgtgaagcagctgaaggaggactacttcaagaagatcgagtgcttcgactccgtggagatctccggcgtggaggaccggttcaacgcctccctgggcacctaccacgacctgctgaagatcatcaaggacaaggacttcctggacaacgaggagaacgaggacatcctggaggacatcgtgctgaccctgaccctgttcgaggaccgggagatgatcgaggagcggctgaagacctacgcccacctgttcgacgacaaggtgatgaagcagctgaagcggcggcggtacaccggctggggccggctgtcccggaagctgatcaacggcatccgggacaagcagtccggcaagaccatcctggacttcctgaagtccgacggcttcgccaaccggaacttcatgcagctgatccacgacgactccctgaccttcaaggaggacatccagaaggcccaggtgtccggccagggcgactccctgcacgagcacatcgccaacctggccggctcccccgccatcaagaagggcatcctgcagaccgtgaaggtggtggacgagctggtgaaggtgatgggccggcacaagcccgagaacatcgtgatcgagatggcccgggagaaccagaccacccagaagggccagaagaactcccgggagcggatgaagcggatcgaggagggcatcaaggagctgggctcccagatcctgaaggagcaccccgtggagaacacccagctgcagaacgagaagctgtacctgtactacctgcagaacggccgggacatgtacgtggaccaggagctggacatcaaccggctgtccgactacgacgtggacgccatcgtgccccagtccttcctgaaggacgactccatcgacaacaaggtgctgacccggtccgacaagaaccggggcaagtccgacaacgtgccctccgaggaggtggtgaagaagatgaagaactactggcggcagctgctgaacgccaagctgatcacccagcggaagttcgacaacctgaccaaggccgagcggggcggcctgtccgagctggacaaggccggcttcatcaagcggcagctggtggagacccggcagatcaccaagcacgtggcccagatcctggactcccggatgaacaccaagtacgacgagaacgacaagctgatccgggaggtgaaggtgatcaccctgaagtccaagctggtgtccgacttccggaaggacttccagttctacaaggtgcgggagatcaacaactaccaccacgcccacgacgcctacctgaacgccgtggtgggcaccgccctgatcaagaagtaccccaagctggagtccgagttcgtgtacggcgactacaaggtgtacgacgtgcggaagatgatcgccaagtccgagcaggagatcggcaaggccaccgccaagtacttcttctactccaacatcatgaacttcttcaagaccgagatcaccctggccaacggcgagatccggaagcggcccctgatcgagaccaacggcgagaccggcgagatcgtgtgggacaagggccgggacttcgccaccgtgcggaaggtgctgtccatgccccaggtgaacatcgtgaagaagaccgaggtgcagaccggcggcttctccaaggagtccatcctgcccaagcggaactccgacaagctgatcgcccggaagaaggactgggaccccaagaagtacggcggcttcgactcccccaccgtggcctactccgtgctggtggtggccaaggtggagaagggcaagtccaagaagctgaagtccgtgaaggagctgctgggcatcaccatcatggagcggtcctccttcgagaagaaccccatcgacttcctggaggccaagggctacaaggaggtgaagaaggacctgatcatcaagctgcccaagtactccctgttcgagctggagaacggccggaagcggatgctggcctccgccggcgagctgcagaagggcaacgagctggccctgccctccaagtacgtgaacttcctgtacctggcctcccactacgagaagctgaagggctcccccgaggacaacgagcagaagcagctgttcgtggagcagcacaagcactacctggacgagatcatcgagcagatctccgagttctccaagcgggtgatcctggccgacgccaacctggacaaggtgctgtccgcctacaacaagcaccgggacaagcccatccgggagcaggccgagaacatcatccacctgttcaccctgaccaacctgggcgcccccgccgccttcaagtacttcgacaccaccatcgaccggaagcggtacacctccaccaaggaggtgctggacgccaccctgatccaccagtccatcaccggcctgtacgagacccggatcgacctgtcccagctgggcggcgactccggcggctcctccggcggctccaagcggaccgccgacggctccgagttcgagtcccccaagaagaagcggaaggtgtccggcggctcctccggcggctccatggactccaccaaggagaagtgcgactcctacaaggacgacctgctgctgcggatgggcctgaacgacaacaaggccggcatggagggcctggacaaggagaagatcaacaagatcatcatggaggccaccaagggctcccggttctacggcaacgagctgaagaaggagaagcaggtgaaccagcggatcgagaacatgatgcagcagaaggcccagatcacctcccagcagctgcggaaggcccagctgcaggtggaccggttcgccatggagctggagcagtcccggaacctgtccaacaccatcgtgcacatcgacatggacgccttctacgccgccgtggagatgcgggacaaccccgagctgaaggacaagcccatcgccgtgggctccatgtccatgctgtccacctccaactaccacgcccggcggttcggcgtgcgggccgccatgcccggcttcatcgccaagcggctgtgcccccagctgatcatcgtgccccccaacttcgacaagtaccgggccgtgtccaaggaggtgaaggagatcctggccgactacgaccccaacttcatggccatgtccctggacgaggcctacctgaacatcaccaagcacctggaggagcggcagaactggcccgaggacaagcggcggtacttcatcaagatgggctcctccgtggagaacgacaaccccggcaaggaggtgaacaagctgtccgagcacgagcggtccatctcccccctgctgttcgaggagtccccctccgacgtgcagccccccggcgaccccttccaggtgaacttcgaggagcagaacaacccccagatcctgcagaactccgtggtgttcggcacctccgcccaggaggtggtgaaggagatccggttccggatcgagcagaagaccaccctgaccgcctccgccggcatcgcccccaacaccatgctggccaaggtgtgctccgacaagaacaagcccaacggccagtaccagatcctgcccaaccggcaggccgtgatggacttcatcaaggacctgcccatccggaaggtgtccggcatcggcaaggtgaccgagaagatgctgaaggccctgggcatcatcacctgcaccgagctgtaccagcagcgggccctgctgtccctgctgttctccgagacctcctggcactacttcctgcacatctccctgggcctgggctccacccacctgacccgggaccgggtgcggaagtccatgtccgtggagcggaccttctccgagatcaacaaggccgaggagcagtactccctgtgccaggagctgtgctccgagctggcccaggacctgcagaaggagcggctgaagggccggaccgtgaccatcaagctgaagaacgtgaacttcgaggtgaagacccgggcctccaccgtgtcctccgtggtgtccaccgccgaggagatcttcgccatcgccaaggagctgctgaagaccgagatcgacgccgacttcccccaccccctgcggctgcggctgatgggcgtgcggatctcctccttccccaacgaggaggaccggaagcaccagcagggcggcggctccggcaagcggaccgccgacggctccggcggcggctcccccaagaagaagcggaaggtgtagctagcaccagcctcaagaacacccgaatggagtctctaagctacataataccaacttacactttacaaaatgttgtcccccaaaatgtagccattcgtatctgctcctaataaaaagaaagtttcttcacattctctcgagaaaaaaaaaaaatggaaaaaaaaaaaacggaaaaaaaaaaaaggtaaaaaaaaaaaatataaaaaaaaaaaacataaaaaaaaaaaacgaaaaaaaaaaaacgtaaaaaaaaaaaactcaaaaaaaaaaaagataaaaaaaaaaaacctaaaaaaaaaaaatgtaaaaaaaaaaaagggaaaaaaaaaaaacgcaaaaaaaaaaaacacaaaaaaaaaaaatgcaaaaaaaaaaaatcgaaaaaaaaaaaatctaaaaaaaaaaaacgaaaaaaaaaaaacccaaaaaaaaaaaagacaaaaaaaaaaaatagaaaaaaaaaaagttaaaaaaaaaaaactgaaaaaaaaaaaatttaaaaaaaaaaaatctag

SEQ ID NO: 2541-2543 - skipped (3 entries)

SEQ ID NO: 2544 - DNA, 6509 bp, synthetic construct
  misc_feature 1..6509: note = Synthetic
  source 1..6509: mol_type = other DNA
aggactcactatttgttttcgcgcccagttgcaaaaagtgtcgaagctcagaataaacgctcaactttggccggatctgccaccatgaagcggaccgccgacggctccgagttcgagtcccccaagaagaagcggaaggtggacaagaagtactccatcggcctggacatcggcaccaactccgtgggctgggccgtgatcaccgacgagtacaaggtgccctccaagaagttcaaggtgctgggcaacaccgaccggcactccatcaagaagaacctgatcggcgccctgctgttcgactccggcgagaccgccgaggccacccggctgaagcggaccgcccggcggcggtacacccggcggaagaaccggatctgctacctgcaggagatcttctccaacgagatggccaaggtggacgactccttcttccaccggctggaggagtccttcctggtggaggaggacaagaagcacgagcggcaccccatcttcggcaacatcgtggacgaggtggcctaccacgagaagtaccccaccatctaccacctgcggaagaagctggtggactccaccgacaaggccgacctgcggctgatctacctggccctggcccacatgatcaagttccggggccacttcctgatcgagggcgacctgaaccccgacaactccgacgtggacaagctgttcatccagctggtgcagacctacaaccagctgttcgaggagaaccccatcaacgcctccggcgtggacgccaaggccatcctgtccgcccggctgtccaagtcccggcggctggagaacctgatcgcccagctgcccggcgagaagaagaacggcctgttcggcaacctgatcgccctgtccctgggcctgacccccaacttcaagtccaacttcgacctggccgaggacgccaagctgcagctgtccaaggacacctacgacgacgacctggacaacctgctggcccagatcggcgaccagtacgccgacctgttcctggccgccaagaacctgtccgacgccatcctgctgtccgacatcctgcgggtgaacaccgagatcaccaaggcccccctgtccgcctccatgatcaagcggtacgacgagcaccaccaggacctgaccctgctgaaggccctggtgcggcagcagctgcccgagaagtacaaggagatcttcttcgaccagtccaagaacggctacgccggctacatcgacggcggcgcctcccaggaggagttctacaagttcatcaagcccatcctggagaagatggacggcaccgaggagctgctggtgaagctgaaccgggaggacctgctgcggaagcagcggaccttcgacaacggctccatcccccaccagatccacctgggcgagctgcacgccatcctgcggcggcaggaggacttctaccccttcctgaaggacaaccgggagaagatcgagaagatcctgaccttccggatcccctactacgtgggccccctggcccggggcaactcccggttcgcctggatgacccggaagtccgaggagaccatcaccccctggaacttcgaggaggtggtggacaagggcgcctccgcccagtccttcatcgagcggatgaccaacttcgacaagaacctgcccaacgagaaggtgctgcccaagcactccctgctgtacgagtacttcaccgtgtacaacgagctgaccaaggtgaagtacgtgaccgagggcatgcggaagcccgccttcctgtccggcgagcagaagaaggccatcgtggacctgctgttcaagaccaaccggaaggtgaccgtgaagcagctgaaggaggactacttcaagaagatcgagtgcttcgactccgtggagatctccggcgtggaggaccggttcaacgcctccctgggcacctaccacgacctgctgaagatcatcaaggacaaggacttcctggacaacgaggagaacgaggacatcctggaggacatcgtgctgaccctgaccctgttcgaggaccgggagatgatcgaggagcggctgaagacctacgcccacctgttcgacgacaaggtgatgaagcagctgaagcggcggcggtacaccggctggggccggctgtcccggaagctgatcaacggcatccgggacaagcagtccggcaagaccatcctggacttcctgaagtccgacggcttcgccaaccggaacttcatgcagctgatccacgacgactccctgaccttcaaggaggacatccagaaggcccaggtgtccggccagggcgactccctgcacgagcacatcgccaacctggccggctcccccgccatcaagaagggcatcctgcagaccgtgaaggtggtggacgagctggtgaaggtgatgggccggcacaagcccgagaacatcgtgatcgagatggcccgggagaaccagaccacccagaagggccagaagaactcccgggagcggatgaagcggatcgaggagggcatcaaggagctgggctcccagatcctgaaggagcaccccgtggagaacacccagctgcagaacgagaagctgtacctgtactacctgcagaacggccgggacatgtacgtggaccaggagctggacatcaaccggctgtccgactacgacgtggacgccatcgtgccccagtccttcctgaaggacgactccatcgacaacaaggtgctgacccggtccgacaagaaccggggcaagtccgacaacgtgccctccgaggaggtggtgaagaagatgaagaactactggcggcagctgctgaacgccaagctgatcacccagcggaagttcgacaacctgaccaaggccgagcggggcggcctgtccgagctggacaaggccggcttcatcaagcggcagctggtggagacccggcagatcaccaagcacgtggcccagatcctggactcccggatgaacaccaagtacgacgagaacgacaagctgatccgggaggtgaaggtgatcaccctgaagtccaagctggtgtccgacttccggaaggacttccagttctacaaggtgcgggagatcaacaactaccaccacgcccacgacgcctacctgaacgccgtggtgggcaccgccctgatcaagaagtaccccaagctggagtccgagttcgtgtacggcgactacaaggtgtacgacgtgcggaagatgatcgccaagtccgagcaggagatcggcaaggccaccgccaagtacttcttctactccaacatcatgaacttcttcaagaccgagatcaccctggccaacggcgagatccggaagcggcccctgatcgagaccaacggcgagaccggcgagatcgtgtgggacaagggccgggacttcgccaccgtgcggaaggtgctgtccatgccccaggtgaacatcgtgaagaagaccgaggtgcagaccggcggcttctccaaggagtccatcctgcccaagcggaactccgacaagctgatcgcccggaagaaggactgggaccccaagaagtacggcggcttcgactcccccaccgtggcctactccgtgctggtggtggccaaggtggagaagggcaagtccaagaagctgaagtccgtgaaggagctgctgggcatcaccatcatggagcggtcctccttcgagaagaaccccatcgacttcctggaggccaagggctacaaggaggtgaagaaggacctgatcatcaagctgcccaagtactccctgttcgagctggagaacggccggaagcggatgctggcctccgccggcgagctgcagaagggcaacgagctggccctgccctccaagtacgtgaacttcctgtacctggcctcccactacgagaagctgaagggctcccccgaggacaacgagcagaagcagctgttcgtggagcagcacaagcactacctggacgagatcatcgagcagatctccgagttctccaagcgggtgatcctggccgacgccaacctggacaaggtgctgtccgcctacaacaagcaccgggacaagcccatccgggagcaggccgagaacatcatccacctgttcaccctgaccaacctgggcgcccccgccgccttcaagtacttcgacaccaccatcgaccggaagcggtacacctccaccaaggaggtgctggacgccaccctgatccaccagtccatcaccggcctgtacgagacccggatcgacctgtcccagctgggcggcgactccggcggctcctccggcggctccaagcggaccgccgacggctccgagttcgagtcccccaagaagaagcggaaggtgtccggcggctcctccggcggctccatggactccaccaaggagaagtgcgactcctacaaggacgacctgctgctgcggatgggcctgaacgacaacaaggccggcatggagggcctggacaaggagaagatcaacaagatcatcatggaggccaccaagggctcccggttctacggcaacgagctgaagaaggagaagcaggtgaaccagcggatcgagaacatgatgcagcagaaggcccagatcacctcccagcagctgcggaaggcccagctgcaggtggaccggttcgccatggagctggagcagtcccggaacctgtccaacaccatcgtgcacatcgacatggacgccttctacgccgccgtggagatgcgggacaaccccgagctgaaggacaagcccatcgccgtgggctccatgtccatgctgtccacctccaactaccacgcccggcggttcggcgtgcgggccgccatgcccggcttcatcgccaagcggctgtgcccccagctgatcatcgtgccccccaacttcgacaagtaccgggccgtgtccaaggaggtgaaggagatcctggccgactacgaccccaacttcatggccatgtccctggacgaggcctacctgaacatcaccaagcacctggaggagcggcagaactggcccgaggacaagcggcggtacttcatcaagatgggctcctccgtggagaacgacaaccccggcaaggaggtgaacaagctgtccgagcacgagcggtccatctcccccctgctgttcgaggagtccccctccgacgtgcagccccccggcgaccccttccaggtgaacttcgaggagcagaacaacccccagatcctgcagaactccgtggtgttcggcacctccgcccaggaggtggtgaaggagatccggttccggatcgagcagaagaccaccctgaccgcctccgccggcatcgcccccaacaccatgctggccaaggtgtgctccgacaagaacaagcccaacggccagtaccagatcctgcccaaccggcaggccgtgatggacttcatcaaggacctgcccatccggaaggtgtccggcatcggcaaggtgaccgagaagatgctgaaggccctgggcatcatcacctgcaccgagctgtaccagcagcgggccctgctgtccctgctgttctccgagacctcctggcactacttcctgcacatctccctgggcctgggctccacccacctgacccgggaccgggtgcggaagtccatgtccgtggagcggaccttctccgagatcaacaaggccgaggagcagtactccctgtgccaggagctgtgctccgagctggcccaggacctgcagaaggagcggctgaagggccggaccgtgaccatcaagctgaagaacgtgaacttcgaggtgaagacccgggcctccaccgtgtcctccgtggtgtccaccgccgaggagatcttcgccatcgccaaggagctgctgaagaccgagatcgacgccgacttcccccaccccctgcggctgcggctgatgggcgtgcggatctcctccttccccaacgaggaggaccggaagcaccagcagtccggctccgagacccccggcacctccgagtccgccacccccgagtcccccaagaagaagcggaaggtgtagctagcaccagcctcaagaacacccgaatggagtctctaagctacataataccaacttacactttacaaaatgttgtcccccaaaatgtagccattcgtatctgctcctaataaaaagaaagtttcttcacattctctcgagaaaaaaaaaaaatggaaaaaaaaaaaacggaaaaaaaaaaaaggtaaaaaaaaaaaatataaaaaaaaaaaacataaaaaaaaaaaacgaaaaaaaaaaaacgtaaaaaaaaaaaactcaaaaaaaaaaaagataaaaaaaaaaaacctaaaaaaaaaaaatgtaaaaaaaaaaaagggaaaaaaaaaaaacgcaaaaaaaaaaaacacaaaaaaaaaaaatgcaaaaaaaaaaaatcgaaaaaaaaaaaatctaaaaaaaaaaaacgaaaaaaaaaaaacccaaaaaaaaaaaagacaaaaaaaaaaaatagaaaaaaaaaaagttaaaaaaaaaaaactgaaaaaaaaaaaatttaaaaaaaaaaaatctag

SEQ ID NO: 2545 - DNA, 6554 bp, synthetic construct
  misc_feature 1..6554: note = Synthetic
  source 1..6554: mol_type = other DNA
aggactcactatttgttttcgcgcccagttgcaaaaagtgtcgaagctcagaataaacgctcaactttggccggatctgccaccatgaagcggaccgccgacggctccgagttcgagtcccccaagaagaagcggaaggtggacaagaagtactccatcggcctggacatcggcaccaactccgtgggctgggccgtgatcaccgacgagtacaaggtgccctccaagaagttcaaggtgctgggcaacaccgaccggcactccatcaagaagaacctgatcggcgccctgctgttcgactccggcgagaccgccgaggccacccggctgaagcggaccgcccggcggcggtacacccggcggaagaaccggatctgctacctgcaggagatcttctccaacgagatggccaaggtggacgactccttcttccaccggctggaggagtccttcctggtggaggaggacaagaagcacgagcggcaccccatcttcggcaacatcgtggacgaggtggcctaccacgagaagtaccccaccatctaccacctgcggaagaagctggtggactccaccgacaaggccgacctgcggctgatctacctggccctggcccacatgatcaagttccggggccacttcctgatcgagggcgacctgaaccccgacaactccgacgtggacaagctgttcatccagctggtgcagacctacaaccagctgttcgaggagaaccccatcaacgcctccggcgtggacgccaaggccatcctgtccgcccggctgtccaagtcccggcggctggagaacctgatcgcccagctgcccggcgagaagaagaacggcctgttcggcaacctgatcgccctgtccctgggcctgacccccaacttcaagtccaacttcgacctggccgaggacgccaagctgcagctgtccaaggacacctacgacgacgacctggacaacctgctggcccagatcggcgaccagtacgccgacctgttcctggccgccaagaacctgtccgacgccatcctgctgtccgacatcctgcgggtgaacaccgagatcaccaaggcccccctgtccgcctccatgatcaagcggtacgacgagcaccaccaggacctgaccctgctgaaggccctggtgcggcagcagctgcccgagaagtacaaggagatcttcttcgaccagtccaagaacggctacgccggctacatcgacggcggcgcctcccaggaggagttctacaagttcatcaagcccatcctggagaagatggacggcaccgaggagctgctggtgaagctgaaccgggaggacctgctgcggaagcagcggaccttcgacaacggctccatcccccaccagatccacctgggcgagctgcacgccatcctgcggcggcaggaggacttctaccccttcctgaaggacaaccgggagaagatcgagaagatcctgaccttccggatcccctactacgtgggccccctggcccggggcaactcccggttcgcctggatgacccggaagtccgaggagaccatcaccccctggaacttcgaggaggtggtggacaagggcgcctccgcccagtccttcatcgagcggatgaccaacttcgacaagaacctgcccaacgagaaggtgctgcccaagcactccctgctgtacgagtacttcaccgtgtacaacgagctgaccaaggtgaagtacgtgaccgagggcatgcggaagcccgccttcctgtccggcgagcagaagaaggccatcgtggacctgctgttcaagaccaaccggaaggtgaccgtgaagcagctgaaggaggactacttcaagaagatcgagtgcttcgactccgtggagatctccggcgtggaggaccggttcaacgcctccctgggcacctaccacgacctgctgaagatcatcaaggacaaggacttcctggacaacgaggagaacgaggacatcctggaggacatcgtgctgaccctgaccctgttcgaggaccgggagatgatcgaggagcggctgaagacctacgcccacctgttcgacgacaaggtgatgaagcagctgaagcggcggcggtacaccggctggggccggctgtcccggaagctgatcaacggcatccgggacaagcagtccggcaagaccatcctggacttcctgaagtccgacggcttcgccaaccggaacttcatgcagctgatccacgacgactccctgaccttcaaggaggacatccagaaggcccaggtgtccggccagggcgactccctgcacgagcacatcgccaacctggccggctcccccgccatcaagaagggcatcctgcagaccgtgaaggtggtggacgagctggtgaaggtgatgggccggcacaagcccgagaacatcgtgatcgagatggcccgggagaaccagaccacccagaagggccagaagaactcccgggagcggatgaagcggatcgaggagggcatcaaggagctgggctcccagatcctgaaggagcaccccgtggagaacacccagctgcagaacgagaagctgtacctgtactacctgcagaacggccgggacatgtacgtggaccaggagctggacatcaaccggctgtccgactacgacgtggacgccatcgtgccccagtccttcctgaaggacgactccatcgacaacaaggtgctgacccggtccgacaagaaccggggcaagtccgacaacgtgccctccgaggaggtggtgaagaagatgaagaactactggcggcagctgctgaacgccaagctgatcacccagcggaagttcgacaacctgaccaaggccgagcggggcggcctgtccgagctggacaaggccggcttcatcaagcggcagctggtggagacccggcagatcaccaagcacgtggcccagatcctggactcccggatgaacaccaagtacgacgagaacgacaagctgatccgggaggtgaaggtgatcaccctgaagtccaagctggtgtccgacttccggaaggacttccagttctacaaggtgcgggagatcaacaactaccaccacgcccacgacgcctacctgaacgccgtggtgggcaccgccctgatcaagaagtaccccaagctggagtccgagttcgtgtacggcgactacaaggtgtacgacgtgcggaagatgatcgccaagtccgagcaggagatcggcaaggccaccgccaagtacttcttctactccaacatcatgaacttcttcaagaccgagatcaccctggccaacggcgagatccggaagcggcccctgatcgagaccaacggcgagaccggcgagatcgtgtgggacaagggccgggacttcgccaccgtgcggaaggtgctgtccatgccccaggtgaacatcgtgaagaagaccgaggtgcagaccggcggcttctccaaggagtccatcctgcccaagcggaactccgacaagctgatcgcccggaagaaggactgggaccccaagaagtacggcggcttcgactcccccaccgtggcctactccgtgctggtggtggccaaggtggagaagggcaagtccaagaagctgaagtccgtgaaggagctgctgggcatcaccatcatggagcggtcctccttcgagaagaaccccatcgacttcctggaggccaagggctacaaggaggtgaagaaggacctgatcatcaagctgcccaagtactccctgttcgagctggagaacggccggaagcggatgctggcctccgccggcgagctgcagaagggcaacgagctggccctgccctccaagtacgtgaacttcctgtacctggcctcccactacgagaagctgaagggctcccccgaggacaacgagcagaagcagctgttcgtggagcagcacaagcactacctggacgagatcatcgagcagatctccgagttctccaagcgggtgatcctggccgacgccaacctggacaaggtgctgtccgcctacaacaagcaccgggacaagcccatccgggagcaggccgagaacatcatccacctgttcaccctgaccaacctgggcgcccccgccgccttcaagtacttcgacaccaccatcgaccggaagcggtacacctccaccaaggaggtgctggacgccaccctgatccaccagtccatcaccggcctgtacgagacccggatcgacctgtcccagctgggcggcgacggcgcccccgagtccgccaccgagtccggcggcacctccaccgagtccgagggctccgccggccccaagaagaagcggaaggtgacctccaccgagtccgagggctccgccggctccgccggctccacctccggctcctcctccggcatggactccaccaaggagaagtgcgactcctacaaggacgacctgctgctgcggatgggcctgaacgacaacaaggccggcatggagggcctggacaaggagaagatcaacaagatcatcatggaggccaccaagggctcccggttctacggcaacgagctgaagaaggagaagcaggtgaaccagcggatcgagaacatgatgcagcagaaggcccagatcacctcccagcagctgcggaaggcccagctgcaggtggaccggttcgccatggagctggagcagtcccggaacctgtccaacaccatcgtgcacatcgacatggacgccttctacgccgccgtggagatgcgggacaaccccgagctgaaggacaagcccatcgccgtgggctccatgtccatgctgtccacctccaactaccacgcccggcggttcggcgtgcgggccgccatgcccggcttcatcgccaagcggctgtgcccccagctgatcatcgtgccccccaacttcgacaagtaccgggccgtgtccaaggaggtgaaggagatcctggccgactacgaccccaacttcatggccatgtccctggacgaggcctacctgaacatcaccaagcacctggaggagcggcagaactggcccgaggacaagcggcggtacttcatcaagatgggctcctccgtggagaacgacaaccccggcaaggaggtgaacaagctgtccgagcacgagcggtccatctcccccctgctgttcgaggagtccccctccgacgtgcagccccccggcgaccccttccaggtgaacttcgaggagcagaacaacccccagatcctgcagaactccgtggtgttcggcacctccgcccaggaggtggtgaaggagatccggttccggatcgagcagaagaccaccctgaccgcctccgccggcatcgcccccaacaccatgctggccaaggtgtgctccgacaagaacaagcccaacggccagtaccagatcctgcccaaccggcaggccgtgatggacttcatcaaggacctgcccatccggaaggtgtccggcatcggcaaggtgaccgagaagatgctgaaggccctgggcatcatcacctgcaccgagctgtaccagcagcgggccctgctgtccctgctgttctccgagacctcctggcactacttcctgcacatctccctgggcctgggctccacccacctgacccgggaccgggtgcggaagtccatgtccgtggagcggaccttctccgagatcaacaaggccgaggagcagtactccctgtgccaggagctgtgctccgagctggcccaggacctgcagaaggagcggctgaagggccggaccgtgaccatcaagctgaagaacgtgaacttcgaggtgaagacccgggcctccaccgtgtcctccgtggtgtccaccgccgaggagatcttcgccatcgccaaggagctgctgaagaccgagatcgacgccgacttcccccaccccctgcggctgcggctgatgggcgtgcggatctcctccttccccaacgaggaggaccggaagcaccagcagtccggctccgagacccccggcacctccgagtccgccacccccgagtcccccaagaagaagcggaaggtgtagctagcaccagcctcaagaacacccgaatggagtctctaagctacataataccaacttacactttacaaaatgttgtcccccaaaatgtagccattcgtatctgctcctaataaaaagaaagtttcttcacattctctcgagaaaaaaaaaaaatggaaaaaaaaaaaacggaaaaaaaaaaaaggtaaaaaaaaaaaatataaaaaaaaaaaacataaaaaaaaaaaacgaaaaaaaaaaaacgtaaaaaaaaaaaactcaaaaaaaaaaaagataaaaaaaaaaaacctaaaaaaaaaaaatgtaaaaaaaaaaaagggaaaaaaaaaaaacgcaaaaaaaaaaaacacaaaaaaaaaaaatgcaaaaaaaaaaaatcgaaaaaaaaaaaatctaaaaaaaaaaaacgaaaaaaaaaaaacccaaaaaaaaaaaagacaaaaaaaaaaaatagaaaaaaaaaaagttaaaaaaaaaaaactgaaaaaaaaaaaatttaaaaaaaaaaaatctag

SEQ ID NO: 2546 - DNA, 6526 bp, synthetic construct
  misc_feature 1..6526: note = Synthetic
  source 1..6526: mol_type = other DNA
aggaagctcagaataaacgctcaactttggccggatctgccaccatgaagcggaccgccgacggctccgagttcgagtcccccaagaagaagcggaaggtggacaagaagtactccatcggcctggacatcggcaccaactccgtgggctgggccgtgatcaccgacgagtacaaggtgccctccaagaagttcaaggtgctgggcaacaccgaccggcactccatcaagaagaacctgatcggcgccctgctgttcgactccggcgagaccgccgaggccacccggctgaagcggaccgcccggcggcggtacacccggcggaagaaccggatctgctacctgcaggagatcttctccaacgagatggccaaggtggacgactccttcttccaccggctggaggagtccttcctggtggaggaggacaagaagcacgagcggcaccccatcttcggcaacatcgtggacgaggtggcctaccacgagaagtaccccaccatctaccacctgcggaagaagctggtggactccaccgacaaggccgacctgcggctgatctacctggccctggcccacatgatcaagttccggggccacttcctgatcgagggcgacctgaaccccgacaactccgacgtggacaagctgttcatccagctggtgcagacctacaaccagctgttcgaggagaaccccatcaacgcctccggcgtggacgccaaggccatcctgtccgcccggctgtccaagtcccggcggctggagaacctgatcgcccagctgcccggcgagaagaagaacggcctgttcggcaacctgatcgccctgtccctgggcctgacccccaacttcaagtccaacttcgacctggccgaggacgccaagctgcagctgtccaaggacacctacgacgacgacctggacaacctgctggcccagatcggcgaccagtacgccgacctgttcctggccgccaagaacctgtccgacgccatcctgctgtccgacatcctgcgggtgaacaccgagatcaccaaggcccccctgtccgcctccatgatcaagcggtacgacgagcaccaccaggacctgaccctgctgaaggccctggtgcggcagcagctgcccgagaagtacaaggagatcttcttcgaccagtccaagaacggctacgccggctacatcgacggcggcgcctcccaggaggagttctacaagttcatcaagcccatcctggagaagatggacggcaccgaggagctgctggtgaagctgaaccgggaggacctgctgcggaagcagcggaccttcgacaacggctccatcccccaccagatccacctgggcgagctgcacgccatcctgcggcggcaggaggacttctaccccttcctgaaggacaaccgggagaagatcgagaagatcctgaccttccggatcccctactacgtgggccccctggcccggggcaactcccggttcgcctggatgacccggaagtccgaggagaccatcaccccctggaacttcgaggaggtggtggacaagggcgcctccgcccagtccttcatcgagcggatgaccaacttcgacaagaacctgcccaacgagaaggtgctgcccaagcactccctgctgtacgagtacttcaccgtgtacaacgagctgaccaaggtgaagtacgtgaccgagggcatgcggaagcccgccttcctgtccggcgagcagaagaaggccatcgtggacctgctgttcaagaccaaccggaaggtgaccgtgaagcagctgaaggaggactacttcaagaagatcgagtgcttcgactccgtggagatctccggcgtggaggaccggttcaacgcctccctgggcacctaccacgacctgctgaagatcatcaaggacaaggacttcctggacaacgaggagaacgaggacatcctggaggacatcgtgctgaccctgaccctgttcgaggaccgggagatgatcgaggagcggctgaagacctacgcccacctgttcgacgacaaggtgatgaagcagctgaagcggcggcggtacaccggctggggccggctgtcccggaagctgatcaacggcatccgggacaagcagtccggcaagaccatcctggacttcctgaagtccgacggcttcgccaaccggaacttcatgcagctgatccacgacgactccctgaccttcaaggaggacatccagaaggcccaggtgtccggccagggcgactccctgcacgagcacatcgccaacctggccggctcccccgccatcaagaagggcatcctgcagaccgtgaaggtggtggacgagctggtgaaggtgatgggccggcacaagcccgagaacatcgtgatcgagatggcccgggagaaccagaccacccagaagggccagaagaactcccgggagcggatgaagcggatcgaggagggcatcaaggagctgggctcccagatcctgaaggagcaccccgtggagaacacccagctgcagaacgagaagctgtacctgtactacctgcagaacggccgggacatgtacgtggaccaggagctggacatcaaccggctgtccgactacgacgtggacgccatcgtgccccagtccttcctgaaggacgactccatcgacaacaaggtgctgacccggtccgacaagaaccggggcaagtccgacaacgtgccctccgaggaggtggtgaagaagatgaagaactactggcggcagctgctgaacgccaagctgatcacccagcggaagttcgacaacctgaccaaggccgagcggggcggcctgtccgagctggacaaggccggcttcatcaagcggcagctggtggagacccggcagatcaccaagcacgtggcccagatcctggactcccggatgaacaccaagtacgacgagaacgacaagctgatccgggaggtgaaggtgatcaccctgaagtccaagctggtgtccgacttccggaaggacttccagttctacaaggtgcgggagatcaacaactaccaccacgcccacgacgcctacctgaacgccgtggtgggcaccgccctgatcaagaagtaccccaagctggagtccgagttcgtgtacggcgactacaaggtgtacgacgtgcggaagatgatcgccaagtccgagcaggagatcggcaaggccaccgccaagtacttcttctactccaacatcatgaacttcttcaagaccgagatcaccctggccaacggcgagatccggaagcggcccctgatcgagaccaacggcgagaccggcgagatcgtgtgggacaagggccgggacttcgccaccgtgcggaaggtgctgtccatgccccaggtgaacatcgtgaagaagaccgaggtgcagaccggcggcttctccaaggagtccatcctgcccaagcggaactccgacaagctgatcgcccggaagaaggactgggaccccaagaagtacggcggcttcgactcccccaccgtggcctactccgtgctggtggtggccaaggtggagaagggcaagtccaagaagctgaagtccgtgaaggagctgctgggcatcaccatcatggagcggtcctccttcgagaagaaccccatcgacttcctggaggccaagggctacaaggaggtgaagaaggacctgatcatcaagctgcccaagtactccctgttcgagctggagaacggccggaagcggatgctggcctccgccggcgagctgcagaagggcaacgagctggccctgccctccaagtacgtgaacttcctgtacctggcctcccactacgagaagctgaagggctcccccgaggacaacgagcagaagcagctgttcgtggagcagcacaagcactacctggacgagatcatcgagcagatctccgagttctccaagcgggtgatcctggccgacgccaacctggacaaggtgctgtccgcctacaacaagcaccgggacaagcccatccgggagcaggccgagaacatcatccacctgttcaccctgaccaacctgggcgcccccgccgccttcaagtacttcgacaccaccatcgaccggaagcggtacacctccaccaaggaggtgctggacgccaccctgatccaccagtccatcaccggcctgtacgagacccggatcgacctgtcccagctgggcggcgactccggcggctcctccggcggctccaagcggaccgccgacggctccgagttcgagtcccccaagaagaagcggaaggtgtccggcggctcctccggcggctccatggactccaccaaggagaagtgcgactcctacaaggacgacctgctgctgcggatgggcctgaacgacaacaaggccggcatggagggcctggacaaggagaagatcaacaagatcatcatggaggccaccaagggctcccggttctacggcaacgagctgaagaaggagaagcaggtgaaccagcggatcgagaacatgatgcagcagaaggcccagatcacctcccagcagctgcggaaggcccagctgcaggtggaccggttcgccatggagctggagcagtcccggaacctgtccaacaccatcgtgcacatcgacatggacgccttctacgccgccgtggagatgcgggacaaccccgagctgaaggacaagcccatcgccgtgggctccatgtccatgctgtccacctccaactaccacgcccggcggttcggcgtgcgggccgccatgcccggcttcatcgccaagcggctgtgcccccagctgatcatcgtgccccccaacttcgacaagtaccgggccgtgtccaaggaggtgaaggagatcctggccgactacgaccccaacttcatggccatgtccctggacgaggcctacctgaacatcaccaagcacctggaggagcggcagaactggcccgaggacaagcggcggtacttcatcaagatgggctcctccgtggagaacgacaaccccggcaaggaggtgaacaagctgtccgagcacgagcggtccatctcccccctgctgttcgaggagtccccctccgacgtgcagccccccggcgaccccttccaggtgaacttcgaggagcagaacaacccccagatcctgcagaactccgtggtgttcggcacctccgcccaggaggtggtgaaggagatccggttccggatcgagcagaagaccaccctgaccgcctccgccggcatcgcccccaacaccatgctggccaaggtgtgctccgacaagaacaagcccaacggccagtaccagatcctgcccaaccggcaggccgtgatggacttcatcaaggacctgcccatccggaaggtgtccggcatcggcaaggtgaccgagaagatgctgaaggccctgggcatcatcacctgcaccgagctgtaccagcagcgggccctgctgtccctgctgttctccgagacctcctggcactacttcctgcacatctccctgggcctgggctccacccacctgacccgggaccgggtgcggaagtccatgtccgtggagcggaccttctccgagatcaacaaggccgaggagcagtactccctgtgccaggagctgtgctccgagctggcccaggacctgcagaaggagcggctgaagggccggaccgtgaccatcaagctgaagaacgtgaacttcgaggtgaagacccgggcctccaccgtgtcctccgtggtgtccaccgccgaggagatcttcgccatcgccaaggagctgctgaagaccgagatcgacgccgacttcccccaccccctgcggctgcggctgatgggcgtgcggatctcctccttccccaacgaggaggaccggaagcaccagcagggcggcggctccggcaagcggaccgccgacggctccggcggcggctcccccaagaagaagcggaaggtgtccgagtccgccacccccgagtccgtgtccggctggcggctgttcaagaagatctcctagctagcaccagcctcaagaacacccgaatggagtctctaagctacataataccaacttacactttacaaaatgttgtcccccaaaatgtagccattcgtatctgctcctaataaaaagaaagtttcttcacattctctcgagaaaaaaaaaaaatggaaaaaaaaaaaacggaaaaaaaaaaaaggtaaaaaaaaaaaatataaaaaaaaaaaacataaaaaaaaaaaacgaaaaaaaaaaaacgtaaaaaaaaaaaactcaaaaaaaaaaaagataaaaaaaaaaaacctaaaaaaaaaaaatgtaaaaaaaaaaaagggaaaaaaaaaaaacgcaaaaaaaaaaaacacaaaaaaaaaaaatgcaaaaaaaaaaaatcgaaaaaaaaaaaatctaaaaaaaaaaaacgaaaaaaaaaaaacccaaaaaaaaaaaagacaaaaaaaaaaaatagaaaaaaaaaaagttaaaaaaaaaaaactgaaaaaaaaaaaatttaaaaaaaaaaaatctag

SEQ ID NO: 2547 - DNA, 6257 bp, synthetic construct
  misc_feature 1..6257: note = Synthetic
  source 1..6257: mol_type = other DNA
aggaagctcagaataaacgctcaactttggccggatctgccaccatgaagcggaccgccgacggctccgagttcgagtcccccaagaagaagcggaaggtggacaagaagtactccatcggcctggacatcggcaccaactccgtgggctgggccgtgatcaccgacgagtacaaggtgccctccaagaagttcaaggtgctgggcaacaccgaccggcactccatcaagaagaacctgatcggcgccctgctgttcgactccggcgagaccgccgaggccacccggctgaagcggaccgcccggcggcggtacacccggcggaagaaccggatctgctacctgcaggagatcttctccaacgagatggccaaggtggacgactccttcttccaccggctggaggagtccttcctggtggaggaggacaagaagcacgagcggcaccccatcttcggcaacatcgtggacgaggtggcctaccacgagaagtaccccaccatctaccacctgcggaagaagctggtggactccaccgacaaggccgacctgcggctgatctacctggccctggcccacatgatcaagttccggggccacttcctgatcgagggcgacctgaaccccgacaactccgacgtggacaagctgttcatccagctggtgcagacctacaaccagctgttcgaggagaaccccatcaacgcctccggcgtggacgccaaggccatcctgtccgcccggctgtccaagtcccggcggctggagaacctgatcgcccagctgcccggcgagaagaagaacggcctgttcggcaacctgatcgccctgtccctgggcctgacccccaacttcaagtccaacttcgacctggccgaggacgccaagctgcagctgtccaaggacacctacgacgacgacctggacaacctgctggcccagatcggcgaccagtacgccgacctgttcctggccgccaagaacctgtccgacgccatcctgctgtccgacatcctgcgggtgaacaccgagatcaccaaggcccccctgtccgcctccatgatcaagcggtacgacgagcaccaccaggacctgaccctgctgaaggccctggtgcggcagcagctgcccgagaagtacaaggagatcttcttcgaccagtccaagaacggctacgccggctacatcgacggcggcgcctcccaggaggagttctacaagttcatcaagcccatcctggagaagatggacggcaccgaggagctgctggtgaagctgaaccgggaggacctgctgcggaagcagcggaccttcgacaacggctccatcccccaccagatccacctgggcgagctgcacgccatcctgcggcggcaggaggacttctaccccttcctgaaggacaaccgggagaagatcgagaagatcctgaccttccggatcccctactacgtgggccccctggcccggggcaactcccggttcgcctggatgacccggaagtccgaggagaccatcaccccctggaacttcgaggaggtggtggacaagggcgcctccgcccagtccttcatcgagcggatgaccaacttcgacaagaacctgcccaacgagaaggtgctgcccaagcactccctgctgtacgagtacttcaccgtgtacaacgagctgaccaaggtgaagtacgtgaccgagggcatgcggaagcccgccttcctgtccggcgagcagaagaaggccatcgtggacctgctgttcaagaccaaccggaaggtgaccgtgaagcagctgaaggaggactacttcaagaagatcgagtgcttcgactccgtggagatctccggcgtggaggaccggttcaacgcctccctgggcacctaccacgacctgctgaagatcatcaaggacaaggacttcctggacaacgaggagaacgaggacatcctggaggacatcgtgctgaccctgaccctgttcgaggaccgggagatgatcgaggagcggctgaagacctacgcccacctgttcgacgacaaggtgatgaagcagctgaagcggcggcggtacaccggctggggccggctgtcccggaagctgatcaacggcatccgggacaagcagtccggcaagaccatcctggacttcctgaagtccgacggcttcgccaaccggaacttcatgcagctgatccacgacgactccctgaccttcaaggaggacatccagaaggcccaggtgtccggccagggcgactccctgcacgagcacatcgccaacctggccggctcccccgccatcaagaagggcatcctgcagaccgtgaaggtggtggacgagctggtgaaggtgatgggccggcacaagcccgagaacatcgtgatcgagatggcccgggagaaccagaccacccagaagggccagaagaactcccgggagcggatgaagcggatcgaggagggcatcaaggagctgggctcccagatcctgaaggagcaccccgtggagaacacccagctgcagaacgagaagctgtacctgtactacctgcagaacggccgggacatgtacgtggaccaggagctggacatcaaccggctgtccgactacgacgtggacgccatcgtgccccagtccttcctgaaggacgactccatcgacaacaaggtgctgacccggtccgacaagaaccggggcaagtccgacaacgtgccctccgaggaggtggtgaagaagatgaagaactactggcggcagctgctgaacgccaagctgatcacccagcggaagttcgacaacctgaccaaggccgagcggggcggcctgtccgagctggacaaggccggcttcatcaagcggcagctggtggagacccggcagatcaccaagcacgtggcccagatcctggactcccggatgaacaccaagtacgacgagaacgacaagctgatccgggaggtgaaggtgatcaccctgaagtccaagctggtgtccgacttccggaaggacttccagttctacaaggtgcgggagatcaacaactaccaccacgcccacgacgcctacctgaacgccgtggtgggcaccgccctgatcaagaagtaccccaagctggagtccgagttcgtgtacggcgactacaaggtgtacgacgtgcggaagatgatcgccaagtccgagcaggagatcggcaaggccaccgccaagtacttcttctactccaacatcatgaacttcttcaagaccgagatcaccctggccaacggcgagatccggaagcggcccctgatcgagaccaacggcgagaccggcgagatcgtgtgggacaagggccgggacttcgccaccgtgcggaaggtgctgtccatgccccaggtgaacatcgtgaagaagaccgaggtgcagaccggcggcttctccaaggagtccatcctgcccaagcggaactccgacaagctgatcgcccggaagaaggactgggaccccaagaagtacggcggcttcgactcccccaccgtggcctactccgtgctggtggtggccaaggtggagaagggcaagtccaagaagctgaagtccgtgaaggagctgctgggcatcaccatcatggagcggtcctccttcgagaagaaccccatcgacttcctggaggccaagggctacaaggaggtgaagaaggacctgatcatcaagctgcccaagtactccctgttcgagctggagaacggccggaagcggatgctggcctccgccggcgagctgcagaagggcaacgagctggccctgccctccaagtacgtgaacttcctgtacctggcctcccactacgagaagctgaagggctcccccgaggacaacgagcagaagcagctgttcgtggagcagcacaagcactacctggacgagatcatcgagcagatctccgagttctccaagcgggtgatcctggccgacgccaacctggacaaggtgctgtccgcctacaacaagcaccgggacaagcccatccgggagcaggccgagaacatcatccacctgttcaccctgaccaacctgggcgcccccgccgccttcaagtacttcgacaccaccatcgaccggaagcggtacacctccaccaaggaggtgctggacgccaccctgatccaccagtccatcaccggcctgtacgagacccggatcgacctgtcccagctgggcggcgactccggcggctcctccggcggctccaagcggaccgccgacggctccgagttcgagtcccccaagaagaagcggaaggtgtccggcggctcctccggcggctccatggactccaccaaggagaagtgcgactcctacaaggacgacctgctgctgcggatgggcctgaacgacaacaaggccggcatggagggcctggacaaggagaagatcaacaagatcatcatggaggccaccaagggctcccggttctacggcaacgagctgaagaaggagaagcaggtgaaccagcggatcgagaacatgatgcagcagaaggcccagatcacctcccagcagctgcggaaggcccagctgcaggtggaccggttcgccatggagctggagcagtcccggaacctgtccaacaccatcgtgcacatcgacatggacgccttctacgccgccgtggagatgcgggacaaccccgagctgaaggacaagcccatcgccgtgggctccatgtccatgctgtccacctccaactaccacgcccggcggttcggcgtgcgggccgccatgcccggcttcatcgccaagcggctgtgcccccagctgatcatcgtgccccccaacttcgacaagtaccgggccgtgtccaaggaggtgaaggagatcctggccgactacgaccccaacttcatggccatgtccctggacgaggcctacctgaacatcaccaagcacctggaggagcggcagaactggcccgaggacaagcggcggtacttcatcaagatgggctcctccgtggagaacgacaaccccggcaaggaggtgaacaagctgtccgagcacgagcggtccatctcccccctgctgttcgaggagtccccctccgacgtgcagccccccggcgaccccttccaggtgaacttcgaggagcagaacaacccccagatcctgcagaactccgtggtgttcggcacctccgcccaggaggtggtgaaggagatccggttccggatcgagcagaagaccaccctgaccgcctccgccggcatcgcccccaacaccatgctggccaaggtgtgctccgacaagaacaagcccaacggccagtaccagatcctgcccaaccggcaggccgtgatggacttcatcaaggacctgcccatccggaaggtgtccggcatcggcaaggtgaccgagaagatgctgaaggccctgggcatcatcacctgcaccgagctgtaccagcagcgggccctgctgtccctgctgttctccgagacctcctggcactacttcctgcacatctccctgggcctgggctccacccacctgacccgggaccgggtgcggaagtccatgtccgtggagcggaccttctccgagatcaacaaggccgaggagcagtactccctgtgccaggagctgtgctccgagctggcccaggacctgcagaaggagcggctgaagggccggaccgtgaccatcaagctgaagaacgtgaacttcgaggtgaagacccgggcctccaccgtgtcctccgtggtgtccaccgccgaggagatcttcgccatcgccaaggagctgctgaagaccgagatcgacgccgacttcccccaccccctgcggctgcggctgatgggcgtgcggatctcctccttccccaacgaggaggaccggaagcaccagcagggcggcggctccggcaagcggaccgccgacggctccggcggcggctcccccaagaagaagcggaaggtgtccgagtccgccacccccgagtccgtgtccggctggcggctgttcaagaagatctcctagctagcaccagcctcaagaacacccgaatggagtctctaagctacataataccaacttacactttacaaaatgttgtcccccaaaatgtagccattcgtatctgctcctaataaaaagaaagtttcttcacattctctcgagaaaaaaaaaaaaaaaaaaaaaaaaaaaaaaaaaaaaaaaaaaaaaaaaaaaaaaaaaaaaaaaaaaaaaaaaaaaaaaaaaaaaaaaaaaaaaaaaaaaatctag

SEQ ID NO: 2548 - DNA, 6566 bp, synthetic construct
  misc_feature 1..6566: note = Synthetic
  source 1..6566: mol_type = other DNA
aggactcactatttgttttcgcgcccagttgcaaaaagtgtcgaagctcagaataaacgctcaactttggccggatctgccaccatgaagcggaccgccgacggctccgagttcgagtcccccaagaagaagcggaaggtggacaagaagtactccatcggcctggacatcggcaccaactccgtgggctgggccgtgatcaccgacgagtacaaggtgccctccaagaagttcaaggtgctgggcaacaccgaccggcactccatcaagaagaacctgatcggcgccctgctgttcgactccggcgagaccgccgaggccacccggctgaagcggaccgcccggcggcggtacacccggcggaagaaccggatctgctacctgcaggagatcttctccaacgagatggccaaggtggacgactccttcttccaccggctggaggagtccttcctggtggaggaggacaagaagcacgagcggcaccccatcttcggcaacatcgtggacgaggtggcctaccacgagaagtaccccaccatctaccacctgcggaagaagctggtggactccaccgacaaggccgacctgcggctgatctacctggccctggcccacatgatcaagttccggggccacttcctgatcgagggcgacctgaaccccgacaactccgacgtggacaagctgttcatccagctggtgcagacctacaaccagctgttcgaggagaaccccatcaacgcctccggcgtggacgccaaggccatcctgtccgcccggctgtccaagtcccggcggctggagaacctgatcgcccagctgcccggcgagaagaagaacggcctgttcggcaacctgatcgccctgtccctgggcctgacccccaacttcaagtccaacttcgacctggccgaggacgccaagctgcagctgtccaaggacacctacgacgacgacctggacaacctgctggcccagatcggcgaccagtacgccgacctgttcctggccgccaagaacctgtccgacgccatcctgctgtccgacatcctgcgggtgaacaccgagatcaccaaggcccccctgtccgcctccatgatcaagcggtacgacgagcaccaccaggacctgaccctgctgaaggccctggtgcggcagcagctgcccgagaagtacaaggagatcttcttcgaccagtccaagaacggctacgccggctacatcgacggcggcgcctcccaggaggagttctacaagttcatcaagcccatcctggagaagatggacggcaccgaggagctgctggtgaagctgaaccgggaggacctgctgcggaagcagcggaccttcgacaacggctccatcccccaccagatccacctgggcgagctgcacgccatcctgcggcggcaggaggacttctaccccttcctgaaggacaaccgggagaagatcgagaagatcctgaccttccggatcccctactacgtgggccccctggcccggggcaactcccggttcgcctggatgacccggaagtccgaggagaccatcaccccctggaacttcgaggaggtggtggacaagggcgcctccgcccagtccttcatcgagcggatgaccaacttcgacaagaacctgcccaacgagaaggtgctgcccaagcactccctgctgtacgagtacttcaccgtgtacaacgagctgaccaaggtgaagtacgtgaccgagggcatgcggaagcccgccttcctgtccggcgagcagaagaaggccatcgtggacctgctgttcaagaccaaccggaaggtgaccgtgaagcagctgaaggaggactacttcaagaagatcgagtgcttcgactccgtggagatctccggcgtggaggaccggttcaacgcctccctgggcacctaccacgacctgctgaagatcatcaaggacaaggacttcctggacaacgaggagaacgaggacatcctggaggacatcgtgctgaccctgaccctgttcgaggaccgggagatgatcgaggagcggctgaagacctacgcccacctgttcgacgacaaggtgatgaagcagctgaagcggcggcggtacaccggctggggccggctgtcccggaagctgatcaacggcatccgggacaagcagtccggcaagaccatcctggacttcctgaagtccgacggcttcgccaaccggaacttcatgcagctgatccacgacgactccctgaccttcaaggaggacatccagaaggcccaggtgtccggccagggcgactccctgcacgagcacatcgccaacctggccggctcccccgccatcaagaagggcatcctgcagaccgtgaaggtggtggacgagctggtgaaggtgatgggccggcacaagcccgagaacatcgtgatcgagatggcccgggagaaccagaccacccagaagggccagaagaactcccgggagcggatgaagcggatcgaggagggcatcaaggagctgggctcccagatcctgaaggagcaccccgtggagaacacccagctgcagaacgagaagctgtacctgtactacctgcagaacggccgggacatgtacgtggaccaggagctggacatcaaccggctgtccgactacgacgtggacgccatcgtgccccagtccttcctgaaggacgactccatcgacaacaaggtgctgacccggtccgacaagaaccggggcaagtccgacaacgtgccctccgaggaggtggtgaagaagatgaagaactactggcggcagctgctgaacgccaagctgatcacccagcggaagttcgacaacctgaccaaggccgagcggggcggcctgtccgagctggacaaggccggcttcatcaagcggcagctggtggagacccggcagatcaccaagcacgtggcccagatcctggactcccggatgaacaccaagtacgacgagaacgacaagctgatccgggaggtgaaggtgatcaccctgaagtccaagctggtgtccgacttccggaaggacttccagttctacaaggtgcgggagatcaacaactaccaccacgcccacgacgcctacctgaacgccgtggtgggcaccgccctgatcaagaagtaccccaagctggagtccgagttcgtgtacggcgactacaaggtgtacgacgtgcggaagatgatcgccaagtccgagcaggagatcggcaaggccaccgccaagtacttcttctactccaacatcatgaacttcttcaagaccgagatcaccctggccaacggcgagatccggaagcggcccctgatcgagaccaacggcgagaccggcgagatcgtgtgggacaagggccgggacttcgccaccgtgcggaaggtgctgtccatgccccaggtgaacatcgtgaagaagaccgaggtgcagaccggcggcttctccaaggagtccatcctgcccaagcggaactccgacaagctgatcgcccggaagaaggactgggaccccaagaagtacggcggcttcgactcccccaccgtggcctactccgtgctggtggtggccaaggtggagaagggcaagtccaagaagctgaagtccgtgaaggagctgctgggcatcaccatcatggagcggtcctccttcgagaagaaccccatcgacttcctggaggccaagggctacaaggaggtgaagaaggacctgatcatcaagctgcccaagtactccctgttcgagctggagaacggccggaagcggatgctggcctccgccggcgagctgcagaagggcaacgagctggccctgccctccaagtacgtgaacttcctgtacctggcctcccactacgagaagctgaagggctcccccgaggacaacgagcagaagcagctgttcgtggagcagcacaagcactacctggacgagatcatcgagcagatctccgagttctccaagcgggtgatcctggccgacgccaacctggacaaggtgctgtccgcctacaacaagcaccgggacaagcccatccgggagcaggccgagaacatcatccacctgttcaccctgaccaacctgggcgcccccgccgccttcaagtacttcgacaccaccatcgaccggaagcggtacacctccaccaaggaggtgctggacgccaccctgatccaccagtccatcaccggcctgtacgagacccggatcgacctgtcccagctgggcggcgactccggcggctcctccggcggctccaagcggaccgccgacggctccgagttcgagtcccccaagaagaagcggaaggtgtccggcggctcctccggcggctccatggactccaccaaggagaagtgcgactcctacaaggacgacctgctgctgcggatgggcctgaacgacaacaaggccggcatggagggcctggacaaggagaagatcaacaagatcatcatggaggccaccaagggctcccggttctacggcaacgagctgaagaaggagaagcaggtgaaccagcggatcgagaacatgatgcagcagaaggcccagatcacctcccagcagctgcggaaggcccagctgcaggtggaccggttcgccatggagctggagcagtcccggaacctgtccaacaccatcgtgcacatcgacatggacgccttctacgccgccgtggagatgcgggacaaccccgagctgaaggacaagcccatcgccgtgggctccatgtccatgctgtccacctccaactaccacgcccggcggttcggcgtgcgggccgccatgcccggcttcatcgccaagcggctgtgcccccagctgatcatcgtgccccccaacttcgacaagtaccgggccgtgtccaaggaggtgaaggagatcctggccgactacgaccccaacttcatggccatgtccctggacgaggcctacctgaacatcaccaagcacctggaggagcggcagaactggcccgaggacaagcggcggtacttcatcaagatgggctcctccgtggagaacgacaaccccggcaaggaggtgaacaagctgtccgagcacgagcggtccatctcccccctgctgttcgaggagtccccctccgacgtgcagccccccggcgaccccttccaggtgaacttcgaggagcagaacaacccccagatcctgcagaactccgtggtgttcggcacctccgcccaggaggtggtgaaggagatccggttccggatcgagcagaagaccaccctgaccgcctccgccggcatcgcccccaacaccatgctggccaaggtgtgctccgacaagaacaagcccaacggccagtaccagatcctgcccaaccggcaggccgtgatggacttcatcaaggacctgcccatccggaaggtgtccggcatcggcaaggtgaccgagaagatgctgaaggccctgggcatcatcacctgcaccgagctgtaccagcagcgggccctgctgtccctgctgttctccgagacctcctggcactacttcctgcacatctccctgggcctgggctccacccacctgacccgggaccgggtgcggaagtccatgtccgtggagcggaccttctccgagatcaacaaggccgaggagcagtactccctgtgccaggagctgtgctccgagctggcccaggacctgcagaaggagcggctgaagggccggaccgtgaccatcaagctgaagaacgtgaacttcgaggtgaagacccgggcctccaccgtgtcctccgtggtgtccaccgccgaggagatcttcgccatcgccaaggagctgctgaagaccgagatcgacgccgacttcccccaccccctgcggctgcggctgatgggcgtgcggatctcctccttccccaacgaggaggaccggaagcaccagcagggcggcggctccggcaagcggaccgccgacggctccggcggcggctcccccaagaagaagcggaaggtgtccgagtccgccacccccgagtccgtgtccggctggcggctgttcaagaagatctcctagctagcaccagcctcaagaacacccgaatggagtctctaagctacataataccaacttacactttacaaaatgttgtcccccaaaatgtagccattcgtatctgctcctaataaaaagaaagtttcttcacattctctcgagaaaaaaaaaaaatggaaaaaaaaaaaacggaaaaaaaaaaaaggtaaaaaaaaaaaatataaaaaaaaaaaacataaaaaaaaaaaacgaaaaaaaaaaaacgtaaaaaaaaaaaactcaaaaaaaaaaaagataaaaaaaaaaaacctaaaaaaaaaaaatgtaaaaaaaaaaaagggaaaaaaaaaaaacgcaaaaaaaaaaaacacaaaaaaaaaaaatgcaaaaaaaaaaaatcgaaaaaaaaaaaatctaaaaaaaaaaaacgaaaaaaaaaaaacccaaaaaaaaaaaagacaaaaaaaaaaaatagaaaaaaaaaaagttaaaaaaaaaaaactgaaaaaaaaaaaatttaaaaaaaaaaaatctag

SEQ ID NO: 2549 - DNA, 6620 bp, synthetic construct
  misc_feature 1..6620: note = Synthetic
  source 1..6620: mol_type = other DNA
aggaagctcagaataaacgctcaactttggccggatctgccaccatgaagcggaccgccgacggctccgagttcgagtcccccaagaagaagcggaaggtggacaagaagtactccatcggcctggacatcggcaccaactccgtgggctgggccgtgatcaccgacgagtacaaggtgccctccaagaagttcaaggtgctgggcaacaccgaccggcactccatcaagaagaacctgatcggcgccctgctgttcgactccggcgagaccgccgaggccacccggctgaagcggaccgcccggcggcggtacacccggcggaagaaccggatctgctacctgcaggagatcttctccaacgagatggccaaggtggacgactccttcttccaccggctggaggagtccttcctggtggaggaggacaagaagcacgagcggcaccccatcttcggcaacatcgtggacgaggtggcctaccacgagaagtaccccaccatctaccacctgcggaagaagctggtggactccaccgacaaggccgacctgcggctgatctacctggccctggcccacatgatcaagttccggggccacttcctgatcgagggcgacctgaaccccgacaactccgacgtggacaagctgttcatccagctggtgcagacctacaaccagctgttcgaggagaaccccatcaacgcctccggcgtggacgccaaggccatcctgtccgcccggctgtccaagtcccggcggctggagaacctgatcgcccagctgcccggcgagaagaagaacggcctgttcggcaacctgatcgccctgtccctgggcctgacccccaacttcaagtccaacttcgacctggccgaggacgccaagctgcagctgtccaaggacacctacgacgacgacctggacaacctgctggcccagatcggcgaccagtacgccgacctgttcctggccgccaagaacctgtccgacgccatcctgctgtccgacatcctgcgggtgaacaccgagatcaccaaggcccccctgtccgcctccatgatcaagcggtacgacgagcaccaccaggacctgaccctgctgaaggccctggtgcggcagcagctgcccgagaagtacaaggagatcttcttcgaccagtccaagaacggctacgccggctacatcgacggcggcgcctcccaggaggagttctacaagttcatcaagcccatcctggagaagatggacggcaccgaggagctgctggtgaagctgaaccgggaggacctgctgcggaagcagcggaccttcgacaacggctccatcccccaccagatccacctgggcgagctgcacgccatcctgcggcggcaggaggacttctaccccttcctgaaggacaaccgggagaagatcgagaagatcctgaccttccggatcccctactacgtgggccccctggcccggggcaactcccggttcgcctggatgacccggaagtccgaggagaccatcaccccctggaacttcgaggaggtggtggacaagggcgcctccgcccagtccttcatcgagcggatgaccaacttcgacaagaacctgcccaacgagaaggtgctgcccaagcactccctgctgtacgagtacttcaccgtgtacaacgagctgaccaaggtgaagtacgtgaccgagggcatgcggaagcccgccttcctgtccggcgagcagaagaaggccatcgtggacctgctgttcaagaccaaccggaaggtgaccgtgaagcagctgaaggaggactacttcaagaagatcgagtgcttcgactccgtggagatctccggcgtggaggaccggttcaacgcctccctgggcacctaccacgacctgctgaagatcatcaaggacaaggacttcctggacaacgaggagaacgaggacatcctggaggacatcgtgctgaccctgaccctgttcgaggaccgggagatgatcgaggagcggctgaagacctacgcccacctgttcgacgacaaggtgatgaagcagctgaagcggcggcggtacaccggctggggccggctgtcccggaagctgatcaacggcatccgggacaagcagtccggcaagaccatcctggacttcctgaagtccgacggcttcgccaaccggaacttcatgcagctgatccacgacgactccctgaccttcaaggaggacatccagaaggcccaggtgtccggccagggcgactccctgcacgagcacatcgccaacctggccggctcccccgccatcaagaagggcatcctgcagaccgtgaaggtggtggacgagctggtgaaggtgatgggccggcacaagcccgagaacatcgtgatcgagatggcccgggagaaccagaccacccagaagggccagaagaactcccgggagcggatgaagcggatcgaggagggcatcaaggagctgggctcccagatcctgaaggagcaccccgtggagaacacccagctgcagaacgagaagctgtacctgtactacctgcagaacggccgggacatgtacgtggaccaggagctggacatcaaccggctgtccgactacgacgtggacgccatcgtgccccagtccttcctgaaggacgactccatcgacaacaaggtgctgacccggtccgacaagaaccggggcaagtccgacaacgtgccctccgaggaggtggtgaagaagatgaagaactactggcggcagctgctgaacgccaagctgatcacccagcggaagttcgacaacctgaccaaggccgagcggggcggcctgtccgagctggacaaggccggcttcatcaagcggcagctggtggagacccggcagatcaccaagcacgtggcccagatcctggactcccggatgaacaccaagtacgacgagaacgacaagctgatccgggaggtgaaggtgatcaccctgaagtccaagctggtgtccgacttccggaaggacttccagttctacaaggtgcgggagatcaacaactaccaccacgcccacgacgcctacctgaacgccgtggtgggcaccgccctgatcaagaagtaccccaagctggagtccgagttcgtgtacggcgactacaaggtgtacgacgtgcggaagatgatcgccaagtccgagcaggagatcggcaaggccaccgccaagtacttcttctactccaacatcatgaacttcttcaagaccgagatcaccctggccaacggcgagatccggaagcggcccctgatcgagaccaacggcgagaccggcgagatcgtgtgggacaagggccgggacttcgccaccgtgcggaaggtgctgtccatgccccaggtgaacatcgtgaagaagaccgaggtgcagaccggcggcttctccaaggagtccatcctgcccaagcggaactccgacaagctgatcgcccggaagaaggactgggaccccaagaagtacggcggcttcgactcccccaccgtggcctactccgtgctggtggtggccaaggtggagaagggcaagtccaagaagctgaagtccgtgaaggagctgctgggcatcaccatcatggagcggtcctccttcgagaagaaccccatcgacttcctggaggccaagggctacaaggaggtgaagaaggacctgatcatcaagctgcccaagtactccctgttcgagctggagaacggccggaagcggatgctggcctccgccggcgagctgcagaagggcaacgagctggccctgccctccaagtacgtgaacttcctgtacctggcctcccactacgagaagctgaagggctcccccgaggacaacgagcagaagcagctgttcgtggagcagcacaagcactacctggacgagatcatcgagcagatctccgagttctccaagcgggtgatcctggccgacgccaacctggacaaggtgctgtccgcctacaacaagcaccgggacaagcccatccgggagcaggccgagaacatcatccacctgttcaccctgaccaacctgggcgcccccgccgccttcaagtacttcgacaccaccatcgaccggaagcggtacacctccaccaaggaggtgctggacgccaccctgatccaccagtccatcaccggcctgtacgagacccggatcgacctgtcccagctgggcggcgactccggcggctcctccggcggctccaagcggaccgccgacggctccgagttcgagtcccccaagaagaagcggaaggtgtccggcggctcctccggcggctccatggactccaccaaggagaagtgcgactcctacaaggacgacctgctgctgcggatgggcctgaacgacaacaaggccggcatggagggcctggacaaggagaagatcaacaagatcatcatggaggccaccaagggctcccggttctacggcaacgagctgaagaaggagaagcaggtgaaccagcggatcgagaacatgatgcagcagaaggcccagatcacctcccagcagctgcggaaggcccagctgcaggtggaccggttcgccatggagctggagcagtcccggaacctgtccaacaccatcgtgcacatcgacatggacgccttctacgccgccgtggagatgcgggacaaccccgagctgaaggacaagcccatcgccgtgggctccatgtccatgctgtccacctccaactaccacgcccggcggttcggcgtgcgggccgccatgcccggcttcatcgccaagcggctgtgcccccagctgatcatcgtgccccccaacttcgacaagtaccgggccgtgtccaaggaggtgaaggagatcctggccgactacgaccccaacttcatggccatgtccctggacgaggcctacctgaacatcaccaagcacctggaggagcggcagaactggcccgaggacaagcggcggtacttcatcaagatgggctcctccgtggagaacgacaaccccggcaaggaggtgaacaagctgtccgagcacgagcggtccatctcccccctgctgttcgaggagtccccctccgacgtgcagccccccggcgaccccttccaggtgaacttcgaggagcagaacaacccccagatcctgcagaactccgtggtgttcggcacctccgcccaggaggtggtgaaggagatccggttccggatcgagcagaagaccaccctgaccgcctccgccggcatcgcccccaacaccatgctggccaaggtgtgctccgacaagaacaagcccaacggccagtaccagatcctgcccaaccggcaggccgtgatggacttcatcaaggacctgcccatccggaaggtgtccggcatcggcaaggtgaccgagaagatgctgaaggccctgggcatcatcacctgcaccgagctgtaccagcagcgggccctgctgtccctgctgttctccgagacctcctggcactacttcctgcacatctccctgggcctgggctccacccacctgacccgggaccgggtgcggaagtccatgtccgtggagcggaccttctccgagatcaacaaggccgaggagcagtactccctgtgccaggagctgtgctccgagctggcccaggacctgcagaaggagcggctgaagggccggaccgtgaccatcaagctgaagaacgtgaacttcgaggtgaagacccgggcctccaccgtgtcctccgtggtgtccaccgccgaggagatcttcgccatcgccaaggagctgctgaagaccgagatcgacgccgacttcccccaccccctgcggctgcggctgatgggcgtgcggatctcctccttccccaacgaggaggaccggaagcaccagcagggcggcggctccggcaagcggaccgccgacggctccggcggcggctcccccaagaagaagcggaaggtgtccgagtccgccacccccgagtccgtgtccggctggcggctgttcaagaagatctcctagctagcaccagcctcaagaacacccgaatggagtctctaagctacataataccaacttacactttacaaaatgttgtcccccaaaatgtagccattcgtatctgctcctaataaaaagaaagtttcttcacattcttgtcagcccagaaccccacacgagttttgccactgctaagctgtgaggcagtgcaggctgggacagccgacctccaggttgcgaaaaacctggtctcgagaaaaaaaaaaaatggaaaaaaaaaaaacggaaaaaaaaaaaaggtaaaaaaaaaaaatataaaaaaaaaaaacataaaaaaaaaaaacgaaaaaaaaaaaacgtaaaaaaaaaaaactcaaaaaaaaaaaagataaaaaaaaaaaacctaaaaaaaaaaaatgtaaaaaaaaaaaagggaaaaaaaaaaaacgcaaaaaaaaaaaacacaaaaaaaaaaaatgcaaaaaaaaaaaatcgaaaaaaaaaaaatctaaaaaaaaaaaacgaaaaaaaaaaaacccaaaaaaaaaaaagacaaaaaaaaaaaatagaaaaaaaaaaagttaaaaaaaaaaaactgaaaaaaaaaaaatttaaaaaaaaaaaatctag

SEQ ID NO: 2550 - DNA, 6660 bp, synthetic construct
  misc_feature 1..6660: note = Synthetic
  source 1..6660: mol_type = other DNA
aggactcactatttgttttcgcgcccagttgcaaaaagtgtcgaagctcagaataaacgctcaactttggccggatctgccaccatgaagcggaccgccgacggctccgagttcgagtcccccaagaagaagcggaaggtggacaagaagtactccatcggcctggacatcggcaccaactccgtgggctgggccgtgatcaccgacgagtacaaggtgccctccaagaagttcaaggtgctgggcaacaccgaccggcactccatcaagaagaacctgatcggcgccctgctgttcgactccggcgagaccgccgaggccacccggctgaagcggaccgcccggcggcggtacacccggcggaagaaccggatctgctacctgcaggagatcttctccaacgagatggccaaggtggacgactccttcttccaccggctggaggagtccttcctggtggaggaggacaagaagcacgagcggcaccccatcttcggcaacatcgtggacgaggtggcctaccacgagaagtaccccaccatctaccacctgcggaagaagctggtggactccaccgacaaggccgacctgcggctgatctacctggccctggcccacatgatcaagttccggggccacttcctgatcgagggcgacctgaaccccgacaactccgacgtggacaagctgttcatccagctggtgcagacctacaaccagctgttcgaggagaaccccatcaacgcctccggcgtggacgccaaggccatcctgtccgcccggctgtccaagtcccggcggctggagaacctgatcgcccagctgcccggcgagaagaagaacggcctgttcggcaacctgatcgccctgtccctgggcctgacccccaacttcaagtccaacttcgacctggccgaggacgccaagctgcagctgtccaaggacacctacgacgacgacctggacaacctgctggcccagatcggcgaccagtacgccgacctgttcctggccgccaagaacctgtccgacgccatcctgctgtccgacatcctgcgggtgaacaccgagatcaccaaggcccccctgtccgcctccatgatcaagcggtacgacgagcaccaccaggacctgaccctgctgaaggccctggtgcggcagcagctgcccgagaagtacaaggagatcttcttcgaccagtccaagaacggctacgccggctacatcgacggcggcgcctcccaggaggagttctacaagttcatcaagcccatcctggagaagatggacggcaccgaggagctgctggtgaagctgaaccgggaggacctgctgcggaagcagcggaccttcgacaacggctccatcccccaccagatccacctgggcgagctgcacgccatcctgcggcggcaggaggacttctaccccttcctgaaggacaaccgggagaagatcgagaagatcctgaccttccggatcccctactacgtgggccccctggcccggggcaactcccggttcgcctggatgacccggaagtccgaggagaccatcaccccctggaacttcgaggaggtggtggacaagggcgcctccgcccagtccttcatcgagcggatgaccaacttcgacaagaacctgcccaacgagaaggtgctgcccaagcactccctgctgtacgagtacttcaccgtgtacaacgagctgaccaaggtgaagtacgtgaccgagggcatgcggaagcccgccttcctgtccggcgagcagaagaaggccatcgtggacctgctgttcaagaccaaccggaaggtgaccgtgaagcagctgaaggaggactacttcaagaagatcgagtgcttcgactccgtggagatctccggcgtggaggaccggttcaacgcctccctgggcacctaccacgacctgctgaagatcatcaaggacaaggacttcctggacaacgaggagaacgaggacatcctggaggacatcgtgctgaccctgaccctgttcgaggaccgggagatgatcgaggagcggctgaagacctacgcccacctgttcgacgacaaggtgatgaagcagctgaagcggcggcggtacaccggctggggccggctgtcccggaagctgatcaacggcatccgggacaagcagtccggcaagaccatcctggacttcctgaagtccgacggcttcgccaaccggaacttcatgcagctgatccacgacgactccctgaccttcaaggaggacatccagaaggcccaggtgtccggccagggcgactccctgcacgagcacatcgccaacctggccggctcccccgccatcaagaagggcatcctgcagaccgtgaaggtggtggacgagctggtgaaggtgatgggccggcacaagcccgagaacatcgtgatcgagatggcccgggagaaccagaccacccagaagggccagaagaactcccgggagcggatgaagcggatcgaggagggcatcaaggagctgggctcccagatcctgaaggagcaccccgtggagaacacccagctgcagaacgagaagctgtacctgtactacctgcagaacggccgggacatgtacgtggaccaggagctggacatcaaccggctgtccgactacgacgtggacgccatcgtgccccagtccttcctgaaggacgactccatcgacaacaaggtgctgacccggtccgacaagaaccggggcaagtccgacaacgtgccctccgaggaggtggtgaagaagatgaagaactactggcggcagctgctgaacgccaagctgatcacccagcggaagttcgacaacctgaccaaggccgagcggggcggcctgtccgagctggacaaggccggcttcatcaagcggcagctggtggagacccggcagatcaccaagcacgtggcccagatcctggactcccggatgaacaccaagtacgacgagaacgacaagctgatccgggaggtgaaggtgatcaccctgaagtccaagctggtgtccgacttccggaaggacttccagttctacaaggtgcgggagatcaacaactaccaccacgcccacgacgcctacctgaacgccgtggtgggcaccgccctgatcaagaagtaccccaagctggagtccgagttcgtgtacggcgactacaaggtgtacgacgtgcggaagatgatcgccaagtccgagcaggagatcggcaaggccaccgccaagtacttcttctactccaacatcatgaacttcttcaagaccgagatcaccctggccaacggcgagatccggaagcggcccctgatcgagaccaacggcgagaccggcgagatcgtgtgggacaagggccgggacttcgccaccgtgcggaaggtgctgtccatgccccaggtgaacatcgtgaagaagaccgaggtgcagaccggcggcttctccaaggagtccatcctgcccaagcggaactccgacaagctgatcgcccggaagaaggactgggaccccaagaagtacggcggcttcgactcccccaccgtggcctactccgtgctggtggtggccaaggtggagaagggcaagtccaagaagctgaagtccgtgaaggagctgctgggcatcaccatcatggagcggtcctccttcgagaagaaccccatcgacttcctggaggccaagggctacaaggaggtgaagaaggacctgatcatcaagctgcccaagtactccctgttcgagctggagaacggccggaagcggatgctggcctccgccggcgagctgcagaagggcaacgagctggccctgccctccaagtacgtgaacttcctgtacctggcctcccactacgagaagctgaagggctcccccgaggacaacgagcagaagcagctgttcgtggagcagcacaagcactacctggacgagatcatcgagcagatctccgagttctccaagcgggtgatcctggccgacgccaacctggacaaggtgctgtccgcctacaacaagcaccgggacaagcccatccgggagcaggccgagaacatcatccacctgttcaccctgaccaacctgggcgcccccgccgccttcaagtacttcgacaccaccatcgaccggaagcggtacacctccaccaaggaggtgctggacgccaccctgatccaccagtccatcaccggcctgtacgagacccggatcgacctgtcccagctgggcggcgactccggcggctcctccggcggctccaagcggaccgccgacggctccgagttcgagtcccccaagaagaagcggaaggtgtccggcggctcctccggcggctccatggactccaccaaggagaagtgcgactcctacaaggacgacctgctgctgcggatgggcctgaacgacaacaaggccggcatggagggcctggacaaggagaagatcaacaagatcatcatggaggccaccaagggctcccggttctacggcaacgagctgaagaaggagaagcaggtgaaccagcggatcgagaacatgatgcagcagaaggcccagatcacctcccagcagctgcggaaggcccagctgcaggtggaccggttcgccatggagctggagcagtcccggaacctgtccaacaccatcgtgcacatcgacatggacgccttctacgccgccgtggagatgcgggacaaccccgagctgaaggacaagcccatcgccgtgggctccatgtccatgctgtccacctccaactaccacgcccggcggttcggcgtgcgggccgccatgcccggcttcatcgccaagcggctgtgcccccagctgatcatcgtgccccccaacttcgacaagtaccgggccgtgtccaaggaggtgaaggagatcctggccgactacgaccccaacttcatggccatgtccctggacgaggcctacctgaacatcaccaagcacctggaggagcggcagaactggcccgaggacaagcggcggtacttcatcaagatgggctcctccgtggagaacgacaaccccggcaaggaggtgaacaagctgtccgagcacgagcggtccatctcccccctgctgttcgaggagtccccctccgacgtgcagccccccggcgaccccttccaggtgaacttcgaggagcagaacaacccccagatcctgcagaactccgtggtgttcggcacctccgcccaggaggtggtgaaggagatccggttccggatcgagcagaagaccaccctgaccgcctccgccggcatcgcccccaacaccatgctggccaaggtgtgctccgacaagaacaagcccaacggccagtaccagatcctgcccaaccggcaggccgtgatggacttcatcaaggacctgcccatccggaaggtgtccggcatcggcaaggtgaccgagaagatgctgaaggccctgggcatcatcacctgcaccgagctgtaccagcagcgggccctgctgtccctgctgttctccgagacctcctggcactacttcctgcacatctccctgggcctgggctccacccacctgacccgggaccgggtgcggaagtccatgtccgtggagcggaccttctccgagatcaacaaggccgaggagcagtactccctgtgccaggagctgtgctccgagctggcccaggacctgcagaaggagcggctgaagggccggaccgtgaccatcaagctgaagaacgtgaacttcgaggtgaagacccgggcctccaccgtgtcctccgtggtgtccaccgccgaggagatcttcgccatcgccaaggagctgctgaagaccgagatcgacgccgacttcccccaccccctgcggctgcggctgatgggcgtgcggatctcctccttccccaacgaggaggaccggaagcaccagcagggcggcggctccggcaagcggaccgccgacggctccggcggcggctcccccaagaagaagcggaaggtgtccgagtccgccacccccgagtccgtgtccggctggcggctgttcaagaagatctcctagctagcaccagcctcaagaacacccgaatggagtctctaagctacataataccaacttacactttacaaaatgttgtcccccaaaatgtagccattcgtatctgctcctaataaaaagaaagtttcttcacattcttgtcagcccagaaccccacacgagttttgccactgctaagctgtgaggcagtgcaggctgggacagccgacctccaggttgcgaaaaacctggtctcgagaaaaaaaaaaaatggaaaaaaaaaaaacggaaaaaaaaaaaaggtaaaaaaaaaaaatataaaaaaaaaaaacataaaaaaaaaaaacgaaaaaaaaaaaacgtaaaaaaaaaaaactcaaaaaaaaaaaagataaaaaaaaaaaacctaaaaaaaaaaaatgtaaaaaaaaaaaagggaaaaaaaaaaaacgcaaaaaaaaaaaacacaaaaaaaaaaaatgcaaaaaaaaaaaatcgaaaaaaaaaaaatctaaaaaaaaaaaacgaaaaaaaaaaaacccaaaaaaaaaaaagacaaaaaaaaaaaatagaaaaaaaaaaagttaaaaaaaaaaaactgaaaaaaaaaaaatttaaaaaaaaaaaatctag

SEQ ID NO: 2551 - DNA, 6565 bp, synthetic construct
  misc_feature 1..6565: note = Synthetic
  source 1..6565: mol_type = other DNA
aggtgttcaaccagagtgaaaccactaacgggtcagagccccaagctcagaataaacgctcaactttggccggatctgccaccatgaagcggaccgccgacggctccgagttcgagtcccccaagaagaagcggaaggtggacaagaagtactccatcggcctggacatcggcaccaactccgtgggctgggccgtgatcaccgacgagtacaaggtgccctccaagaagttcaaggtgctgggcaacaccgaccggcactccatcaagaagaacctgatcggcgccctgctgttcgactccggcgagaccgccgaggccacccggctgaagcggaccgcccggcggcggtacacccggcggaagaaccggatctgctacctgcaggagatcttctccaacgagatggccaaggtggacgactccttcttccaccggctggaggagtccttcctggtggaggaggacaagaagcacgagcggcaccccatcttcggcaacatcgtggacgaggtggcctaccacgagaagtaccccaccatctaccacctgcggaagaagctggtggactccaccgacaaggccgacctgcggctgatctacctggccctggcccacatgatcaagttccggggccacttcctgatcgagggcgacctgaaccccgacaactccgacgtggacaagctgttcatccagctggtgcagacctacaaccagctgttcgaggagaaccccatcaacgcctccggcgtggacgccaaggccatcctgtccgcccggctgtccaagtcccggcggctggagaacctgatcgcccagctgcccggcgagaagaagaacggcctgttcggcaacctgatcgccctgtccctgggcctgacccccaacttcaagtccaacttcgacctggccgaggacgccaagctgcagctgtccaaggacacctacgacgacgacctggacaacctgctggcccagatcggcgaccagtacgccgacctgttcctggccgccaagaacctgtccgacgccatcctgctgtccgacatcctgcgggtgaacaccgagatcaccaaggcccccctgtccgcctccatgatcaagcggtacgacgagcaccaccaggacctgaccctgctgaaggccctggtgcggcagcagctgcccgagaagtacaaggagatcttcttcgaccagtccaagaacggctacgccggctacatcgacggcggcgcctcccaggaggagttctacaagttcatcaagcccatcctggagaagatggacggcaccgaggagctgctggtgaagctgaaccgggaggacctgctgcggaagcagcggaccttcgacaacggctccatcccccaccagatccacctgggcgagctgcacgccatcctgcggcggcaggaggacttctaccccttcctgaaggacaaccgggagaagatcgagaagatcctgaccttccggatcccctactacgtgggccccctggcccggggcaactcccggttcgcctggatgacccggaagtccgaggagaccatcaccccctggaacttcgaggaggtggtggacaagggcgcctccgcccagtccttcatcgagcggatgaccaacttcgacaagaacctgcccaacgagaaggtgctgcccaagcactccctgctgtacgagtacttcaccgtgtacaacgagctgaccaaggtgaagtacgtgaccgagggcatgcggaagcccgccttcctgtccggcgagcagaagaaggccatcgtggacctgctgttcaagaccaaccggaaggtgaccgtgaagcagctgaaggaggactacttcaagaagatcgagtgcttcgactccgtggagatctccggcgtggaggaccggttcaacgcctccctgggcacctaccacgacctgctgaagatcatcaaggacaaggacttcctggacaacgaggagaacgaggacatcctggaggacatcgtgctgaccctgaccctgttcgaggaccgggagatgatcgaggagcggctgaagacctacgcccacctgttcgacgacaaggtgatgaagcagctgaagcggcggcggtacaccggctggggccggctgtcccggaagctgatcaacggcatccgggacaagcagtccggcaagaccatcctggacttcctgaagtccgacggcttcgccaaccggaacttcatgcagctgatccacgacgactccctgaccttcaaggaggacatccagaaggcccaggtgtccggccagggcgactccctgcacgagcacatcgccaacctggccggctcccccgccatcaagaagggcatcctgcagaccgtgaaggtggtggacgagctggtgaaggtgatgggccggcacaagcccgagaacatcgtgatcgagatggcccgggagaaccagaccacccagaagggccagaagaactcccgggagcggatgaagcggatcgaggagggcatcaaggagctgggctcccagatcctgaaggagcaccccgtggagaacacccagctgcagaacgagaagctgtacctgtactacctgcagaacggccgggacatgtacgtggaccaggagctggacatcaaccggctgtccgactacgacgtggacgccatcgtgccccagtccttcctgaaggacgactccatcgacaacaaggtgctgacccggtccgacaagaaccggggcaagtccgacaacgtgccctccgaggaggtggtgaagaagatgaagaactactggcggcagctgctgaacgccaagctgatcacccagcggaagttcgacaacctgaccaaggccgagcggggcggcctgtccgagctggacaaggccggcttcatcaagcggcagctggtggagacccggcagatcaccaagcacgtggcccagatcctggactcccggatgaacaccaagtacgacgagaacgacaagctgatccgggaggtgaaggtgatcaccctgaagtccaagctggtgtccgacttccggaaggacttccagttctacaaggtgcgggagatcaacaactaccaccacgcccacgacgcctacctgaacgccgtggtgggcaccgccctgatcaagaagtaccccaagctggagtccgagttcgtgtacggcgactacaaggtgtacgacgtgcggaagatgatcgccaagtccgagcaggagatcggcaaggccaccgccaagtacttcttctactccaacatcatgaacttcttcaagaccgagatcaccctggccaacggcgagatccggaagcggcccctgatcgagaccaacggcgagaccggcgagatcgtgtgggacaagggccgggacttcgccaccgtgcggaaggtgctgtccatgccccaggtgaacatcgtgaagaagaccgaggtgcagaccggcggcttctccaaggagtccatcctgcccaagcggaactccgacaagctgatcgcccggaagaaggactgggaccccaagaagtacggcggcttcgactcccccaccgtggcctactccgtgctggtggtggccaaggtggagaagggcaagtccaagaagctgaagtccgtgaaggagctgctgggcatcaccatcatggagcggtcctccttcgagaagaaccccatcgacttcctggaggccaagggctacaaggaggtgaagaaggacctgatcatcaagctgcccaagtactccctgttcgagctggagaacggccggaagcggatgctggcctccgccggcgagctgcagaagggcaacgagctggccctgccctccaagtacgtgaacttcctgtacctggcctcccactacgagaagctgaagggctcccccgaggacaacgagcagaagcagctgttcgtggagcagcacaagcactacctggacgagatcatcgagcagatctccgagttctccaagcgggtgatcctggccgacgccaacctggacaaggtgctgtccgcctacaacaagcaccgggacaagcccatccgggagcaggccgagaacatcatccacctgttcaccctgaccaacctgggcgcccccgccgccttcaagtacttcgacaccaccatcgaccggaagcggtacacctccaccaaggaggtgctggacgccaccctgatccaccagtccatcaccggcctgtacgagacccggatcgacctgtcccagctgggcggcgactccggcggctcctccggcggctccaagcggaccgccgacggctccgagttcgagtcccccaagaagaagcggaaggtgtccggcggctcctccggcggctccatggactccaccaaggagaagtgcgactcctacaaggacgacctgctgctgcggatgggcctgaacgacaacaaggccggcatggagggcctggacaaggagaagatcaacaagatcatcatggaggccaccaagggctcccggttctacggcaacgagctgaagaaggagaagcaggtgaaccagcggatcgagaacatgatgcagcagaaggcccagatcacctcccagcagctgcggaaggcccagctgcaggtggaccggttcgccatggagctggagcagtcccggaacctgtccaacaccatcgtgcacatcgacatggacgccttctacgccgccgtggagatgcgggacaaccccgagctgaaggacaagcccatcgccgtgggctccatgtccatgctgtccacctccaactaccacgcccggcggttcggcgtgcgggccgccatgcccggcttcatcgccaagcggctgtgcccccagctgatcatcgtgccccccaacttcgacaagtaccgggccgtgtccaaggaggtgaaggagatcctggccgactacgaccccaacttcatggccatgtccctggacgaggcctacctgaacatcaccaagcacctggaggagcggcagaactggcccgaggacaagcggcggtacttcatcaagatgggctcctccgtggagaacgacaaccccggcaaggaggtgaacaagctgtccgagcacgagcggtccatctcccccctgctgttcgaggagtccccctccgacgtgcagccccccggcgaccccttccaggtgaacttcgaggagcagaacaacccccagatcctgcagaactccgtggtgttcggcacctccgcccaggaggtggtgaaggagatccggttccggatcgagcagaagaccaccctgaccgcctccgccggcatcgcccccaacaccatgctggccaaggtgtgctccgacaagaacaagcccaacggccagtaccagatcctgcccaaccggcaggccgtgatggacttcatcaaggacctgcccatccggaaggtgtccggcatcggcaaggtgaccgagaagatgctgaaggccctgggcatcatcacctgcaccgagctgtaccagcagcgggccctgctgtccctgctgttctccgagacctcctggcactacttcctgcacatctccctgggcctgggctccacccacctgacccgggaccgggtgcggaagtccatgtccgtggagcggaccttctccgagatcaacaaggccgaggagcagtactccctgtgccaggagctgtgctccgagctggcccaggacctgcagaaggagcggctgaagggccggaccgtgaccatcaagctgaagaacgtgaacttcgaggtgaagacccgggcctccaccgtgtcctccgtggtgtccaccgccgaggagatcttcgccatcgccaaggagctgctgaagaccgagatcgacgccgacttcccccaccccctgcggctgcggctgatgggcgtgcggatctcctccttccccaacgaggaggaccggaagcaccagcagggcggcggctccggcaagcggaccgccgacggctccggcggcggctcccccaagaagaagcggaaggtgtccgagtccgccacccccgagtccgtgtccggctggcggctgttcaagaagatctcctagctagcaccagcctcaagaacacccgaatggagtctctaagctacataataccaacttacactttacaaaatgttgtcccccaaaatgtagccattcgtatctgctcctaataaaaagaaagtttcttcacattctctcgagaaaaaaaaaaaatggaaaaaaaaaaaacggaaaaaaaaaaaaggtaaaaaaaaaaaatataaaaaaaaaaaacataaaaaaaaaaaacgaaaaaaaaaaaacgtaaaaaaaaaaaactcaaaaaaaaaaaagataaaaaaaaaaaacctaaaaaaaaaaaatgtaaaaaaaaaaaagggaaaaaaaaaaaacgcaaaaaaaaaaaacacaaaaaaaaaaaatgcaaaaaaaaaaaatcgaaaaaaaaaaaatctaaaaaaaaaaaacgaaaaaaaaaaaacccaaaaaaaaaaaagacaaaaaaaaaaaatagaaaaaaaaaaagttaaaaaaaaaaaactgaaaaaaaaaaaatttaaaaaaaaaaaatctag

SEQ ID NO: 2552 - DNA, 6616 bp, synthetic construct
  misc_feature 1..6616: note = Synthetic
  source 1..6616: mol_type = other DNA
aggactcactatttgttttcgcgcccagttgcaaaaagtgtcgaaaaaaaaaaaaccaaaaaaaaaaaacaaaaaaaaaaaataattgactaaaagctcagaataaacgctcaactttggccggatctgccaccatgaagcggaccgccgacggctccgagttcgagtcccccaagaagaagcggaaggtggacaagaagtactccatcggcctggacatcggcaccaactccgtgggctgggccgtgatcaccgacgagtacaaggtgccctccaagaagttcaaggtgctgggcaacaccgaccggcactccatcaagaagaacctgatcggcgccctgctgttcgactccggcgagaccgccgaggccacccggctgaagcggaccgcccggcggcggtacacccggcggaagaaccggatctgctacctgcaggagatcttctccaacgagatggccaaggtggacgactccttcttccaccggctggaggagtccttcctggtggaggaggacaagaagcacgagcggcaccccatcttcggcaacatcgtggacgaggtggcctaccacgagaagtaccccaccatctaccacctgcggaagaagctggtggactccaccgacaaggccgacctgcggctgatctacctggccctggcccacatgatcaagttccggggccacttcctgatcgagggcgacctgaaccccgacaactccgacgtggacaagctgttcatccagctggtgcagacctacaaccagctgttcgaggagaaccccatcaacgcctccggcgtggacgccaaggccatcctgtccgcccggctgtccaagtcccggcggctggagaacctgatcgcccagctgcccggcgagaagaagaacggcctgttcggcaacctgatcgccctgtccctgggcctgacccccaacttcaagtccaacttcgacctggccgaggacgccaagctgcagctgtccaaggacacctacgacgacgacctggacaacctgctggcccagatcggcgaccagtacgccgacctgttcctggccgccaagaacctgtccgacgccatcctgctgtccgacatcctgcgggtgaacaccgagatcaccaaggcccccctgtccgcctccatgatcaagcggtacgacgagcaccaccaggacctgaccctgctgaaggccctggtgcggcagcagctgcccgagaagtacaaggagatcttcttcgaccagtccaagaacggctacgccggctacatcgacggcggcgcctcccaggaggagttctacaagttcatcaagcccatcctggagaagatggacggcaccgaggagctgctggtgaagctgaaccgggaggacctgctgcggaagcagcggaccttcgacaacggctccatcccccaccagatccacctgggcgagctgcacgccatcctgcggcggcaggaggacttctaccccttcctgaaggacaaccgggagaagatcgagaagatcctgaccttccggatcccctactacgtgggccccctggcccggggcaactcccggttcgcctggatgacccggaagtccgaggagaccatcaccccctggaacttcgaggaggtggtggacaagggcgcctccgcccagtccttcatcgagcggatgaccaacttcgacaagaacctgcccaacgagaaggtgctgcccaagcactccctgctgtacgagtacttcaccgtgtacaacgagctgaccaaggtgaagtacgtgaccgagggcatgcggaagcccgccttcctgtccggcgagcagaagaaggccatcgtggacctgctgttcaagaccaaccggaaggtgaccgtgaagcagctgaaggaggactacttcaagaagatcgagtgcttcgactccgtggagatctccggcgtggaggaccggttcaacgcctccctgggcacctaccacgacctgctgaagatcatcaaggacaaggacttcctggacaacgaggagaacgaggacatcctggaggacatcgtgctgaccctgaccctgttcgaggaccgggagatgatcgaggagcggctgaagacctacgcccacctgttcgacgacaaggtgatgaagcagctgaagcggcggcggtacaccggctggggccggctgtcccggaagctgatcaacggcatccgggacaagcagtccggcaagaccatcctggacttcctgaagtccgacggcttcgccaaccggaacttcatgcagctgatccacgacgactccctgaccttcaaggaggacatccagaaggcccaggtgtccggccagggcgactccctgcacgagcacatcgccaacctggccggctcccccgccatcaagaagggcatcctgcagaccgtgaaggtggtggacgagctggtgaaggtgatgggccggcacaagcccgagaacatcgtgatcgagatggcccgggagaaccagaccacccagaagggccagaagaactcccgggagcggatgaagcggatcgaggagggcatcaaggagctgggctcccagatcctgaaggagcaccccgtggagaacacccagctgcagaacgagaagctgtacctgtactacctgcagaacggccgggacatgtacgtggaccaggagctggacatcaaccggctgtccgactacgacgtggacgccatcgtgccccagtccttcctgaaggacgactccatcgacaacaaggtgctgacccggtccgacaagaaccggggcaagtccgacaacgtgccctccgaggaggtggtgaagaagatgaagaactactggcggcagctgctgaacgccaagctgatcacccagcggaagttcgacaacctgaccaaggccgagcggggcggcctgtccgagctggacaaggccggcttcatcaagcggcagctggtggagacccggcagatcaccaagcacgtggcccagatcctggactcccggatgaacaccaagtacgacgagaacgacaagctgatccgggaggtgaaggtgatcaccctgaagtccaagctggtgtccgacttccggaaggacttccagttctacaaggtgcgggagatcaacaactaccaccacgcccacgacgcctacctgaacgccgtggtgggcaccgccctgatcaagaagtaccccaagctggagtccgagttcgtgtacggcgactacaaggtgtacgacgtgcggaagatgatcgccaagtccgagcaggagatcggcaaggccaccgccaagtacttcttctactccaacatcatgaacttcttcaagaccgagatcaccctggccaacggcgagatccggaagcggcccctgatcgagaccaacggcgagaccggcgagatcgtgtgggacaagggccgggacttcgccaccgtgcggaaggtgctgtccatgccccaggtgaacatcgtgaagaagaccgaggtgcagaccggcggcttctccaaggagtccatcctgcccaagcggaactccgacaagctgatcgcccggaagaaggactgggaccccaagaagtacggcggcttcgactcccccaccgtggcctactccgtgctggtggtggccaaggtggagaagggcaagtccaagaagctgaagtccgtgaaggagctgctgggcatcaccatcatggagcggtcctccttcgagaagaaccccatcgacttcctggaggccaagggctacaaggaggtgaagaaggacctgatcatcaagctgcccaagtactccctgttcgagctggagaacggccggaagcggatgctggcctccgccggcgagctgcagaagggcaacgagctggccctgccctccaagtacgtgaacttcctgtacctggcctcccactacgagaagctgaagggctcccccgaggacaacgagcagaagcagctgttcgtggagcagcacaagcactacctggacgagatcatcgagcagatctccgagttctccaagcgggtgatcctggccgacgccaacctggacaaggtgctgtccgcctacaacaagcaccgggacaagcccatccgggagcaggccgagaacatcatccacctgttcaccctgaccaacctgggcgcccccgccgccttcaagtacttcgacaccaccatcgaccggaagcggtacacctccaccaaggaggtgctggacgccaccctgatccaccagtccatcaccggcctgtacgagacccggatcgacctgtcccagctgggcggcgactccggcggctcctccggcggctccaagcggaccgccgacggctccgagttcgagtcccccaagaagaagcggaaggtgtccggcggctcctccggcggctccatggactccaccaaggagaagtgcgactcctacaaggacgacctgctgctgcggatgggcctgaacgacaacaaggccggcatggagggcctggacaaggagaagatcaacaagatcatcatggaggccaccaagggctcccggttctacggcaacgagctgaagaaggagaagcaggtgaaccagcggatcgagaacatgatgcagcagaaggcccagatcacctcccagcagctgcggaaggcccagctgcaggtggaccggttcgccatggagctggagcagtcccggaacctgtccaacaccatcgtgcacatcgacatggacgccttctacgccgccgtggagatgcgggacaaccccgagctgaaggacaagcccatcgccgtgggctccatgtccatgctgtccacctccaactaccacgcccggcggttcggcgtgcgggccgccatgcccggcttcatcgccaagcggctgtgcccccagctgatcatcgtgccccccaacttcgacaagtaccgggccgtgtccaaggaggtgaaggagatcctggccgactacgaccccaacttcatggccatgtccctggacgaggcctacctgaacatcaccaagcacctggaggagcggcagaactggcccgaggacaagcggcggtacttcatcaagatgggctcctccgtggagaacgacaaccccggcaaggaggtgaacaagctgtccgagcacgagcggtccatctcccccctgctgttcgaggagtccccctccgacgtgcagccccccggcgaccccttccaggtgaacttcgaggagcagaacaacccccagatcctgcagaactccgtggtgttcggcacctccgcccaggaggtggtgaaggagatccggttccggatcgagcagaagaccaccctgaccgcctccgccggcatcgcccccaacaccatgctggccaaggtgtgctccgacaagaacaagcccaacggccagtaccagatcctgcccaaccggcaggccgtgatggacttcatcaaggacctgcccatccggaaggtgtccggcatcggcaaggtgaccgagaagatgctgaaggccctgggcatcatcacctgcaccgagctgtaccagcagcgggccctgctgtccctgctgttctccgagacctcctggcactacttcctgcacatctccctgggcctgggctccacccacctgacccgggaccgggtgcggaagtccatgtccgtggagcggaccttctccgagatcaacaaggccgaggagcagtactccctgtgccaggagctgtgctccgagctggcccaggacctgcagaaggagcggctgaagggccggaccgtgaccatcaagctgaagaacgtgaacttcgaggtgaagacccgggcctccaccgtgtcctccgtggtgtccaccgccgaggagatcttcgccatcgccaaggagctgctgaagaccgagatcgacgccgacttcccccaccccctgcggctgcggctgatgggcgtgcggatctcctccttccccaacgaggaggaccggaagcaccagcagggcggcggctccggcaagcggaccgccgacggctccggcggcggctcccccaagaagaagcggaaggtgtccgagtccgccacccccgagtccgtgtccggctggcggctgttcaagaagatctcctagctagcaccagcctcaagaacacccgaatggagtctctaagctacataataccaacttacactttacaaaatgttgtcccccaaaatgtagccattcgtatctgctcctaataaaaagaaagtttcttcacattctctcgagaaaaaaaaaaaatggaaaaaaaaaaaacggaaaaaaaaaaaaggtaaaaaaaaaaaatataaaaaaaaaaaacataaaaaaaaaaaacgaaaaaaaaaaaacgtaaaaaaaaaaaactcaaaaaaaaaaaagataaaaaaaaaaaacctaaaaaaaaaaaatgtaaaaaaaaaaaagggaaaaaaaaaaaacgcaaaaaaaaaaaacacaaaaaaaaaaaatgcaaaaaaaaaaaatcgaaaaaaaaaaaatctaaaaaaaaaaaacgaaaaaaaaaaaacccaaaaaaaaaaaagacaaaaaaaaaaaatagaaaaaaaaaaagttaaaaaaaaaaaactgaaaaaaaaaaaatttaaaaaaaaaaaatctag

SEQ ID NO: 2553 - DNA, 6526 bp, synthetic construct
  misc_feature 1..6526: note = Synthetic
  source 1..6526: mol_type = other DNA
aggaagctcagaataaacgctcaactttggccggatctgccaccatgaagcggactgcggacgggtccgagttcgagtctccgaagaagaagcgcaaggtcgataagaagtactccatcggcctggacatcggaactaacagtgttggctgggccgtgatcactgatgagtacaaggtcccgtccaagaaattcaaggtgctgggtaacaccgatcgacatagtatcaagaagaacctgatcggggccctcttgttcgacagcggcgagactgctgaggcgacgcgcttgaagaggacggcccggcgtcgatacacccgacgcaagaatcggatttgctatctccaggagatcttctccaacgagatggcaaaggtggacgactcgttcttccaccgcctcgaggagagctttctcgtcgaggaggacaagaagcacgagcgccaccccatattcgggaatatcgtggatgaggtcgcctatcacgagaagtaccccacgatttatcatttgcgcaagaagctggtagattcaaccgacaaggcggacttgcggttgatctacctagctcttgcgcatatgataaagtttcgggggcacttcttgattgaaggcgacctcaatcccgataactcggatgtggacaagctcttcatacagctggtgcagacctacaaccagctgtttgaagagaatccgattaatgcgtcgggtgtcgacgccaaggccatcctcagcgcgcgcctcagcaagtctcgccgccttgagaatctgattgcccagctcccgggcgagaagaagaacgggttgttcggtaaccttattgcgctgtcgcttggcctcactccgaacttcaagtcgaacttcgacttggcggaggacgccaagctgcagctcagtaaggatacctacgacgacgacctggacaatcttctcgcccagatcggcgaccagtacgccgatctcttcctggcggcgaagaatctgagcgatgcaattctcctgagtgacattctgagggtgaatactgaaattacgaaggctccgctgtctgccagcatgatcaagcggtacgatgagcatcaccaggacctgacgctcctcaaggctctcgtccgtcagcagctcccggagaagtacaaggagatcttcttcgaccagtcgaagaacggatacgccgggtacatcgacgggggcgcttcccaggaggagttttataagtttataaagcccatcctggagaagatggacgggaccgaggagctcctggtgaagctcaaccgcgaggatctgctgcgcaagcagcggaccttcgataatggcagtattccccatcagattcacttaggagagttgcacgcgattcttcgccgccaggaagacttctaccccttcctcaaagataacagggagaagatcgagaagatcctcaccttccgcatcccgtattacgtgggtcccctggcgcgggggaactcacgttttgcgtggatgacgcggaagagtgaggagacgatcactccctggaactttgaggaagtggtagacaagggtgcttcggcacagtccttcatcgagcggatgacaaattttgacaagaatttgccgaacgagaaggtcttgccgaagcactcgctgctttacgagtactttacggtttacaacgagttgacgaaggtcaagtacgtcactgagggaatgcggaagcccgcattcctcagtggcgaacagaagaaggccatcgtcgacttgttgttcaagacgaaccgtaaagtaaccgtgaagcagctgaaggaggactacttcaagaagatcgagtgcttcgactccgttgagatcagcggagtcgaagaccgatttaatgcctccctcggtacgtatcatgatctcctcaagattatcaaggataaggacttccttgataatgaggagaatgaggatattctcgaggacattgtgctgaccctcaccctgttcgaagaccgtgagatgattgaggaacggttgaagacctacgctcatctgtttgatgacaaggtcatgaagcagttgaagcgtaggcgttataccggctggggtcgtctttcccgaaagcttatcaacgggatccgtgataagcagtcgggaaagacgatcctagacttcctcaagtctgacggttttgcgaacaggaacttcatgcagctcatccacgacgactccttgaccttcaaggaggatatccagaaggcgcaggtgagcggccagggcgatagcttgcacgagcatatcgcgaacctggccggctcacctgcgatcaagaagggtatcctccagacggtcaaggtcgtggatgagctcgtgaaggtgatgggtcggcacaagcccgagaatatcgtcatcgagatggctcgcgagaatcagacgacccagaagggtcagaagaattctcgcgagcgcatgaagcgtatcgaggagggcattaaggagctgggcagtcagattctcaaggagcaccctgtcgagaacacgcagcttcagaacgagaagctgtatctttactacctccagaacggacgggacatgtacgtagatcaggagctggacatcaaccggctctctgactacgatgtggacgctatagtgcctcagagctttctgaaggacgatagcatcgacaacaaggtcctgactcgctccgataagaatcggggcaagtcggacaatgtcccgtccgaggaggtagtgaagaagatgaagaactattggcgtcagctgttgaacgcgaagctgatcactcagagaaagttcgataatctcaccaaggccgagagggggggtctgagcgagcttgataaggcgggtttcatcaagcggcagcttgttgagacccgccagatcacgaagcacgtcgctcagatcctcgactctcggatgaacaccaagtacgacgagaatgacaagcttattcgggaggtcaaggtcattacccttaagtcgaagctcgtcagcgactttcgcaaggattttcagttttataaagttcgtgagataaacaattatcaccatgcccacgacgcgtacctgaacgccgtcgtgggcacggcgctgataaagaagtacccgaagctggagtccgagttcgtttatggcgattataaggtgtacgacgtgcgcaagatgatcgccaagagcgagcaggagatcggaaaggctacggcgaagtacttcttttacagcaacatcatgaacttttttaagactgagatcacccttgcgaatggcgagatccgcaagcgcccgttgatcgagacgaacggggagactggggagattgtgtgggataagggtcgggatttcgctacggtgagaaaggttctttcgatgccccaggtcaacatcgtcaagaagacggaggttcagaccgggggcttctcgaaagaatctatcttaccgaagcgaaattccgacaagcttatcgcacgcaagaaggactgggaccccaagaagtacggggggttcgacagtcctacggtggcctactccgtgttggtggtcgccaaggttgagaagggcaagagcaagaagctcaagtccgtcaaggagctcttggggatcaccatcatggagaggtcatcgtttgagaagaatcctattgacttccttgaagccaagggctacaaggaagtcaagaaggatttgatcatcaagctccccaagtactccctgttcgagctcgagaacgggcgcaagcggatgctcgccagcgctggcgagcttcagaagggtaatgagcttgccctcccgagtaagtatgtcaatttcttgtacttggcgtcgcactacgagaagctgaagggctcgccggaggacaacgagcagaagcagcttttcgtagagcagcacaagcactaccttgatgagattatcgagcagatctctgagttcagcaagcgcgttatactagctgacgccaatctcgacaaggtgctctcggcttataacaagcaccgggataagccgatacgtgagcaggcggagaacatcatccacctgttcacgttgacgaacttgggggccccggcagcgttcaagtattttgatactacgatcgatcggaagcgttacaccagcaccaaggaggtcttggacgcgaccttgattcatcagtcgatcacgggtctttacgagactcgaattgacctttctcagcttggtggtgacagtggcggctcttcaggcggctccaagaggactgcggatggttctgaattcgaatcacctaagaagaagcggaaggtctccggggggtcgtccgggggctctatggacagcacgaaggagaagtgcgactcttataaggatgacctgcttctccggatggggctcaatgacaataaagccgggatggagggcctcgataaggagaagatcaacaagatcatcatggaggccactaaggggtcccggttttatggcaatgagctcaagaaggagaagcaggtcaaccagcgcatcgagaacatgatgcagcagaaggctcagataactagtcagcagctgcgcaaggcgcagctgcaggtggacagattcgccatggagctcgagcagtcgcgcaacttgagcaacacgattgtccacatcgacatggacgcgttctacgcggccgtggagatgcgggacaatcctgagctcaaggacaagccgattgctgtgggctccatgtcgatgctgtccacctctaactaccatgcccggaggttcggtgtccgcgctgctatgcccggctttatagcgaagcgcctctgtcctcagctaattatcgttcctccaaacttcgataagtacagggccgtgtccaaggaggtcaaggagattctggcggactacgacccgaatttcatggccatgtccttggacgaggcgtacctgaacattacgaagcatttggaggagcgacagaattggcctgaggacaagaggcgctactttataaagatgggcagcagcgtggagaacgataatccgggcaaggaagttaacaagttgtctgagcatgagaggagcatttctcctttgctgttcgaggagagcccctcggacgtgcagccccccggagacccgtttcaggtgaacttcgaagagcagaacaatccgcagatcctccagaacagcgtggtgttcggcacgagtgcccaggaggtggtcaaggagattcgttttcgcatcgagcagaagacgaccttgaccgcctccgcgggcatcgcgccgaacaccatgctggccaaggtttgttctgacaagaacaagcctaatggccagtaccagatcctcccaaaccgtcaagccgtgatggacttcatcaaggacctgccgattcggaaggtatctggtatcggtaaggttaccgagaagatgctgaaggccctgggcatcataacttgcacagagctctaccagcagcgagcgctcctcagcctgttgttctccgagacctcttggcactactttcttcacatctctctgggcctgggctcgacccacttgacccgagaccgagtgaggaagagtatgagtgtcgagaggaccttctcggagatcaacaaggctgaggagcagtactcgctgtgccaggagctctgtagcgagttagcccaggaccttcagaaggagcgcctgaagggccgcactgtcaccatcaagctgaagaatgtcaacttcgaggtgaagacccgggccagcactgttagttccgtggtgtccacggccgaggagatcttcgctatcgccaaggagcttcttaagacggagatcgacgcggactttccgcatccgcttcgcctccgccttatgggcgtccggatctcctcgtttcctaacgaggaggaccggaagcaccagcaaggcggaggctcaggcaagcggaccgctgacggctccggggggggctctccgaaaaagaagcggaaggtttcggagagcgccaccccggagtccgtcagcggttggcgcctgttcaagaagatttcttgactagcaccagcctcaagaacacccgaatggagtctctaagctacataataccaacttacactttacaaaatgttgtcccccaaaatgtagccattcgtatctgctcctaataaaaagaaagtttcttcacattctctcgagaaaaaaaaaaaatggaaaaaaaaaaaacggaaaaaaaaaaaaggtaaaaaaaaaaaatataaaaaaaaaaaacataaaaaaaaaaaacgaaaaaaaaaaaacgtaaaaaaaaaaaactcaaaaaaaaaaaagataaaaaaaaaaaacctaaaaaaaaaaaatgtaaaaaaaaaaaagggaaaaaaaaaaaacgcaaaaaaaaaaaacacaaaaaaaaaaaatgcaaaaaaaaaaaatcgaaaaaaaaaaaatctaaaaaaaaaaaacgaaaaaaaaaaaacccaaaaaaaaaaaagacaaaaaaaaaaaatagaaaaaaaaaaagttaaaaaaaaaaaactgaaaaaaaaaaaatttaaaaaaaaaaaatctag

SEQ ID NO: 2554 - DNA, 6566 bp, synthetic construct
  misc_feature 1..6566: note = Synthetic
  source 1..6566: mol_type = other DNA
aggactcactatttgttttcgcgcccagttgcaaaaagtgtcgaagctcagaataaacgctcaactttggccggatctgccaccatgaagcggactgcggacgggtccgagttcgagtctccgaagaagaagcgcaaggtcgataagaagtactccatcggcctggacatcggaactaacagtgttggctgggccgtgatcactgatgagtacaaggtcccgtccaagaaattcaaggtgctgggtaacaccgatcgacatagtatcaagaagaacctgatcggggccctcttgttcgacagcggcgagactgctgaggcgacgcgcttgaagaggacggcccggcgtcgatacacccgacgcaagaatcggatttgctatctccaggagatcttctccaacgagatggcaaaggtggacgactcgttcttccaccgcctcgaggagagctttctcgtcgaggaggacaagaagcacgagcgccaccccatattcgggaatatcgtggatgaggtcgcctatcacgagaagtaccccacgatttatcatttgcgcaagaagctggtagattcaaccgacaaggcggacttgcggttgatctacctagctcttgcgcatatgataaagtttcgggggcacttcttgattgaaggcgacctcaatcccgataactcggatgtggacaagctcttcatacagctggtgcagacctacaaccagctgtttgaagagaatccgattaatgcgtcgggtgtcgacgccaaggccatcctcagcgcgcgcctcagcaagtctcgccgccttgagaatctgattgcccagctcccgggcgagaagaagaacgggttgttcggtaaccttattgcgctgtcgcttggcctcactccgaacttcaagtcgaacttcgacttggcggaggacgccaagctgcagctcagtaaggatacctacgacgacgacctggacaatcttctcgcccagatcggcgaccagtacgccgatctcttcctggcggcgaagaatctgagcgatgcaattctcctgagtgacattctgagggtgaatactgaaattacgaaggctccgctgtctgccagcatgatcaagcggtacgatgagcatcaccaggacctgacgctcctcaaggctctcgtccgtcagcagctcccggagaagtacaaggagatcttcttcgaccagtcgaagaacggatacgccgggtacatcgacgggggcgcttcccaggaggagttttataagtttataaagcccatcctggagaagatggacgggaccgaggagctcctggtgaagctcaaccgcgaggatctgctgcgcaagcagcggaccttcgataatggcagtattccccatcagattcacttaggagagttgcacgcgattcttcgccgccaggaagacttctaccccttcctcaaagataacagggagaagatcgagaagatcctcaccttccgcatcccgtattacgtgggtcccctggcgcgggggaactcacgttttgcgtggatgacgcggaagagtgaggagacgatcactccctggaactttgaggaagtggtagacaagggtgcttcggcacagtccttcatcgagcggatgacaaattttgacaagaatttgccgaacgagaaggtcttgccgaagcactcgctgctttacgagtactttacggtttacaacgagttgacgaaggtcaagtacgtcactgagggaatgcggaagcccgcattcctcagtggcgaacagaagaaggccatcgtcgacttgttgttcaagacgaaccgtaaagtaaccgtgaagcagctgaaggaggactacttcaagaagatcgagtgcttcgactccgttgagatcagcggagtcgaagaccgatttaatgcctccctcggtacgtatcatgatctcctcaagattatcaaggataaggacttccttgataatgaggagaatgaggatattctcgaggacattgtgctgaccctcaccctgttcgaagaccgtgagatgattgaggaacggttgaagacctacgctcatctgtttgatgacaaggtcatgaagcagttgaagcgtaggcgttataccggctggggtcgtctttcccgaaagcttatcaacgggatccgtgataagcagtcgggaaagacgatcctagacttcctcaagtctgacggttttgcgaacaggaacttcatgcagctcatccacgacgactccttgaccttcaaggaggatatccagaaggcgcaggtgagcggccagggcgatagcttgcacgagcatatcgcgaacctggccggctcacctgcgatcaagaagggtatcctccagacggtcaaggtcgtggatgagctcgtgaaggtgatgggtcggcacaagcccgagaatatcgtcatcgagatggctcgcgagaatcagacgacccagaagggtcagaagaattctcgcgagcgcatgaagcgtatcgaggagggcattaaggagctgggcagtcagattctcaaggagcaccctgtcgagaacacgcagcttcagaacgagaagctgtatctttactacctccagaacggacgggacatgtacgtagatcaggagctggacatcaaccggctctctgactacgatgtggacgctatagtgcctcagagctttctgaaggacgatagcatcgacaacaaggtcctgactcgctccgataagaatcggggcaagtcggacaatgtcccgtccgaggaggtagtgaagaagatgaagaactattggcgtcagctgttgaacgcgaagctgatcactcagagaaagttcgataatctcaccaaggccgagagggggggtctgagcgagcttgataaggcgggtttcatcaagcggcagcttgttgagacccgccagatcacgaagcacgtcgctcagatcctcgactctcggatgaacaccaagtacgacgagaatgacaagcttattcgggaggtcaaggtcattacccttaagtcgaagctcgtcagcgactttcgcaaggattttcagttttataaagttcgtgagataaacaattatcaccatgcccacgacgcgtacctgaacgccgtcgtgggcacggcgctgataaagaagtacccgaagctggagtccgagttcgtttatggcgattataaggtgtacgacgtgcgcaagatgatcgccaagagcgagcaggagatcggaaaggctacggcgaagtacttcttttacagcaacatcatgaacttttttaagactgagatcacccttgcgaatggcgagatccgcaagcgcccgttgatcgagacgaacggggagactggggagattgtgtgggataagggtcgggatttcgctacggtgagaaaggttctttcgatgccccaggtcaacatcgtcaagaagacggaggttcagaccgggggcttctcgaaagaatctatcttaccgaagcgaaattccgacaagcttatcgcacgcaagaaggactgggaccccaagaagtacggggggttcgacagtcctacggtggcctactccgtgttggtggtcgccaaggttgagaagggcaagagcaagaagctcaagtccgtcaaggagctcttggggatcaccatcatggagaggtcatcgtttgagaagaatcctattgacttccttgaagccaagggctacaaggaagtcaagaaggatttgatcatcaagctccccaagtactccctgttcgagctcgagaacgggcgcaagcggatgctcgccagcgctggcgagcttcagaagggtaatgagcttgccctcccgagtaagtatgtcaatttcttgtacttggcgtcgcactacgagaagctgaagggctcgccggaggacaacgagcagaagcagcttttcgtagagcagcacaagcactaccttgatgagattatcgagcagatctctgagttcagcaagcgcgttatactagctgacgccaatctcgacaaggtgctctcggcttataacaagcaccgggataagccgatacgtgagcaggcggagaacatcatccacctgttcacgttgacgaacttgggggccccggcagcgttcaagtattttgatactacgatcgatcggaagcgttacaccagcaccaaggaggtcttggacgcgaccttgattcatcagtcgatcacgggtctttacgagactcgaattgacctttctcagcttggtggtgacagtggcggctcttcaggcggctccaagaggactgcggatggttctgaattcgaatcacctaagaagaagcggaaggtctccggggggtcgtccgggggctctatggacagcacgaaggagaagtgcgactcttataaggatgacctgcttctccggatggggctcaatgacaataaagccgggatggagggcctcgataaggagaagatcaacaagatcatcatggaggccactaaggggtcccggttttatggcaatgagctcaagaaggagaagcaggtcaaccagcgcatcgagaacatgatgcagcagaaggctcagataactagtcagcagctgcgcaaggcgcagctgcaggtggacagattcgccatggagctcgagcagtcgcgcaacttgagcaacacgattgtccacatcgacatggacgcgttctacgcggccgtggagatgcgggacaatcctgagctcaaggacaagccgattgctgtgggctccatgtcgatgctgtccacctctaactaccatgcccggaggttcggtgtccgcgctgctatgcccggctttatagcgaagcgcctctgtcctcagctaattatcgttcctccaaacttcgataagtacagggccgtgtccaaggaggtcaaggagattctggcggactacgacccgaatttcatggccatgtccttggacgaggcgtacctgaacattacgaagcatttggaggagcgacagaattggcctgaggacaagaggcgctactttataaagatgggcagcagcgtggagaacgataatccgggcaaggaagttaacaagttgtctgagcatgagaggagcatttctcctttgctgttcgaggagagcccctcggacgtgcagccccccggagacccgtttcaggtgaacttcgaagagcagaacaatccgcagatcctccagaacagcgtggtgttcggcacgagtgcccaggaggtggtcaaggagattcgttttcgcatcgagcagaagacgaccttgaccgcctccgcgggcatcgcgccgaacaccatgctggccaaggtttgttctgacaagaacaagcctaatggccagtaccagatcctcccaaaccgtcaagccgtgatggacttcatcaaggacctgccgattcggaaggtatctggtatcggtaaggttaccgagaagatgctgaaggccctgggcatcataacttgcacagagctctaccagcagcgagcgctcctcagcctgttgttctccgagacctcttggcactactttcttcacatctctctgggcctgggctcgacccacttgacccgagaccgagtgaggaagagtatgagtgtcgagaggaccttctcggagatcaacaaggctgaggagcagtactcgctgtgccaggagctctgtagcgagttagcccaggaccttcagaaggagcgcctgaagggccgcactgtcaccatcaagctgaagaatgtcaacttcgaggtgaagacccgggccagcactgttagttccgtggtgtccacggccgaggagatcttcgctatcgccaaggagcttcttaagacggagatcgacgcggactttccgcatccgcttcgcctccgccttatgggcgtccggatctcctcgtttcctaacgaggaggaccggaagcaccagcaaggcggaggctcaggcaagcggaccgctgacggctccggggggggctctccgaaaaagaagcggaaggtttcggagagcgccaccccggagtccgtcagcggttggcgcctgttcaagaagatttcttgactagcaccagcctcaagaacacccgaatggagtctctaagctacataataccaacttacactttacaaaatgttgtcccccaaaatgtagccattcgtatctgctcctaataaaaagaaagtttcttcacattctctcgagaaaaaaaaaaaatggaaaaaaaaaaaacggaaaaaaaaaaaaggtaaaaaaaaaaaatataaaaaaaaaaaacataaaaaaaaaaaacgaaaaaaaaaaaacgtaaaaaaaaaaaactcaaaaaaaaaaaagataaaaaaaaaaaacctaaaaaaaaaaaatgtaaaaaaaaaaaagggaaaaaaaaaaaacgcaaaaaaaaaaaacacaaaaaaaaaaaatgcaaaaaaaaaaaatcgaaaaaaaaaaaatctaaaaaaaaaaaacgaaaaaaaaaaaacccaaaaaaaaaaaagacaaaaaaaaaaaatagaaaaaaaaaaagttaaaaaaaaaaaactgaaaaaaaaaaaatttaaaaaaaaaaaatctag

SEQ ID NO: 2555 - DNA, 6620 bp, synthetic construct
  misc_feature 1..6620: note = Synthetic
  source 1..6620: mol_type = other DNA
aggaagctcagaataaacgctcaactttggccggatctgccaccatgaagcggactgcggacgggtccgagttcgagtctccgaagaagaagcgcaaggtcgataagaagtactccatcggcctggacatcggaactaacagtgttggctgggccgtgatcactgatgagtacaaggtcccgtccaagaaattcaaggtgctgggtaacaccgatcgacatagtatcaagaagaacctgatcggggccctcttgttcgacagcggcgagactgctgaggcgacgcgcttgaagaggacggcccggcgtcgatacacccgacgcaagaatcggatttgctatctccaggagatcttctccaacgagatggcaaaggtggacgactcgttcttccaccgcctcgaggagagctttctcgtcgaggaggacaagaagcacgagcgccaccccatattcgggaatatcgtggatgaggtcgcctatcacgagaagtaccccacgatttatcatttgcgcaagaagctggtagattcaaccgacaaggcggacttgcggttgatctacctagctcttgcgcatatgataaagtttcgggggcacttcttgattgaaggcgacctcaatcccgataactcggatgtggacaagctcttcatacagctggtgcagacctacaaccagctgtttgaagagaatccgattaatgcgtcgggtgtcgacgccaaggccatcctcagcgcgcgcctcagcaagtctcgccgccttgagaatctgattgcccagctcccgggcgagaagaagaacgggttgttcggtaaccttattgcgctgtcgcttggcctcactccgaacttcaagtcgaacttcgacttggcggaggacgccaagctgcagctcagtaaggatacctacgacgacgacctggacaatcttctcgcccagatcggcgaccagtacgccgatctcttcctggcggcgaagaatctgagcgatgcaattctcctgagtgacattctgagggtgaatactgaaattacgaaggctccgctgtctgccagcatgatcaagcggtacgatgagcatcaccaggacctgacgctcctcaaggctctcgtccgtcagcagctcccggagaagtacaaggagatcttcttcgaccagtcgaagaacggatacgccgggtacatcgacgggggcgcttcccaggaggagttttataagtttataaagcccatcctggagaagatggacgggaccgaggagctcctggtgaagctcaaccgcgaggatctgctgcgcaagcagcggaccttcgataatggcagtattccccatcagattcacttaggagagttgcacgcgattcttcgccgccaggaagacttctaccccttcctcaaagataacagggagaagatcgagaagatcctcaccttccgcatcccgtattacgtgggtcccctggcgcgggggaactcacgttttgcgtggatgacgcggaagagtgaggagacgatcactccctggaactttgaggaagtggtagacaagggtgcttcggcacagtccttcatcgagcggatgacaaattttgacaagaatttgccgaacgagaaggtcttgccgaagcactcgctgctttacgagtactttacggtttacaacgagttgacgaaggtcaagtacgtcactgagggaatgcggaagcccgcattcctcagtggcgaacagaagaaggccatcgtcgacttgttgttcaagacgaaccgtaaagtaaccgtgaagcagctgaaggaggactacttcaagaagatcgagtgcttcgactccgttgagatcagcggagtcgaagaccgatttaatgcctccctcggtacgtatcatgatctcctcaagattatcaaggataaggacttccttgataatgaggagaatgaggatattctcgaggacattgtgctgaccctcaccctgttcgaagaccgtgagatgattgaggaacggttgaagacctacgctcatctgtttgatgacaaggtcatgaagcagttgaagcgtaggcgttataccggctggggtcgtctttcccgaaagcttatcaacgggatccgtgataagcagtcgggaaagacgatcctagacttcctcaagtctgacggttttgcgaacaggaacttcatgcagctcatccacgacgactccttgaccttcaaggaggatatccagaaggcgcaggtgagcggccagggcgatagcttgcacgagcatatcgcgaacctggccggctcacctgcgatcaagaagggtatcctccagacggtcaaggtcgtggatgagctcgtgaaggtgatgggtcggcacaagcccgagaatatcgtcatcgagatggctcgcgagaatcagacgacccagaagggtcagaagaattctcgcgagcgcatgaagcgtatcgaggagggcattaaggagctgggcagtcagattctcaaggagcaccctgtcgagaacacgcagcttcagaacgagaagctgtatctttactacctccagaacggacgggacatgtacgtagatcaggagctggacatcaaccggctctctgactacgatgtggacgctatagtgcctcagagctttctgaaggacgatagcatcgacaacaaggtcctgactcgctccgataagaatcggggcaagtcggacaatgtcccgtccgaggaggtagtgaagaagatgaagaactattggcgtcagctgttgaacgcgaagctgatcactcagagaaagttcgataatctcaccaaggccgagagggggggtctgagcgagcttgataaggcgggtttcatcaagcggcagcttgttgagacccgccagatcacgaagcacgtcgctcagatcctcgactctcggatgaacaccaagtacgacgagaatgacaagcttattcgggaggtcaaggtcattacccttaagtcgaagctcgtcagcgactttcgcaaggattttcagttttataaagttcgtgagataaacaattatcaccatgcccacgacgcgtacctgaacgccgtcgtgggcacggcgctgataaagaagtacccgaagctggagtccgagttcgtttatggcgattataaggtgtacgacgtgcgcaagatgatcgccaagagcgagcaggagatcggaaaggctacggcgaagtacttcttttacagcaacatcatgaacttttttaagactgagatcacccttgcgaatggcgagatccgcaagcgcccgttgatcgagacgaacggggagactggggagattgtgtgggataagggtcgggatttcgctacggtgagaaaggttctttcgatgccccaggtcaacatcgtcaagaagacggaggttcagaccgggggcttctcgaaagaatctatcttaccgaagcgaaattccgacaagcttatcgcacgcaagaaggactgggaccccaagaagtacggggggttcgacagtcctacggtggcctactccgtgttggtggtcgccaaggttgagaagggcaagagcaagaagctcaagtccgtcaaggagctcttggggatcaccatcatggagaggtcatcgtttgagaagaatcctattgacttccttgaagccaagggctacaaggaagtcaagaaggatttgatcatcaagctccccaagtactccctgttcgagctcgagaacgggcgcaagcggatgctcgccagcgctggcgagcttcagaagggtaatgagcttgccctcccgagtaagtatgtcaatttcttgtacttggcgtcgcactacgagaagctgaagggctcgccggaggacaacgagcagaagcagcttttcgtagagcagcacaagcactaccttgatgagattatcgagcagatctctgagttcagcaagcgcgttatactagctgacgccaatctcgacaaggtgctctcggcttataacaagcaccgggataagccgatacgtgagcaggcggagaacatcatccacctgttcacgttgacgaacttgggggccccggcagcgttcaagtattttgatactacgatcgatcggaagcgttacaccagcaccaaggaggtcttggacgcgaccttgattcatcagtcgatcacgggtctttacgagactcgaattgacctttctcagcttggtggtgacagtggcggctcttcaggcggctccaagaggactgcggatggttctgaattcgaatcacctaagaagaagcggaaggtctccggggggtcgtccgggggctctatggacagcacgaaggagaagtgcgactcttataaggatgacctgcttctccggatggggctcaatgacaataaagccgggatggagggcctcgataaggagaagatcaacaagatcatcatggaggccactaaggggtcccggttttatggcaatgagctcaagaaggagaagcaggtcaaccagcgcatcgagaacatgatgcagcagaaggctcagataactagtcagcagctgcgcaaggcgcagctgcaggtggacagattcgccatggagctcgagcagtcgcgcaacttgagcaacacgattgtccacatcgacatggacgcgttctacgcggccgtggagatgcgggacaatcctgagctcaaggacaagccgattgctgtgggctccatgtcgatgctgtccacctctaactaccatgcccggaggttcggtgtccgcgctgctatgcccggctttatagcgaagcgcctctgtcctcagctaattatcgttcctccaaacttcgataagtacagggccgtgtccaaggaggtcaaggagattctggcggactacgacccgaatttcatggccatgtccttggacgaggcgtacctgaacattacgaagcatttggaggagcgacagaattggcctgaggacaagaggcgctactttataaagatgggcagcagcgtggagaacgataatccgggcaaggaagttaacaagttgtctgagcatgagaggagcatttctcctttgctgttcgaggagagcccctcggacgtgcagccccccggagacccgtttcaggtgaacttcgaagagcagaacaatccgcagatcctccagaacagcgtggtgttcggcacgagtgcccaggaggtggtcaaggagattcgttttcgcatcgagcagaagacgaccttgaccgcctccgcgggcatcgcgccgaacaccatgctggccaaggtttgttctgacaagaacaagcctaatggccagtaccagatcctcccaaaccgtcaagccgtgatggacttcatcaaggacctgccgattcggaaggtatctggtatcggtaaggttaccgagaagatgctgaaggccctgggcatcataacttgcacagagctctaccagcagcgagcgctcctcagcctgttgttctccgagacctcttggcactactttcttcacatctctctgggcctgggctcgacccacttgacccgagaccgagtgaggaagagtatgagtgtcgagaggaccttctcggagatcaacaaggctgaggagcagtactcgctgtgccaggagctctgtagcgagttagcccaggaccttcagaaggagcgcctgaagggccgcactgtcaccatcaagctgaagaatgtcaacttcgaggtgaagacccgggccagcactgttagttccgtggtgtccacggccgaggagatcttcgctatcgccaaggagcttcttaagacggagatcgacgcggactttccgcatccgcttcgcctccgccttatgggcgtccggatctcctcgtttcctaacgaggaggaccggaagcaccagcaaggcggaggctcaggcaagcggaccgctgacggctccggggggggctctccgaaaaagaagcggaaggtttcggagagcgccaccccggagtccgtcagcggttggcgcctgttcaagaagatttcttgactagcaccagcctcaagaacacccgaatggagtctctaagctacataataccaacttacactttacaaaatgttgtcccccaaaatgtagccattcgtatctgctcctaataaaaagaaagtttcttcacattcttgtcagcccagaaccccacacgagttttgccactgctaagctgtgaggcagtgcaggctgggacagccgacctccaggttgcgaaaaacctggtctcgagaaaaaaaaaaaatggaaaaaaaaaaaacggaaaaaaaaaaaaggtaaaaaaaaaaaatataaaaaaaaaaaacataaaaaaaaaaaacgaaaaaaaaaaaacgtaaaaaaaaaaaactcaaaaaaaaaaaagataaaaaaaaaaaacctaaaaaaaaaaaatgtaaaaaaaaaaaagggaaaaaaaaaaaacgcaaaaaaaaaaaacacaaaaaaaaaaaatgcaaaaaaaaaaaatcgaaaaaaaaaaaatctaaaaaaaaaaaacgaaaaaaaaaaaacccaaaaaaaaaaaagacaaaaaaaaaaaatagaaaaaaaaaaagttaaaaaaaaaaaactgaaaaaaaaaaaatttaaaaaaaaaaaatctag

SEQ ID NO: 2556 - DNA, 6660 bp, synthetic construct
  misc_feature 1..6660: note = Synthetic
  source 1..6660: mol_type = other DNA
aggactcactatttgttttcgcgcccagttgcaaaaagtgtcgaagctcagaataaacgctcaactttggccggatctgccaccatgaagcggactgcggacgggtccgagttcgagtctccgaagaagaagcgcaaggtcgataagaagtactccatcggcctggacatcggaactaacagtgttggctgggccgtgatcactgatgagtacaaggtcccgtccaagaaattcaaggtgctgggtaacaccgatcgacatagtatcaagaagaacctgatcggggccctcttgttcgacagcggcgagactgctgaggcgacgcgcttgaagaggacggcccggcgtcgatacacccgacgcaagaatcggatttgctatctccaggagatcttctccaacgagatggcaaaggtggacgactcgttcttccaccgcctcgaggagagctttctcgtcgaggaggacaagaagcacgagcgccaccccatattcgggaatatcgtggatgaggtcgcctatcacgagaagtaccccacgatttatcatttgcgcaagaagctggtagattcaaccgacaaggcggacttgcggttgatctacctagctcttgcgcatatgataaagtttcgggggcacttcttgattgaaggcgacctcaatcccgataactcggatgtggacaagctcttcatacagctggtgcagacctacaaccagctgtttgaagagaatccgattaatgcgtcgggtgtcgacgccaaggccatcctcagcgcgcgcctcagcaagtctcgccgccttgagaatctgattgcccagctcccgggcgagaagaagaacgggttgttcggtaaccttattgcgctgtcgcttggcctcactccgaacttcaagtcgaacttcgacttggcggaggacgccaagctgcagctcagtaaggatacctacgacgacgacctggacaatcttctcgcccagatcggcgaccagtacgccgatctcttcctggcggcgaagaatctgagcgatgcaattctcctgagtgacattctgagggtgaatactgaaattacgaaggctccgctgtctgccagcatgatcaagcggtacgatgagcatcaccaggacctgacgctcctcaaggctctcgtccgtcagcagctcccggagaagtacaaggagatcttcttcgaccagtcgaagaacggatacgccgggtacatcgacgggggcgcttcccaggaggagttttataagtttataaagcccatcctggagaagatggacgggaccgaggagctcctggtgaagctcaaccgcgaggatctgctgcgcaagcagcggaccttcgataatggcagtattccccatcagattcacttaggagagttgcacgcgattcttcgccgccaggaagacttctaccccttcctcaaagataacagggagaagatcgagaagatcctcaccttccgcatcccgtattacgtgggtcccctggcgcgggggaactcacgttttgcgtggatgacgcggaagagtgaggagacgatcactccctggaactttgaggaagtggtagacaagggtgcttcggcacagtccttcatcgagcggatgacaaattttgacaagaatttgccgaacgagaaggtcttgccgaagcactcgctgctttacgagtactttacggtttacaacgagttgacgaaggtcaagtacgtcactgagggaatgcggaagcccgcattcctcagtggcgaacagaagaaggccatcgtcgacttgttgttcaagacgaaccgtaaagtaaccgtgaagcagctgaaggaggactacttcaagaagatcgagtgcttcgactccgttgagatcagcggagtcgaagaccgatttaatgcctccctcggtacgtatcatgatctcctcaagattatcaaggataaggacttccttgataatgaggagaatgaggatattctcgaggacattgtgctgaccctcaccctgttcgaagaccgtgagatgattgaggaacggttgaagacctacgctcatctgtttgatgacaaggtcatgaagcagttgaagcgtaggcgttataccggctggggtcgtctttcccgaaagcttatcaacgggatccgtgataagcagtcgggaaagacgatcctagacttcctcaagtctgacggttttgcgaacaggaacttcatgcagctcatccacgacgactccttgaccttcaaggaggatatccagaaggcgcaggtgagcggccagggcgatagcttgcacgagcatatcgcgaacctggccggctcacctgcgatcaagaagggtatcctccagacggtcaaggtcgtggatgagctcgtgaaggtgatgggtcggcacaagcccgagaatatcgtcatcgagatggctcgcgagaatcagacgacccagaagggtcagaagaattctcgcgagcgcatgaagcgtatcgaggagggcattaaggagctgggcagtcagattctcaaggagcaccctgtcgagaacacgcagcttcagaacgagaagctgtatctttactacctccagaacggacgggacatgtacgtagatcaggagctggacatcaaccggctctctgactacgatgtggacgctatagtgcctcagagctttctgaaggacgatagcatcgacaacaaggtcctgactcgctccgataagaatcggggcaagtcggacaatgtcccgtccgaggaggtagtgaagaagatgaagaactattggcgtcagctgttgaacgcgaagctgatcactcagagaaagttcgataatctcaccaaggccgagagggggggtctgagcgagcttgataaggcgggtttcatcaagcggcagcttgttgagacccgccagatcacgaagcacgtcgctcagatcctcgactctcggatgaacaccaagtacgacgagaatgacaagcttattcgggaggtcaaggtcattacccttaagtcgaagctcgtcagcgactttcgcaaggattttcagttttataaagttcgtgagataaacaattatcaccatgcccacgacgcgtacctgaacgccgtcgtgggcacggcgctgataaagaagtacccgaagctggagtccgagttcgtttatggcgattataaggtgtacgacgtgcgcaagatgatcgccaagagcgagcaggagatcggaaaggctacggcgaagtacttcttttacagcaacatcatgaacttttttaagactgagatcacccttgcgaatggcgagatccgcaagcgcccgttgatcgagacgaacggggagactggggagattgtgtgggataagggtcgggatttcgctacggtgagaaaggttctttcgatgccccaggtcaacatcgtcaagaagacggaggttcagaccgggggcttctcgaaagaatctatcttaccgaagcgaaattccgacaagcttatcgcacgcaagaaggactgggaccccaagaagtacggggggttcgacagtcctacggtggcctactccgtgttggtggtcgccaaggttgagaagggcaagagcaagaagctcaagtccgtcaaggagctcttggggatcaccatcatggagaggtcatcgtttgagaagaatcctattgacttccttgaagccaagggctacaaggaagtcaagaaggatttgatcatcaagctccccaagtactccctgttcgagctcgagaacgggcgcaagcggatgctcgccagcgctggcgagcttcagaagggtaatgagcttgccctcccgagtaagtatgtcaatttcttgtacttggcgtcgcactacgagaagctgaagggctcgccggaggacaacgagcagaagcagcttttcgtagagcagcacaagcactaccttgatgagattatcgagcagatctctgagttcagcaagcgcgttatactagctgacgccaatctcgacaaggtgctctcggcttataacaagcaccgggataagccgatacgtgagcaggcggagaacatcatccacctgttcacgttgacgaacttgggggccccggcagcgttcaagtattttgatactacgatcgatcggaagcgttacaccagcaccaaggaggtcttggacgcgaccttgattcatcagtcgatcacgggtctttacgagactcgaattgacctttctcagcttggtggtgacagtggcggctcttcaggcggctccaagaggactgcggatggttctgaattcgaatcacctaagaagaagcggaaggtctccggggggtcgtccgggggctctatggacagcacgaaggagaagtgcgactcttataaggatgacctgcttctccggatggggctcaatgacaataaagccgggatggagggcctcgataaggagaagatcaacaagatcatcatggaggccactaaggggtcccggttttatggcaatgagctcaagaaggagaagcaggtcaaccagcgcatcgagaacatgatgcagcagaaggctcagataactagtcagcagctgcgcaaggcgcagctgcaggtggacagattcgccatggagctcgagcagtcgcgcaacttgagcaacacgattgtccacatcgacatggacgcgttctacgcggccgtggagatgcgggacaatcctgagctcaaggacaagccgattgctgtgggctccatgtcgatgctgtccacctctaactaccatgcccggaggttcggtgtccgcgctgctatgcccggctttatagcgaagcgcctctgtcctcagctaattatcgttcctccaaacttcgataagtacagggccgtgtccaaggaggtcaaggagattctggcggactacgacccgaatttcatggccatgtccttggacgaggcgtacctgaacattacgaagcatttggaggagcgacagaattggcctgaggacaagaggcgctactttataaagatgggcagcagcgtggagaacgataatccgggcaaggaagttaacaagttgtctgagcatgagaggagcatttctcctttgctgttcgaggagagcccctcggacgtgcagccccccggagacccgtttcaggtgaacttcgaagagcagaacaatccgcagatcctccagaacagcgtggtgttcggcacgagtgcccaggaggtggtcaaggagattcgttttcgcatcgagcagaagacgaccttgaccgcctccgcgggcatcgcgccgaacaccatgctggccaaggtttgttctgacaagaacaagcctaatggccagtaccagatcctcccaaaccgtcaagccgtgatggacttcatcaaggacctgccgattcggaaggtatctggtatcggtaaggttaccgagaagatgctgaaggccctgggcatcataacttgcacagagctctaccagcagcgagcgctcctcagcctgttgttctccgagacctcttggcactactttcttcacatctctctgggcctgggctcgacccacttgacccgagaccgagtgaggaagagtatgagtgtcgagaggaccttctcggagatcaacaaggctgaggagcagtactcgctgtgccaggagctctgtagcgagttagcccaggaccttcagaaggagcgcctgaagggccgcactgtcaccatcaagctgaagaatgtcaacttcgaggtgaagacccgggccagcactgttagttccgtggtgtccacggccgaggagatcttcgctatcgccaaggagcttcttaagacggagatcgacgcggactttccgcatccgcttcgcctccgccttatgggcgtccggatctcctcgtttcctaacgaggaggaccggaagcaccagcaaggcggaggctcaggcaagcggaccgctgacggctccggggggggctctccgaaaaagaagcggaaggtttcggagagcgccaccccggagtccgtcagcggttggcgcctgttcaagaagatttcttgactagcaccagcctcaagaacacccgaatggagtctctaagctacataataccaacttacactttacaaaatgttgtcccccaaaatgtagccattcgtatctgctcctaataaaaagaaagtttcttcacattcttgtcagcccagaaccccacacgagttttgccactgctaagctgtgaggcagtgcaggctgggacagccgacctccaggttgcgaaaaacctggtctcgagaaaaaaaaaaaatggaaaaaaaaaaaacggaaaaaaaaaaaaggtaaaaaaaaaaaatataaaaaaaaaaaacataaaaaaaaaaaacgaaaaaaaaaaaacgtaaaaaaaaaaaactcaaaaaaaaaaaagataaaaaaaaaaaacctaaaaaaaaaaaatgtaaaaaaaaaaaagggaaaaaaaaaaaacgcaaaaaaaaaaaacacaaaaaaaaaaaatgcaaaaaaaaaaaatcgaaaaaaaaaaaatctaaaaaaaaaaaacgaaaaaaaaaaaacccaaaaaaaaaaaagacaaaaaaaaaaaatagaaaaaaaaaaagttaaaaaaaaaaaactgaaaaaaaaaaaatttaaaaaaaaaaaatctag

SEQ ID NO: 2557 - DNA, 6616 bp, synthetic construct
  misc_feature 1..6616: note = Synthetic
  source 1..6616: mol_type = other DNA
aggactcactatttgttttcgcgcccagttgcaaaaagtgtcgaaaaaaaaaaaaccaaaaaaaaaaaacaaaaaaaaaaaataattgactaaaagctcagaataaacgctcaactttggccggatctgccaccatgaagcggactgcggacgggtccgagttcgagtctccgaagaagaagcgcaaggtcgataagaagtactccatcggcctggacatcggaactaacagtgttggctgggccgtgatcactgatgagtacaaggtcccgtccaagaaattcaaggtgctgggtaacaccgatcgacatagtatcaagaagaacctgatcggggccctcttgttcgacagcggcgagactgctgaggcgacgcgcttgaagaggacggcccggcgtcgatacacccgacgcaagaatcggatttgctatctccaggagatcttctccaacgagatggcaaaggtggacgactcgttcttccaccgcctcgaggagagctttctcgtcgaggaggacaagaagcacgagcgccaccccatattcgggaatatcgtggatgaggtcgcctatcacgagaagtaccccacgatttatcatttgcgcaagaagctggtagattcaaccgacaaggcggacttgcggttgatctacctagctcttgcgcatatgataaagtttcgggggcacttcttgattgaaggcgacctcaatcccgataactcggatgtggacaagctcttcatacagctggtgcagacctacaaccagctgtttgaagagaatccgattaatgcgtcgggtgtcgacgccaaggccatcctcagcgcgcgcctcagcaagtctcgccgccttgagaatctgattgcccagctcccgggcgagaagaagaacgggttgttcggtaaccttattgcgctgtcgcttggcctcactccgaacttcaagtcgaacttcgacttggcggaggacgccaagctgcagctcagtaaggatacctacgacgacgacctggacaatcttctcgcccagatcggcgaccagtacgccgatctcttcctggcggcgaagaatctgagcgatgcaattctcctgagtgacattctgagggtgaatactgaaattacgaaggctccgctgtctgccagcatgatcaagcggtacgatgagcatcaccaggacctgacgctcctcaaggctctcgtccgtcagcagctcccggagaagtacaaggagatcttcttcgaccagtcgaagaacggatacgccgggtacatcgacgggggcgcttcccaggaggagttttataagtttataaagcccatcctggagaagatggacgggaccgaggagctcctggtgaagctcaaccgcgaggatctgctgcgcaagcagcggaccttcgataatggcagtattccccatcagattcacttaggagagttgcacgcgattcttcgccgccaggaagacttctaccccttcctcaaagataacagggagaagatcgagaagatcctcaccttccgcatcccgtattacgtgggtcccctggcgcgggggaactcacgttttgcgtggatgacgcggaagagtgaggagacgatcactccctggaactttgaggaagtggtagacaagggtgcttcggcacagtccttcatcgagcggatgacaaattttgacaagaatttgccgaacgagaaggtcttgccgaagcactcgctgctttacgagtactttacggtttacaacgagttgacgaaggtcaagtacgtcactgagggaatgcggaagcccgcattcctcagtggcgaacagaagaaggccatcgtcgacttgttgttcaagacgaaccgtaaagtaaccgtgaagcagctgaaggaggactacttcaagaagatcgagtgcttcgactccgttgagatcagcggagtcgaagaccgatttaatgcctccctcggtacgtatcatgatctcctcaagattatcaaggataaggacttccttgataatgaggagaatgaggatattctcgaggacattgtgctgaccctcaccctgttcgaagaccgtgagatgattgaggaacggttgaagacctacgctcatctgtttgatgacaaggtcatgaagcagttgaagcgtaggcgttataccggctggggtcgtctttcccgaaagcttatcaacgggatccgtgataagcagtcgggaaagacgatcctagacttcctcaagtctgacggttttgcgaacaggaacttcatgcagctcatccacgacgactccttgaccttcaaggaggatatccagaaggcgcaggtgagcggccagggcgatagcttgcacgagcatatcgcgaacctggccggctcacctgcgatcaagaagggtatcctccagacggtcaaggtcgtggatgagctcgtgaaggtgatgggtcggcacaagcccgagaatatcgtcatcgagatggctcgcgagaatcagacgacccagaagggtcagaagaattctcgcgagcgcatgaagcgtatcgaggagggcattaaggagctgggcagtcagattctcaaggagcaccctgtcgagaacacgcagcttcagaacgagaagctgtatctttactacctccagaacggacgggacatgtacgtagatcaggagctggacatcaaccggctctctgactacgatgtggacgctatagtgcctcagagctttctgaaggacgatagcatcgacaacaaggtcctgactcgctccgataagaatcggggcaagtcggacaatgtcccgtccgaggaggtagtgaagaagatgaagaactattggcgtcagctgttgaacgcgaagctgatcactcagagaaagttcgataatctcaccaaggccgagagggggggtctgagcgagcttgataaggcgggtttcatcaagcggcagcttgttgagacccgccagatcacgaagcacgtcgctcagatcctcgactctcggatgaacaccaagtacgacgagaatgacaagcttattcgggaggtcaaggtcattacccttaagtcgaagctcgtcagcgactttcgcaaggattttcagttttataaagttcgtgagataaacaattatcaccatgcccacgacgcgtacctgaacgccgtcgtgggcacggcgctgataaagaagtacccgaagctggagtccgagttcgtttatggcgattataaggtgtacgacgtgcgcaagatgatcgccaagagcgagcaggagatcggaaaggctacggcgaagtacttcttttacagcaacatcatgaacttttttaagactgagatcacccttgcgaatggcgagatccgcaagcgcccgttgatcgagacgaacggggagactggggagattgtgtgggataagggtcgggatttcgctacggtgagaaaggttctttcgatgccccaggtcaacatcgtcaagaagacggaggttcagaccgggggcttctcgaaagaatctatcttaccgaagcgaaattccgacaagcttatcgcacgcaagaaggactgggaccccaagaagtacggggggttcgacagtcctacggtggcctactccgtgttggtggtcgccaaggttgagaagggcaagagcaagaagctcaagtccgtcaaggagctcttggggatcaccatcatggagaggtcatcgtttgagaagaatcctattgacttccttgaagccaagggctacaaggaagtcaagaaggatttgatcatcaagctccccaagtactccctgttcgagctcgagaacgggcgcaagcggatgctcgccagcgctggcgagcttcagaagggtaatgagcttgccctcccgagtaagtatgtcaatttcttgtacttggcgtcgcactacgagaagctgaagggctcgccggaggacaacgagcagaagcagcttttcgtagagcagcacaagcactaccttgatgagattatcgagcagatctctgagttcagcaagcgcgttatactagctgacgccaatctcgacaaggtgctctcggcttataacaagcaccgggataagccgatacgtgagcaggcggagaacatcatccacctgttcacgttgacgaacttgggggccccggcagcgttcaagtattttgatactacgatcgatcggaagcgttacaccagcaccaaggaggtcttggacgcgaccttgattcatcagtcgatcacgggtctttacgagactcgaattgacctttctcagcttggtggtgacagtggcggctcttcaggcggctccaagaggactgcggatggttctgaattcgaatcacctaagaagaagcggaaggtctccggggggtcgtccgggggctctatggacagcacgaaggagaagtgcgactcttataaggatgacctgcttctccggatggggctcaatgacaataaagccgggatggagggcctcgataaggagaagatcaacaagatcatcatggaggccactaaggggtcccggttttatggcaatgagctcaagaaggagaagcaggtcaaccagcgcatcgagaacatgatgcagcagaaggctcagataactagtcagcagctgcgcaaggcgcagctgcaggtggacagattcgccatggagctcgagcagtcgcgcaacttgagcaacacgattgtccacatcgacatggacgcgttctacgcggccgtggagatgcgggacaatcctgagctcaaggacaagccgattgctgtgggctccatgtcgatgctgtccacctctaactaccatgcccggaggttcggtgtccgcgctgctatgcccggctttatagcgaagcgcctctgtcctcagctaattatcgttcctccaaacttcgataagtacagggccgtgtccaaggaggtcaaggagattctggcggactacgacccgaatttcatggccatgtccttggacgaggcgtacctgaacattacgaagcatttggaggagcgacagaattggcctgaggacaagaggcgctactttataaagatgggcagcagcgtggagaacgataatccgggcaaggaagttaacaagttgtctgagcatgagaggagcatttctcctttgctgttcgaggagagcccctcggacgtgcagccccccggagacccgtttcaggtgaacttcgaagagcagaacaatccgcagatcctccagaacagcgtggtgttcggcacgagtgcccaggaggtggtcaaggagattcgttttcgcatcgagcagaagacgaccttgaccgcctccgcgggcatcgcgccgaacaccatgctggccaaggtttgttctgacaagaacaagcctaatggccagtaccagatcctcccaaaccgtcaagccgtgatggacttcatcaaggacctgccgattcggaaggtatctggtatcggtaaggttaccgagaagatgctgaaggccctgggcatcataacttgcacagagctctaccagcagcgagcgctcctcagcctgttgttctccgagacctcttggcactactttcttcacatctctctgggcctgggctcgacccacttgacccgagaccgagtgaggaagagtatgagtgtcgagaggaccttctcggagatcaacaaggctgaggagcagtactcgctgtgccaggagctctgtagcgagttagcccaggaccttcagaaggagcgcctgaagggccgcactgtcaccatcaagctgaagaatgtcaacttcgaggtgaagacccgggccagcactgttagttccgtggtgtccacggccgaggagatcttcgctatcgccaaggagcttcttaagacggagatcgacgcggactttccgcatccgcttcgcctccgccttatgggcgtccggatctcctcgtttcctaacgaggaggaccggaagcaccagcaaggcggaggctcaggcaagcggaccgctgacggctccggggggggctctccgaaaaagaagcggaaggtttcggagagcgccaccccggagtccgtcagcggttggcgcctgttcaagaagatttcttgactagcaccagcctcaagaacacccgaatggagtctctaagctacataataccaacttacactttacaaaatgttgtcccccaaaatgtagccattcgtatctgctcctaataaaaagaaagtttcttcacattctctcgagaaaaaaaaaaaatggaaaaaaaaaaaacggaaaaaaaaaaaaggtaaaaaaaaaaaatataaaaaaaaaaaacataaaaaaaaaaaacgaaaaaaaaaaaacgtaaaaaaaaaaaactcaaaaaaaaaaaagataaaaaaaaaaaacctaaaaaaaaaaaatgtaaaaaaaaaaaagggaaaaaaaaaaaacgcaaaaaaaaaaaacacaaaaaaaaaaaatgcaaaaaaaaaaaatcgaaaaaaaaaaaatctaaaaaaaaaaaacgaaaaaaaaaaaacccaaaaaaaaaaaagacaaaaaaaaaaaatagaaaaaaaaaaagttaaaaaaaaaaaactgaaaaaaaaaaaatttaaaaaaaaaaaatctag

SEQ ID NO: 2558 - DNA, 6565 bp, synthetic construct
  misc_feature 1..6565: note = Synthetic
  source 1..6565: mol_type = other DNA
aggtgttcaaccagagtgaaaccactaacgggtcagagccccaagctcagaataaacgctcaactttggccggatctgccaccatgaagcggactgcggacgggtccgagttcgagtctccgaagaagaagcgcaaggtcgataagaagtactccatcggcctggacatcggaactaacagtgttggctgggccgtgatcactgatgagtacaaggtcccgtccaagaaattcaaggtgctgggtaacaccgatcgacatagtatcaagaagaacctgatcggggccctcttgttcgacagcggcgagactgctgaggcgacgcgcttgaagaggacggcccggcgtcgatacacccgacgcaagaatcggatttgctatctccaggagatcttctccaacgagatggcaaaggtggacgactcgttcttccaccgcctcgaggagagctttctcgtcgaggaggacaagaagcacgagcgccaccccatattcgggaatatcgtggatgaggtcgcctatcacgagaagtaccccacgatttatcatttgcgcaagaagctggtagattcaaccgacaaggcggacttgcggttgatctacctagctcttgcgcatatgataaagtttcgggggcacttcttgattgaaggcgacctcaatcccgataactcggatgtggacaagctcttcatacagctggtgcagacctacaaccagctgtttgaagagaatccgattaatgcgtcgggtgtcgacgccaaggccatcctcagcgcgcgcctcagcaagtctcgccgccttgagaatctgattgcccagctcccgggcgagaagaagaacgggttgttcggtaaccttattgcgctgtcgcttggcctcactccgaacttcaagtcgaacttcgacttggcggaggacgccaagctgcagctcagtaaggatacctacgacgacgacctggacaatcttctcgcccagatcggcgaccagtacgccgatctcttcctggcggcgaagaatctgagcgatgcaattctcctgagtgacattctgagggtgaatactgaaattacgaaggctccgctgtctgccagcatgatcaagcggtacgatgagcatcaccaggacctgacgctcctcaaggctctcgtccgtcagcagctcccggagaagtacaaggagatcttcttcgaccagtcgaagaacggatacgccgggtacatcgacgggggcgcttcccaggaggagttttataagtttataaagcccatcctggagaagatggacgggaccgaggagctcctggtgaagctcaaccgcgaggatctgctgcgcaagcagcggaccttcgataatggcagtattccccatcagattcacttaggagagttgcacgcgattcttcgccgccaggaagacttctaccccttcctcaaagataacagggagaagatcgagaagatcctcaccttccgcatcccgtattacgtgggtcccctggcgcgggggaactcacgttttgcgtggatgacgcggaagagtgaggagacgatcactccctggaactttgaggaagtggtagacaagggtgcttcggcacagtccttcatcgagcggatgacaaattttgacaagaatttgccgaacgagaaggtcttgccgaagcactcgctgctttacgagtactttacggtttacaacgagttgacgaaggtcaagtacgtcactgagggaatgcggaagcccgcattcctcagtggcgaacagaagaaggccatcgtcgacttgttgttcaagacgaaccgtaaagtaaccgtgaagcagctgaaggaggactacttcaagaagatcgagtgcttcgactccgttgagatcagcggagtcgaagaccgatttaatgcctccctcggtacgtatcatgatctcctcaagattatcaaggataaggacttccttgataatgaggagaatgaggatattctcgaggacattgtgctgaccctcaccctgttcgaagaccgtgagatgattgaggaacggttgaagacctacgctcatctgtttgatgacaaggtcatgaagcagttgaagcgtaggcgttataccggctggggtcgtctttcccgaaagcttatcaacgggatccgtgataagcagtcgggaaagacgatcctagacttcctcaagtctgacggttttgcgaacaggaacttcatgcagctcatccacgacgactccttgaccttcaaggaggatatccagaaggcgcaggtgagcggccagggcgatagcttgcacgagcatatcgcgaacctggccggctcacctgcgatcaagaagggtatcctccagacggtcaaggtcgtggatgagctcgtgaaggtgatgggtcggcacaagcccgagaatatcgtcatcgagatggctcgcgagaatcagacgacccagaagggtcagaagaattctcgcgagcgcatgaagcgtatcgaggagggcattaaggagctgggcagtcagattctcaaggagcaccctgtcgagaacacgcagcttcagaacgagaagctgtatctttactacctccagaacggacgggacatgtacgtagatcaggagctggacatcaaccggctctctgactacgatgtggacgctatagtgcctcagagctttctgaaggacgatagcatcgacaacaaggtcctgactcgctccgataagaatcggggcaagtcggacaatgtcccgtccgaggaggtagtgaagaagatgaagaactattggcgtcagctgttgaacgcgaagctgatcactcagagaaagttcgataatctcaccaaggccgagagggggggtctgagcgagcttgataaggcgggtttcatcaagcggcagcttgttgagacccgccagatcacgaagcacgtcgctcagatcctcgactctcggatgaacaccaagtacgacgagaatgacaagcttattcgggaggtcaaggtcattacccttaagtcgaagctcgtcagcgactttcgcaaggattttcagttttataaagttcgtgagataaacaattatcaccatgcccacgacgcgtacctgaacgccgtcgtgggcacggcgctgataaagaagtacccgaagctggagtccgagttcgtttatggcgattataaggtgtacgacgtgcgcaagatgatcgccaagagcgagcaggagatcggaaaggctacggcgaagtacttcttttacagcaacatcatgaacttttttaagactgagatcacccttgcgaatggcgagatccgcaagcgcccgttgatcgagacgaacggggagactggggagattgtgtgggataagggtcgggatttcgctacggtgagaaaggttctttcgatgccccaggtcaacatcgtcaagaagacggaggttcagaccgggggcttctcgaaagaatctatcttaccgaagcgaaattccgacaagcttatcgcacgcaagaaggactgggaccccaagaagtacggggggttcgacagtcctacggtggcctactccgtgttggtggtcgccaaggttgagaagggcaagagcaagaagctcaagtccgtcaaggagctcttggggatcaccatcatggagaggtcatcgtttgagaagaatcctattgacttccttgaagccaagggctacaaggaagtcaagaaggatttgatcatcaagctccccaagtactccctgttcgagctcgagaacgggcgcaagcggatgctcgccagcgctggcgagcttcagaagggtaatgagcttgccctcccgagtaagtatgtcaatttcttgtacttggcgtcgcactacgagaagctgaagggctcgccggaggacaacgagcagaagcagcttttcgtagagcagcacaagcactaccttgatgagattatcgagcagatctctgagttcagcaagcgcgttatactagctgacgccaatctcgacaaggtgctctcggcttataacaagcaccgggataagccgatacgtgagcaggcggagaacatcatccacctgttcacgttgacgaacttgggggccccggcagcgttcaagtattttgatactacgatcgatcggaagcgttacaccagcaccaaggaggtcttggacgcgaccttgattcatcagtcgatcacgggtctttacgagactcgaattgacctttctcagcttggtggtgacagtggcggctcttcaggcggctccaagaggactgcggatggttctgaattcgaatcacctaagaagaagcggaaggtctccggggggtcgtccgggggctctatggacagcacgaaggagaagtgcgactcttataaggatgacctgcttctccggatggggctcaatgacaataaagccgggatggagggcctcgataaggagaagatcaacaagatcatcatggaggccactaaggggtcccggttttatggcaatgagctcaagaaggagaagcaggtcaaccagcgcatcgagaacatgatgcagcagaaggctcagataactagtcagcagctgcgcaaggcgcagctgcaggtggacagattcgccatggagctcgagcagtcgcgcaacttgagcaacacgattgtccacatcgacatggacgcgttctacgcggccgtggagatgcgggacaatcctgagctcaaggacaagccgattgctgtgggctccatgtcgatgctgtccacctctaactaccatgcccggaggttcggtgtccgcgctgctatgcccggctttatagcgaagcgcctctgtcctcagctaattatcgttcctccaaacttcgataagtacagggccgtgtccaaggaggtcaaggagattctggcggactacgacccgaatttcatggccatgtccttggacgaggcgtacctgaacattacgaagcatttggaggagcgacagaattggcctgaggacaagaggcgctactttataaagatgggcagcagcgtggagaacgataatccgggcaaggaagttaacaagttgtctgagcatgagaggagcatttctcctttgctgttcgaggagagcccctcggacgtgcagccccccggagacccgtttcaggtgaacttcgaagagcagaacaatccgcagatcctccagaacagcgtggtgttcggcacgagtgcccaggaggtggtcaaggagattcgttttcgcatcgagcagaagacgaccttgaccgcctccgcgggcatcgcgccgaacaccatgctggccaaggtttgttctgacaagaacaagcctaatggccagtaccagatcctcccaaaccgtcaagccgtgatggacttcatcaaggacctgccgattcggaaggtatctggtatcggtaaggttaccgagaagatgctgaaggccctgggcatcataacttgcacagagctctaccagcagcgagcgctcctcagcctgttgttctccgagacctcttggcactactttcttcacatctctctgggcctgggctcgacccacttgacccgagaccgagtgaggaagagtatgagtgtcgagaggaccttctcggagatcaacaaggctgaggagcagtactcgctgtgccaggagctctgtagcgagttagcccaggaccttcagaaggagcgcctgaagggccgcactgtcaccatcaagctgaagaatgtcaacttcgaggtgaagacccgggccagcactgttagttccgtggtgtccacggccgaggagatcttcgctatcgccaaggagcttcttaagacggagatcgacgcggactttccgcatccgcttcgcctccgccttatgggcgtccggatctcctcgtttcctaacgaggaggaccggaagcaccagcaaggcggaggctcaggcaagcggaccgctgacggctccggggggggctctccgaaaaagaagcggaaggtttcggagagcgccaccccggagtccgtcagcggttggcgcctgttcaagaagatttcttgactagcaccagcctcaagaacacccgaatggagtctctaagctacataataccaacttacactttacaaaatgttgtcccccaaaatgtagccattcgtatctgctcctaataaaaagaaagtttcttcacattctctcgagaaaaaaaaaaaatggaaaaaaaaaaaacggaaaaaaaaaaaaggtaaaaaaaaaaaatataaaaaaaaaaaacataaaaaaaaaaaacgaaaaaaaaaaaacgtaaaaaaaaaaaactcaaaaaaaaaaaagataaaaaaaaaaaacctaaaaaaaaaaaatgtaaaaaaaaaaaagggaaaaaaaaaaaacgcaaaaaaaaaaaacacaaaaaaaaaaaatgcaaaaaaaaaaaatcgaaaaaaaaaaaatctaaaaaaaaaaaacgaaaaaaaaaaaacccaaaaaaaaaaaagacaaaaaaaaaaaatagaaaaaaaaaaagttaaaaaaaaaaaactgaaaaaaaaaaaatttaaaaaaaaaaaatctag

SEQ ID NO: 2559 - DNA, 6526 bp, synthetic construct
  misc_feature 1..6526: note = Synthetic
  source 1..6526: mol_type = other DNA
aggaagctcagaataaacgctcaactttggccggatctgccaccatgaagcggaccgccgacggctccgagttcgagtcccccaagaagaagcggaaggtggacaagaagtactccatcggcctggacatcggcaccaactccgtgggctgggccgtgatcaccgacgagtacaaggtgccctccaagaagttcaaggtgctgggcaacaccgaccggcactccatcaagaagaacctgatcggcgccctgctgttcgactccggcgagaccgccgaggccacccggctgaagcggaccgcccggcggcggtacacccggcggaagaaccggatctgctacctgcaggagatcttctccaacgagatggccaaggtggacgactccttcttccaccggctggaggagtccttcctggtggaggaggacaagaagcacgagcggcaccccatcttcggcaacatcgtggacgaggtggcctaccacgagaagtaccccaccatctaccacctgcggaagaagctggtggactccaccgacaaggccgacctgcggctgatctacctggccctggcccacatgatcaagttccggggccacttcctgatcgagggcgacctgaaccccgacaactccgacgtggacaagctgttcatccagctggtgcagacctacaaccagctgttcgaggagaaccccatcaacgcctccggcgtggacgccaaggccatcctgtccgcccggctgtccaagtcccggcggctggagaacctgatcgcccagctgcccggcgagaagaagaacggcctgttcggcaacctgatcgccctgtccctgggcctgacccccaacttcaagtccaacttcgacctggccgaggacgccaagctgcagctgtccaaggacacctacgacgacgacctggacaacctgctggcccagatcggcgaccagtacgccgacctgttcctggccgccaagaacctgtccgacgccatcctgctgtccgacatcctgcgggtgaacaccgagatcaccaaggcccccctgtccgcctccatgatcaagcggtacgacgagcaccaccaggacctgaccctgctgaaggccctggtgcggcagcagctgcccgagaagtacaaggagatcttcttcgaccagtccaagaacggctacgccggctacatcgacggcggcgcctcccaggaggagttctacaagttcatcaagcccatcctggagaagatggacggcaccgaggagctgctggtgaagctgaaccgggaggacctgctgcggaagcagcggaccttcgacaacggctccatcccccaccagatccacctgggcgagctgcacgccatcctgcggcggcaggaggacttctaccccttcctgaaggacaaccgggagaagatcgagaagatcctgaccttccggatcccctactacgtgggccccctggcccggggcaactcccggttcgcctggatgacccggaagtccgaggagaccatcaccccctggaacttcgaggaggtggtggacaagggcgcctccgcccagtccttcatcgagcggatgaccaacttcgacaagaacctgcccaacgagaaggtgctgcccaagcactccctgctgtacgagtacttcaccgtgtacaacgagctgaccaaggtgaagtacgtgaccgagggcatgcggaagcccgccttcctgtccggcgagcagaagaaggccatcgtggacctgctgttcaagaccaaccggaaggtgaccgtgaagcagctgaaggaggactacttcaagaagatcgagtgcttcgactccgtggagatctccggcgtggaggaccggttcaacgcctccctgggcacctaccacgacctgctgaagatcatcaaggacaaggacttcctggacaacgaggagaacgaggacatcctggaggacatcgtgctgaccctgaccctgttcgaggaccgggagatgatcgaggagcggctgaagacctacgcccacctgttcgacgacaaggtgatgaagcagctgaagcggcggcggtacaccggctggggccggctgtcccggaagctgatcaacggcatccgggacaagcagtccggcaagaccatcctggacttcctgaagtccgacggcttcgccaaccggaacttcatgcagctgatccacgacgactccctgaccttcaaggaggacatccagaaggcccaggtgtccggccagggcgactccctgcacgagcacatcgccaacctggccggctcccccgccatcaagaagggcatcctgcagaccgtgaaggtggtggacgagctggtgaaggtgatgggccggcacaagcccgagaacatcgtgatcgagatggcccgggagaaccagaccacccagaagggccagaagaactcccgggagcggatgaagcggatcgaggagggcatcaaggagctgggctcccagatcctgaaggagcaccccgtggagaacacccagctgcagaacgagaagctgtacctgtactacctgcagaacggccgggacatgtacgtggaccaggagctggacatcaaccggctgtccgactacgacgtggactccatcgtgccccagtccttcctgaaggacgactccatcgacaacaaggtgctgacccggtccgacaagaaccggggcaagtccgacaacgtgccctccgaggaggtggtgaagaagatgaagaactactggcggcagctgctgaacgccaagctgatcacccagcggaagttcgacaacctgaccaaggccgagcggggcggcctgtccgagctggacaaggccggcttcatcaagcggcagctggtggagacccggcagatcaccaagcacgtggcccagatcctggactcccggatgaacaccaagtacgacgagaacgacaagctgatccgggaggtgaaggtgatcaccctgaagtccaagctggtgtccgacttccggaaggacttccagttctacaaggtgcgggagatcaacaactaccaccacgcccacgacgcctacctgaacgccgtggtgggcaccgccctgatcaagaagtaccccaagctggagtccgagttcgtgtacggcgactacaaggtgtacgacgtgcggaagatgatcgccaagtccgagcaggagatcggcaaggccaccgccaagtacttcttctactccaacatcatgaacttcttcaagaccgagatcaccctggccaacggcgagatccggaagcggcccctgatcgagaccaacggcgagaccggcgagatcgtgtgggacaagggccgggacttcgccaccgtgcggaaggtgctgtccatgccccaggtgaacatcgtgaagaagaccgaggtgcagaccggcggcttctccaaggagtccatcctgcccaagcggaactccgacaagctgatcgcccggaagaaggactgggaccccaagaagtacggcggcttcgactcccccaccgtggcctactccgtgctggtggtggccaaggtggagaagggcaagtccaagaagctgaagtccgtgaaggagctgctgggcatcaccatcatggagcggtcctccttcgagaagaaccccatcgacttcctggaggccaagggctacaaggaggtgaagaaggacctgatcatcaagctgcccaagtactccctgttcgagctggagaacggccggaagcggatgctggcctccgccggcgagctgcagaagggcaacgagctggccctgccctccaagtacgtgaacttcctgtacctggcctcccactacgagaagctgaagggctcccccgaggacaacgagcagaagcagctgttcgtggagcagcacaagcactacctggacgagatcatcgagcagatctccgagttctccaagcgggtgatcctggccgacgccaacctggacaaggtgctgtccgcctacaacaagcaccgggacaagcccatccgggagcaggccgagaacatcatccacctgttcaccctgaccaacctgggcgcccccgccgccttcaagtacttcgacaccaccatcgaccggaagcggtacacctccaccaaggaggtgctggacgccaccctgatccaccagtccatcaccggcctgtacgagacccggatcgacctgtcccagctgggcggcgactccggcggctcctccggcggctccaagcggaccgccgacggctccgagttcgagtcccccaagaagaagcggaaggtgtccggcggctcctccggcggctccatggactccaccaaggagaagtgcgactcctacaaggacgacctgctgctgcggatgggcctgaacgacaacaaggccggcatggagggcctggacaaggagaagatcaacaagatcatcatggaggccaccaagggctcccggttctacggcaacgagctgaagaaggagaagcaggtgaaccagcggatcgagaacatgatgcagcagaaggcccagatcacctcccagcagctgcggaaggcccagctgcaggtggaccggttcgccatggagctggagcagtcccggaacctgtccaacaccatcgtgcacatcgacatggacgccttctacgccgccgtggagatgcgggacaaccccgagctgaaggacaagcccatcgccgtgggctccatgtccatgctgtccacctccaactaccacgcccggcggttcggcgtgcgggccgccatgcccggcttcatcgccaagcggctgtgcccccagctgatcatcgtgccccccaacttcgacaagtaccgggccgtgtccaaggaggtgaaggagatcctggccgactacgaccccaacttcatggccatgtccctggacgaggcctacctgaacatcaccaagcacctggaggagcggcagaactggcccgaggacaagcggcggtacttcatcaagatgggctcctccgtggagaacgacaaccccggcaaggaggtgaacaagctgtccgagcacgagcggtccatctcccccctgctgttcgaggagtccccctccgacgtgcagccccccggcgaccccttccaggtgaacttcgaggagcagaacaacccccagatcctgcagaactccgtggtgttcggcacctccgcccaggaggtggtgaaggagatccggttccggatcgagcagaagaccaccctgaccgcctccgccggcatcgcccccaacaccatgctggccaaggtgtgctccgacaagaacaagcccaacggccagtaccagatcctgcccaaccggcaggccgtgatggacttcatcaaggacctgcccatccggaaggtgtccggcatcggcaaggtgaccgagaagatgctgaaggccctgggcatcatcacctgcaccgagctgtaccagcagcgggccctgctgtccctgctgttctccgagacctcctggcactacttcctgcacatctccctgggcctgggctccacccacctgacccgggaccgggtgcggaagtccatgtccgtggagcggaccttctccgagatcaacaaggccgaggagcagtactccctgtgccaggagctgtgctccgagctggcccaggacctgcagaaggagcggctgaagggccggaccgtgaccatcaagctgaagaacgtgaacttcgaggtgaagacccgggcctccaccgtgtcctccgtggtgtccaccgccgaggagatcttcgccatcgccaaggagctgctgaagaccgagatcgacgccgacttcccccaccccctgcggctgcggctgatgggcgtgcggatctcctccttccccaacgaggaggaccggaagcaccagcagggcggcggctccggcaagcggaccgccgacggctccggcggcggctcccccaagaagaagcggaaggtgtccgagtccgccacccccgagtccgtgtccggctggcggctgttcaagaagatctcctagctagcaccagcctcaagaacacccgaatggagtctctaagctacataataccaacttacactttacaaaatgttgtcccccaaaatgtagccattcgtatctgctcctaataaaaagaaagtttcttcacattctctcgagaaaaaaaaaaaatggaaaaaaaaaaaacggaaaaaaaaaaaaggtaaaaaaaaaaaatataaaaaaaaaaaacataaaaaaaaaaaacgaaaaaaaaaaaacgtaaaaaaaaaaaactcaaaaaaaaaaaagataaaaaaaaaaaacctaaaaaaaaaaaatgtaaaaaaaaaaaagggaaaaaaaaaaaacgcaaaaaaaaaaaacacaaaaaaaaaaaatgcaaaaaaaaaaaatcgaaaaaaaaaaaatctaaaaaaaaaaaacgaaaaaaaaaaaacccaaaaaaaaaaaagacaaaaaaaaaaaatagaaaaaaaaaaagttaaaaaaaaaaaactgaaaaaaaaaaaatttaaaaaaaaaaaatctag

SEQ ID NO: 2560 - DNA, 6616 bp, synthetic construct
  misc_feature 1..6616: note = Synthetic
  source 1..6616: mol_type = other DNA
aggactcactatttgttttcgcgcccagttgcaaaaagtgtcgaaaaaaaaaaaaccaaaaaaaaaaaacaaaaaaaaaaaataattgactaaaagctcagaataaacgctcaactttggccggatctgccaccatgaagcggaccgccgacggctccgagttcgagtcccccaagaagaagcggaaggtggacaagaagtactccatcggcctggacatcggcaccaactccgtgggctgggccgtgatcaccgacgagtacaaggtgccctccaagaagttcaaggtgctgggcaacaccgaccggcactccatcaagaagaacctgatcggcgccctgctgttcgactccggcgagaccgccgaggccacccggctgaagcggaccgcccggcggcggtacacccggcggaagaaccggatctgctacctgcaggagatcttctccaacgagatggccaaggtggacgactccttcttccaccggctggaggagtccttcctggtggaggaggacaagaagcacgagcggcaccccatcttcggcaacatcgtggacgaggtggcctaccacgagaagtaccccaccatctaccacctgcggaagaagctggtggactccaccgacaaggccgacctgcggctgatctacctggccctggcccacatgatcaagttccggggccacttcctgatcgagggcgacctgaaccccgacaactccgacgtggacaagctgttcatccagctggtgcagacctacaaccagctgttcgaggagaaccccatcaacgcctccggcgtggacgccaaggccatcctgtccgcccggctgtccaagtcccggcggctggagaacctgatcgcccagctgcccggcgagaagaagaacggcctgttcggcaacctgatcgccctgtccctgggcctgacccccaacttcaagtccaacttcgacctggccgaggacgccaagctgcagctgtccaaggacacctacgacgacgacctggacaacctgctggcccagatcggcgaccagtacgccgacctgttcctggccgccaagaacctgtccgacgccatcctgctgtccgacatcctgcgggtgaacaccgagatcaccaaggcccccctgtccgcctccatgatcaagcggtacgacgagcaccaccaggacctgaccctgctgaaggccctggtgcggcagcagctgcccgagaagtacaaggagatcttcttcgaccagtccaagaacggctacgccggctacatcgacggcggcgcctcccaggaggagttctacaagttcatcaagcccatcctggagaagatggacggcaccgaggagctgctggtgaagctgaaccgggaggacctgctgcggaagcagcggaccttcgacaacggctccatcccccaccagatccacctgggcgagctgcacgccatcctgcggcggcaggaggacttctaccccttcctgaaggacaaccgggagaagatcgagaagatcctgaccttccggatcccctactacgtgggccccctggcccggggcaactcccggttcgcctggatgacccggaagtccgaggagaccatcaccccctggaacttcgaggaggtggtggacaagggcgcctccgcccagtccttcatcgagcggatgaccaacttcgacaagaacctgcccaacgagaaggtgctgcccaagcactccctgctgtacgagtacttcaccgtgtacaacgagctgaccaaggtgaagtacgtgaccgagggcatgcggaagcccgccttcctgtccggcgagcagaagaaggccatcgtggacctgctgttcaagaccaaccggaaggtgaccgtgaagcagctgaaggaggactacttcaagaagatcgagtgcttcgactccgtggagatctccggcgtggaggaccggttcaacgcctccctgggcacctaccacgacctgctgaagatcatcaaggacaaggacttcctggacaacgaggagaacgaggacatcctggaggacatcgtgctgaccctgaccctgttcgaggaccgggagatgatcgaggagcggctgaagacctacgcccacctgttcgacgacaaggtgatgaagcagctgaagcggcggcggtacaccggctggggccggctgtcccggaagctgatcaacggcatccgggacaagcagtccggcaagaccatcctggacttcctgaagtccgacggcttcgccaaccggaacttcatgcagctgatccacgacgactccctgaccttcaaggaggacatccagaaggcccaggtgtccggccagggcgactccctgcacgagcacatcgccaacctggccggctcccccgccatcaagaagggcatcctgcagaccgtgaaggtggtggacgagctggtgaaggtgatgggccggcacaagcccgagaacatcgtgatcgagatggcccgggagaaccagaccacccagaagggccagaagaactcccgggagcggatgaagcggatcgaggagggcatcaaggagctgggctcccagatcctgaaggagcaccccgtggagaacacccagctgcagaacgagaagctgtacctgtactacctgcagaacggccgggacatgtacgtggaccaggagctggacatcaaccggctgtccgactacgacgtggactccatcgtgccccagtccttcctgaaggacgactccatcgacaacaaggtgctgacccggtccgacaagaaccggggcaagtccgacaacgtgccctccgaggaggtggtgaagaagatgaagaactactggcggcagctgctgaacgccaagctgatcacccagcggaagttcgacaacctgaccaaggccgagcggggcggcctgtccgagctggacaaggccggcttcatcaagcggcagctggtggagacccggcagatcaccaagcacgtggcccagatcctggactcccggatgaacaccaagtacgacgagaacgacaagctgatccgggaggtgaaggtgatcaccctgaagtccaagctggtgtccgacttccggaaggacttccagttctacaaggtgcgggagatcaacaactaccaccacgcccacgacgcctacctgaacgccgtggtgggcaccgccctgatcaagaagtaccccaagctggagtccgagttcgtgtacggcgactacaaggtgtacgacgtgcggaagatgatcgccaagtccgagcaggagatcggcaaggccaccgccaagtacttcttctactccaacatcatgaacttcttcaagaccgagatcaccctggccaacggcgagatccggaagcggcccctgatcgagaccaacggcgagaccggcgagatcgtgtgggacaagggccgggacttcgccaccgtgcggaaggtgctgtccatgccccaggtgaacatcgtgaagaagaccgaggtgcagaccggcggcttctccaaggagtccatcctgcccaagcggaactccgacaagctgatcgcccggaagaaggactgggaccccaagaagtacggcggcttcgactcccccaccgtggcctactccgtgctggtggtggccaaggtggagaagggcaagtccaagaagctgaagtccgtgaaggagctgctgggcatcaccatcatggagcggtcctccttcgagaagaaccccatcgacttcctggaggccaagggctacaaggaggtgaagaaggacctgatcatcaagctgcccaagtactccctgttcgagctggagaacggccggaagcggatgctggcctccgccggcgagctgcagaagggcaacgagctggccctgccctccaagtacgtgaacttcctgtacctggcctcccactacgagaagctgaagggctcccccgaggacaacgagcagaagcagctgttcgtggagcagcacaagcactacctggacgagatcatcgagcagatctccgagttctccaagcgggtgatcctggccgacgccaacctggacaaggtgctgtccgcctacaacaagcaccgggacaagcccatccgggagcaggccgagaacatcatccacctgttcaccctgaccaacctgggcgcccccgccgccttcaagtacttcgacaccaccatcgaccggaagcggtacacctccaccaaggaggtgctggacgccaccctgatccaccagtccatcaccggcctgtacgagacccggatcgacctgtcccagctgggcggcgactccggcggctcctccggcggctccaagcggaccgccgacggctccgagttcgagtcccccaagaagaagcggaaggtgtccggcggctcctccggcggctccatggactccaccaaggagaagtgcgactcctacaaggacgacctgctgctgcggatgggcctgaacgacaacaaggccggcatggagggcctggacaaggagaagatcaacaagatcatcatggaggccaccaagggctcccggttctacggcaacgagctgaagaaggagaagcaggtgaaccagcggatcgagaacatgatgcagcagaaggcccagatcacctcccagcagctgcggaaggcccagctgcaggtggaccggttcgccatggagctggagcagtcccggaacctgtccaacaccatcgtgcacatcgacatggacgccttctacgccgccgtggagatgcgggacaaccccgagctgaaggacaagcccatcgccgtgggctccatgtccatgctgtccacctccaactaccacgcccggcggttcggcgtgcgggccgccatgcccggcttcatcgccaagcggctgtgcccccagctgatcatcgtgccccccaacttcgacaagtaccgggccgtgtccaaggaggtgaaggagatcctggccgactacgaccccaacttcatggccatgtccctggacgaggcctacctgaacatcaccaagcacctggaggagcggcagaactggcccgaggacaagcggcggtacttcatcaagatgggctcctccgtggagaacgacaaccccggcaaggaggtgaacaagctgtccgagcacgagcggtccatctcccccctgctgttcgaggagtccccctccgacgtgcagccccccggcgaccccttccaggtgaacttcgaggagcagaacaacccccagatcctgcagaactccgtggtgttcggcacctccgcccaggaggtggtgaaggagatccggttccggatcgagcagaagaccaccctgaccgcctccgccggcatcgcccccaacaccatgctggccaaggtgtgctccgacaagaacaagcccaacggccagtaccagatcctgcccaaccggcaggccgtgatggacttcatcaaggacctgcccatccggaaggtgtccggcatcggcaaggtgaccgagaagatgctgaaggccctgggcatcatcacctgcaccgagctgtaccagcagcgggccctgctgtccctgctgttctccgagacctcctggcactacttcctgcacatctccctgggcctgggctccacccacctgacccgggaccgggtgcggaagtccatgtccgtggagcggaccttctccgagatcaacaaggccgaggagcagtactccctgtgccaggagctgtgctccgagctggcccaggacctgcagaaggagcggctgaagggccggaccgtgaccatcaagctgaagaacgtgaacttcgaggtgaagacccgggcctccaccgtgtcctccgtggtgtccaccgccgaggagatcttcgccatcgccaaggagctgctgaagaccgagatcgacgccgacttcccccaccccctgcggctgcggctgatgggcgtgcggatctcctccttccccaacgaggaggaccggaagcaccagcagggcggcggctccggcaagcggaccgccgacggctccggcggcggctcccccaagaagaagcggaaggtgtccgagtccgccacccccgagtccgtgtccggctggcggctgttcaagaagatctcctagctagcaccagcctcaagaacacccgaatggagtctctaagctacataataccaacttacactttacaaaatgttgtcccccaaaatgtagccattcgtatctgctcctaataaaaagaaagtttcttcacattctctcgagaaaaaaaaaaaatggaaaaaaaaaaaacggaaaaaaaaaaaaggtaaaaaaaaaaaatataaaaaaaaaaaacataaaaaaaaaaaacgaaaaaaaaaaaacgtaaaaaaaaaaaactcaaaaaaaaaaaagataaaaaaaaaaaacctaaaaaaaaaaaatgtaaaaaaaaaaaagggaaaaaaaaaaaacgcaaaaaaaaaaaacacaaaaaaaaaaaatgcaaaaaaaaaaaatcgaaaaaaaaaaaatctaaaaaaaaaaaacgaaaaaaaaaaaacccaaaaaaaaaaaagacaaaaaaaaaaaatagaaaaaaaaaaagttaaaaaaaaaaaactgaaaaaaaaaaaatttaaaaaaaaaaaatctag

SEQ ID NO: 2561 - DNA, 6526 bp, synthetic construct
  misc_feature 1..6526: note = Synthetic
  source 1..6526: mol_type = other DNA
aggaagctcagaataaacgctcaactttggccggatctgccaccatgaagcggactgcggacgggtccgagttcgagtctccgaagaagaagcgcaaggtcgataagaagtactccatcggcctggacatcggaactaacagtgttggctgggccgtgatcactgatgagtacaaggtcccgtccaagaaattcaaggtgctgggtaacaccgatcgacatagtatcaagaagaacctgatcggggccctcttgttcgacagcggcgagactgctgaggcgacgcgcttgaagaggacggcccggcgtcgatacacccgacgcaagaatcggatttgctatctccaggagatcttctccaacgagatggcaaaggtggacgactcgttcttccaccgcctcgaggagagctttctcgtcgaggaggacaagaagcacgagcgccaccccatattcgggaatatcgtggatgaggtcgcctatcacgagaagtaccccacgatttatcatttgcgcaagaagctggtagattcaaccgacaaggcggacttgcggttgatctacctagctcttgcgcatatgataaagtttcgggggcacttcttgattgaaggcgacctcaatcccgataactcggatgtggacaagctcttcatacagctggtgcagacctacaaccagctgtttgaagagaatccgattaatgcgtcgggtgtcgacgccaaggccatcctcagcgcgcgcctcagcaagtctcgccgccttgagaatctgattgcccagctcccgggcgagaagaagaacgggttgttcggtaaccttattgcgctgtcgcttggcctcactccgaacttcaagtcgaacttcgacttggcggaggacgccaagctgcagctcagtaaggatacctacgacgacgacctggacaatcttctcgcccagatcggcgaccagtacgccgatctcttcctggcggcgaagaatctgagcgatgcaattctcctgagtgacattctgagggtgaatactgaaattacgaaggctccgctgtctgccagcatgatcaagcggtacgatgagcatcaccaggacctgacgctcctcaaggctctcgtccgtcagcagctcccggagaagtacaaggagatcttcttcgaccagtcgaagaacggatacgccgggtacatcgacgggggcgcttcccaggaggagttttataagtttataaagcccatcctggagaagatggacgggaccgaggagctcctggtgaagctcaaccgcgaggatctgctgcgcaagcagcggaccttcgataatggcagtattccccatcagattcacttaggagagttgcacgcgattcttcgccgccaggaagacttctaccccttcctcaaagataacagggagaagatcgagaagatcctcaccttccgcatcccgtattacgtgggtcccctggcgcgggggaactcacgttttgcgtggatgacgcggaagagtgaggagacgatcactccctggaactttgaggaagtggtagacaagggtgcttcggcacagtccttcatcgagcggatgacaaattttgacaagaatttgccgaacgagaaggtcttgccgaagcactcgctgctttacgagtactttacggtttacaacgagttgacgaaggtcaagtacgtcactgagggaatgcggaagcccgcattcctcagtggcgaacagaagaaggccatcgtcgacttgttgttcaagacgaaccgtaaagtaaccgtgaagcagctgaaggaggactacttcaagaagatcgagtgcttcgactccgttgagatcagcggagtcgaagaccgatttaatgcctccctcggtacgtatcatgatctcctcaagattatcaaggataaggacttccttgataatgaggagaatgaggatattctcgaggacattgtgctgaccctcaccctgttcgaagaccgtgagatgattgaggaacggttgaagacctacgctcatctgtttgatgacaaggtcatgaagcagttgaagcgtaggcgttataccggctggggtcgtctttcccgaaagcttatcaacgggatccgtgataagcagtcgggaaagacgatcctagacttcctcaagtctgacggttttgcgaacaggaacttcatgcagctcatccacgacgactccttgaccttcaaggaggatatccagaaggcgcaggtgagcggccagggcgatagcttgcacgagcatatcgcgaacctggccggctcacctgcgatcaagaagggtatcctccagacggtcaaggtcgtggatgagctcgtgaaggtgatgggtcggcacaagcccgagaatatcgtcatcgagatggctcgcgagaatcagacgacccagaagggtcagaagaattctcgcgagcgcatgaagcgtatcgaggagggcattaaggagctgggcagtcagattctcaaggagcaccctgtcgagaacacgcagcttcagaacgagaagctgtatctttactacctccagaacggacgggacatgtacgtagatcaggagctggacatcaaccggctctctgactacgatgtggactctatagtgcctcagagctttctgaaggacgatagcatcgacaacaaggtcctgactcgctccgataagaatcggggcaagtcggacaatgtcccgtccgaggaggtagtgaagaagatgaagaactattggcgtcagctgttgaacgcgaagctgatcactcagagaaagttcgataatctcaccaaggccgagagggggggtctgagcgagcttgataaggcgggtttcatcaagcggcagcttgttgagacccgccagatcacgaagcacgtcgctcagatcctcgactctcggatgaacaccaagtacgacgagaatgacaagcttattcgggaggtcaaggtcattacccttaagtcgaagctcgtcagcgactttcgcaaggattttcagttttataaagttcgtgagataaacaattatcaccatgcccacgacgcgtacctgaacgccgtcgtgggcacggcgctgataaagaagtacccgaagctggagtccgagttcgtttatggcgattataaggtgtacgacgtgcgcaagatgatcgccaagagcgagcaggagatcggaaaggctacggcgaagtacttcttttacagcaacatcatgaacttttttaagactgagatcacccttgcgaatggcgagatccgcaagcgcccgttgatcgagacgaacggggagactggggagattgtgtgggataagggtcgggatttcgctacggtgagaaaggttctttcgatgccccaggtcaacatcgtcaagaagacggaggttcagaccgggggcttctcgaaagaatctatcttaccgaagcgaaattccgacaagcttatcgcacgcaagaaggactgggaccccaagaagtacggggggttcgacagtcctacggtggcctactccgtgttggtggtcgccaaggttgagaagggcaagagcaagaagctcaagtccgtcaaggagctcttggggatcaccatcatggagaggtcatcgtttgagaagaatcctattgacttccttgaagccaagggctacaaggaagtcaagaaggatttgatcatcaagctccccaagtactccctgttcgagctcgagaacgggcgcaagcggatgctcgccagcgctggcgagcttcagaagggtaatgagcttgccctcccgagtaagtatgtcaatttcttgtacttggcgtcgcactacgagaagctgaagggctcgccggaggacaacgagcagaagcagcttttcgtagagcagcacaagcactaccttgatgagattatcgagcagatctctgagttcagcaagcgcgttatactagctgacgccaatctcgacaaggtgctctcggcttataacaagcaccgggataagccgatacgtgagcaggcggagaacatcatccacctgttcacgttgacgaacttgggggccccggcagcgttcaagtattttgatactacgatcgatcggaagcgttacaccagcaccaaggaggtcttggacgcgaccttgattcatcagtcgatcacgggtctttacgagactcgaattgacctttctcagcttggtggtgacagtggcggctcttcaggcggctccaagaggactgcggatggttctgaattcgaatcacctaagaagaagcggaaggtctccggggggtcgtccgggggctctatggacagcacgaaggagaagtgcgactcttataaggatgacctgcttctccggatggggctcaatgacaataaagccgggatggagggcctcgataaggagaagatcaacaagatcatcatggaggccactaaggggtcccggttttatggcaatgagctcaagaaggagaagcaggtcaaccagcgcatcgagaacatgatgcagcagaaggctcagataactagtcagcagctgcgcaaggcgcagctgcaggtggacagattcgccatggagctcgagcagtcgcgcaacttgagcaacacgattgtccacatcgacatggacgcgttctacgcggccgtggagatgcgggacaatcctgagctcaaggacaagccgattgctgtgggctccatgtcgatgctgtccacctctaactaccatgcccggaggttcggtgtccgcgctgctatgcccggctttatagcgaagcgcctctgtcctcagctaattatcgttcctccaaacttcgataagtacagggccgtgtccaaggaggtcaaggagattctggcggactacgacccgaatttcatggccatgtccttggacgaggcgtacctgaacattacgaagcatttggaggagcgacagaattggcctgaggacaagaggcgctactttataaagatgggcagcagcgtggagaacgataatccgggcaaggaagttaacaagttgtctgagcatgagaggagcatttctcctttgctgttcgaggagagcccctcggacgtgcagccccccggagacccgtttcaggtgaacttcgaagagcagaacaatccgcagatcctccagaacagcgtggtgttcggcacgagtgcccaggaggtggtcaaggagattcgttttcgcatcgagcagaagacgaccttgaccgcctccgcgggcatcgcgccgaacaccatgctggccaaggtttgttctgacaagaacaagcctaatggccagtaccagatcctcccaaaccgtcaagccgtgatggacttcatcaaggacctgccgattcggaaggtatctggtatcggtaaggttaccgagaagatgctgaaggccctgggcatcataacttgcacagagctctaccagcagcgagcgctcctcagcctgttgttctccgagacctcttggcactactttcttcacatctctctgggcctgggctcgacccacttgacccgagaccgagtgaggaagagtatgagtgtcgagaggaccttctcggagatcaacaaggctgaggagcagtactcgctgtgccaggagctctgtagcgagttagcccaggaccttcagaaggagcgcctgaagggccgcactgtcaccatcaagctgaagaatgtcaacttcgaggtgaagacccgggccagcactgttagttccgtggtgtccacggccgaggagatcttcgctatcgccaaggagcttcttaagacggagatcgacgcggactttccgcatccgcttcgcctccgccttatgggcgtccggatctcctcgtttcctaacgaggaggaccggaagcaccagcaaggcggaggctcaggcaagcggaccgctgacggctccggggggggctctccgaaaaagaagcggaaggtttcggagagcgccaccccggagtccgtcagcggttggcgcctgttcaagaagatttcttgactagcaccagcctcaagaacacccgaatggagtctctaagctacataataccaacttacactttacaaaatgttgtcccccaaaatgtagccattcgtatctgctcctaataaaaagaaagtttcttcacattctctcgagaaaaaaaaaaaatggaaaaaaaaaaaacggaaaaaaaaaaaaggtaaaaaaaaaaaatataaaaaaaaaaaacataaaaaaaaaaaacgaaaaaaaaaaaacgtaaaaaaaaaaaactcaaaaaaaaaaaagataaaaaaaaaaaacctaaaaaaaaaaaatgtaaaaaaaaaaaagggaaaaaaaaaaaacgcaaaaaaaaaaaacacaaaaaaaaaaaatgcaaaaaaaaaaaatcgaaaaaaaaaaaatctaaaaaaaaaaaacgaaaaaaaaaaaacccaaaaaaaaaaaagacaaaaaaaaaaaatagaaaaaaaaaaagttaaaaaaaaaaaactgaaaaaaaaaaaatttaaaaaaaaaaaatctag

SEQ ID NO: 2562 - DNA, 6616 bp, synthetic construct
  misc_feature 1..6616: note = Synthetic
  source 1..6616: mol_type = other DNA
aggactcactatttgttttcgcgcccagttgcaaaaagtgtcgaaaaaaaaaaaaccaaaaaaaaaaaacaaaaaaaaaaaataattgactaaaagctcagaataaacgctcaactttggccggatctgccaccatgaagcggactgcggacgggtccgagttcgagtctccgaagaagaagcgcaaggtcgataagaagtactccatcggcctggacatcggaactaacagtgttggctgggccgtgatcactgatgagtacaaggtcccgtccaagaaattcaaggtgctgggtaacaccgatcgacatagtatcaagaagaacctgatcggggccctcttgttcgacagcggcgagactgctgaggcgacgcgcttgaagaggacggcccggcgtcgatacacccgacgcaagaatcggatttgctatctccaggagatcttctccaacgagatggcaaaggtggacgactcgttcttccaccgcctcgaggagagctttctcgtcgaggaggacaagaagcacgagcgccaccccatattcgggaatatcgtggatgaggtcgcctatcacgagaagtaccccacgatttatcatttgcgcaagaagctggtagattcaaccgacaaggcggacttgcggttgatctacctagctcttgcgcatatgataaagtttcgggggcacttcttgattgaaggcgacctcaatcccgataactcggatgtggacaagctcttcatacagctggtgcagacctacaaccagctgtttgaagagaatccgattaatgcgtcgggtgtcgacgccaaggccatcctcagcgcgcgcctcagcaagtctcgccgccttgagaatctgattgcccagctcccgggcgagaagaagaacgggttgttcggtaaccttattgcgctgtcgcttggcctcactccgaacttcaagtcgaacttcgacttggcggaggacgccaagctgcagctcagtaaggatacctacgacgacgacctggacaatcttctcgcccagatcggcgaccagtacgccgatctcttcctggcggcgaagaatctgagcgatgcaattctcctgagtgacattctgagggtgaatactgaaattacgaaggctccgctgtctgccagcatgatcaagcggtacgatgagcatcaccaggacctgacgctcctcaaggctctcgtccgtcagcagctcccggagaagtacaaggagatcttcttcgaccagtcgaagaacggatacgccgggtacatcgacgggggcgcttcccaggaggagttttataagtttataaagcccatcctggagaagatggacgggaccgaggagctcctggtgaagctcaaccgcgaggatctgctgcgcaagcagcggaccttcgataatggcagtattccccatcagattcacttaggagagttgcacgcgattcttcgccgccaggaagacttctaccccttcctcaaagataacagggagaagatcgagaagatcctcaccttccgcatcccgtattacgtgggtcccctggcgcgggggaactcacgttttgcgtggatgacgcggaagagtgaggagacgatcactccctggaactttgaggaagtggtagacaagggtgcttcggcacagtccttcatcgagcggatgacaaattttgacaagaatttgccgaacgagaaggtcttgccgaagcactcgctgctttacgagtactttacggtttacaacgagttgacgaaggtcaagtacgtcactgagggaatgcggaagcccgcattcctcagtggcgaacagaagaaggccatcgtcgacttgttgttcaagacgaaccgtaaagtaaccgtgaagcagctgaaggaggactacttcaagaagatcgagtgcttcgactccgttgagatcagcggagtcgaagaccgatttaatgcctccctcggtacgtatcatgatctcctcaagattatcaaggataaggacttccttgataatgaggagaatgaggatattctcgaggacattgtgctgaccctcaccctgttcgaagaccgtgagatgattgaggaacggttgaagacctacgctcatctgtttgatgacaaggtcatgaagcagttgaagcgtaggcgttataccggctggggtcgtctttcccgaaagcttatcaacgggatccgtgataagcagtcgggaaagacgatcctagacttcctcaagtctgacggttttgcgaacaggaacttcatgcagctcatccacgacgactccttgaccttcaaggaggatatccagaaggcgcaggtgagcggccagggcgatagcttgcacgagcatatcgcgaacctggccggctcacctgcgatcaagaagggtatcctccagacggtcaaggtcgtggatgagctcgtgaaggtgatgggtcggcacaagcccgagaatatcgtcatcgagatggctcgcgagaatcagacgacccagaagggtcagaagaattctcgcgagcgcatgaagcgtatcgaggagggcattaaggagctgggcagtcagattctcaaggagcaccctgtcgagaacacgcagcttcagaacgagaagctgtatctttactacctccagaacggacgggacatgtacgtagatcaggagctggacatcaaccggctctctgactacgatgtggactctatagtgcctcagagctttctgaaggacgatagcatcgacaacaaggtcctgactcgctccgataagaatcggggcaagtcggacaatgtcccgtccgaggaggtagtgaagaagatgaagaactattggcgtcagctgttgaacgcgaagctgatcactcagagaaagttcgataatctcaccaaggccgagagggggggtctgagcgagcttgataaggcgggtttcatcaagcggcagcttgttgagacccgccagatcacgaagcacgtcgctcagatcctcgactctcggatgaacaccaagtacgacgagaatgacaagcttattcgggaggtcaaggtcattacccttaagtcgaagctcgtcagcgactttcgcaaggattttcagttttataaagttcgtgagataaacaattatcaccatgcccacgacgcgtacctgaacgccgtcgtgggcacggcgctgataaagaagtacccgaagctggagtccgagttcgtttatggcgattataaggtgtacgacgtgcgcaagatgatcgccaagagcgagcaggagatcggaaaggctacggcgaagtacttcttttacagcaacatcatgaacttttttaagactgagatcacccttgcgaatggcgagatccgcaagcgcccgttgatcgagacgaacggggagactggggagattgtgtgggataagggtcgggatttcgctacggtgagaaaggttctttcgatgccccaggtcaacatcgtcaagaagacggaggttcagaccgggggcttctcgaaagaatctatcttaccgaagcgaaattccgacaagcttatcgcacgcaagaaggactgggaccccaagaagtacggggggttcgacagtcctacggtggcctactccgtgttggtggtcgccaaggttgagaagggcaagagcaagaagctcaagtccgtcaaggagctcttggggatcaccatcatggagaggtcatcgtttgagaagaatcctattgacttccttgaagccaagggctacaaggaagtcaagaaggatttgatcatcaagctccccaagtactccctgttcgagctcgagaacgggcgcaagcggatgctcgccagcgctggcgagcttcagaagggtaatgagcttgccctcccgagtaagtatgtcaatttcttgtacttggcgtcgcactacgagaagctgaagggctcgccggaggacaacgagcagaagcagcttttcgtagagcagcacaagcactaccttgatgagattatcgagcagatctctgagttcagcaagcgcgttatactagctgacgccaatctcgacaaggtgctctcggcttataacaagcaccgggataagccgatacgtgagcaggcggagaacatcatccacctgttcacgttgacgaacttgggggccccggcagcgttcaagtattttgatactacgatcgatcggaagcgttacaccagcaccaaggaggtcttggacgcgaccttgattcatcagtcgatcacgggtctttacgagactcgaattgacctttctcagcttggtggtgacagtggcggctcttcaggcggctccaagaggactgcggatggttctgaattcgaatcacctaagaagaagcggaaggtctccggggggtcgtccgggggctctatggacagcacgaaggagaagtgcgactcttataaggatgacctgcttctccggatggggctcaatgacaataaagccgggatggagggcctcgataaggagaagatcaacaagatcatcatggaggccactaaggggtcccggttttatggcaatgagctcaagaaggagaagcaggtcaaccagcgcatcgagaacatgatgcagcagaaggctcagataactagtcagcagctgcgcaaggcgcagctgcaggtggacagattcgccatggagctcgagcagtcgcgcaacttgagcaacacgattgtccacatcgacatggacgcgttctacgcggccgtggagatgcgggacaatcctgagctcaaggacaagccgattgctgtgggctccatgtcgatgctgtccacctctaactaccatgcccggaggttcggtgtccgcgctgctatgcccggctttatagcgaagcgcctctgtcctcagctaattatcgttcctccaaacttcgataagtacagggccgtgtccaaggaggtcaaggagattctggcggactacgacccgaatttcatggccatgtccttggacgaggcgtacctgaacattacgaagcatttggaggagcgacagaattggcctgaggacaagaggcgctactttataaagatgggcagcagcgtggagaacgataatccgggcaaggaagttaacaagttgtctgagcatgagaggagcatttctcctttgctgttcgaggagagcccctcggacgtgcagccccccggagacccgtttcaggtgaacttcgaagagcagaacaatccgcagatcctccagaacagcgtggtgttcggcacgagtgcccaggaggtggtcaaggagattcgttttcgcatcgagcagaagacgaccttgaccgcctccgcgggcatcgcgccgaacaccatgctggccaaggtttgttctgacaagaacaagcctaatggccagtaccagatcctcccaaaccgtcaagccgtgatggacttcatcaaggacctgccgattcggaaggtatctggtatcggtaaggttaccgagaagatgctgaaggccctgggcatcataacttgcacagagctctaccagcagcgagcgctcctcagcctgttgttctccgagacctcttggcactactttcttcacatctctctgggcctgggctcgacccacttgacccgagaccgagtgaggaagagtatgagtgtcgagaggaccttctcggagatcaacaaggctgaggagcagtactcgctgtgccaggagctctgtagcgagttagcccaggaccttcagaaggagcgcctgaagggccgcactgtcaccatcaagctgaagaatgtcaacttcgaggtgaagacccgggccagcactgttagttccgtggtgtccacggccgaggagatcttcgctatcgccaaggagcttcttaagacggagatcgacgcggactttccgcatccgcttcgcctccgccttatgggcgtccggatctcctcgtttcctaacgaggaggaccggaagcaccagcaaggcggaggctcaggcaagcggaccgctgacggctccggggggggctctccgaaaaagaagcggaaggtttcggagagcgccaccccggagtccgtcagcggttggcgcctgttcaagaagatttcttgactagcaccagcctcaagaacacccgaatggagtctctaagctacataataccaacttacactttacaaaatgttgtcccccaaaatgtagccattcgtatctgctcctaataaaaagaaagtttcttcacattctctcgagaaaaaaaaaaaatggaaaaaaaaaaaacggaaaaaaaaaaaaggtaaaaaaaaaaaatataaaaaaaaaaaacataaaaaaaaaaaacgaaaaaaaaaaaacgtaaaaaaaaaaaactcaaaaaaaaaaaagataaaaaaaaaaaacctaaaaaaaaaaaatgtaaaaaaaaaaaagggaaaaaaaaaaaacgcaaaaaaaaaaaacacaaaaaaaaaaaatgcaaaaaaaaaaaatcgaaaaaaaaaaaatctaaaaaaaaaaaacgaaaaaaaaaaaacccaaaaaaaaaaaagacaaaaaaaaaaaatagaaaaaaaaaaagttaaaaaaaaaaaactgaaaaaaaaaaaatttaaaaaaaaaaaatctag

SEQ ID NO: 2563 - DNA, 6559 bp, synthetic construct
  misc_feature 1..6559: note = Synthetic
  source 1..6559: mol_type = other DNA
aggactcactatttgttttcgcgcccagttgcaaaaagtgtcgaaaaaaaaaaaaccaaaaaaaaaaaacaaaaaaaaaaaataattgactaaaagctcagaataaacgctcaactttggccggatctgccaccatgaagcggaccgccgacggctccgagttcgagtcccccaagaagaagcggaaggtggacaagaagtactccatcggcctggacatcggcaccaactccgtgggctgggccgtgatcaccgacgagtacaaggtgccctccaagaagttcaaggtgctgggcaacaccgaccggcactccatcaagaagaacctgatcggcgccctgctgttcgactccggcgagaccgccgaggccacccggctgaagcggaccgcccggcggcggtacacccggcggaagaaccggatctgctacctgcaggagatcttctccaacgagatggccaaggtggacgactccttcttccaccggctggaggagtccttcctggtggaggaggacaagaagcacgagcggcaccccatcttcggcaacatcgtggacgaggtggcctaccacgagaagtaccccaccatctaccacctgcggaagaagctggtggactccaccgacaaggccgacctgcggctgatctacctggccctggcccacatgatcaagttccggggccacttcctgatcgagggcgacctgaaccccgacaactccgacgtggacaagctgttcatccagctggtgcagacctacaaccagctgttcgaggagaaccccatcaacgcctccggcgtggacgccaaggccatcctgtccgcccggctgtccaagtcccggcggctggagaacctgatcgcccagctgcccggcgagaagaagaacggcctgttcggcaacctgatcgccctgtccctgggcctgacccccaacttcaagtccaacttcgacctggccgaggacgccaagctgcagctgtccaaggacacctacgacgacgacctggacaacctgctggcccagatcggcgaccagtacgccgacctgttcctggccgccaagaacctgtccgacgccatcctgctgtccgacatcctgcgggtgaacaccgagatcaccaaggcccccctgtccgcctccatgatcaagcggtacgacgagcaccaccaggacctgaccctgctgaaggccctggtgcggcagcagctgcccgagaagtacaaggagatcttcttcgaccagtccaagaacggctacgccggctacatcgacggcggcgcctcccaggaggagttctacaagttcatcaagcccatcctggagaagatggacggcaccgaggagctgctggtgaagctgaaccgggaggacctgctgcggaagcagcggaccttcgacaacggctccatcccccaccagatccacctgggcgagctgcacgccatcctgcggcggcaggaggacttctaccccttcctgaaggacaaccgggagaagatcgagaagatcctgaccttccggatcccctactacgtgggccccctggcccggggcaactcccggttcgcctggatgacccggaagtccgaggagaccatcaccccctggaacttcgaggaggtggtggacaagggcgcctccgcccagtccttcatcgagcggatgaccaacttcgacaagaacctgcccaacgagaaggtgctgcccaagcactccctgctgtacgagtacttcaccgtgtacaacgagctgaccaaggtgaagtacgtgaccgagggcatgcggaagcccgccttcctgtccggcgagcagaagaaggccatcgtggacctgctgttcaagaccaaccggaaggtgaccgtgaagcagctgaaggaggactacttcaagaagatcgagtgcttcgactccgtggagatctccggcgtggaggaccggttcaacgcctccctgggcacctaccacgacctgctgaagatcatcaaggacaaggacttcctggacaacgaggagaacgaggacatcctggaggacatcgtgctgaccctgaccctgttcgaggaccgggagatgatcgaggagcggctgaagacctacgcccacctgttcgacgacaaggtgatgaagcagctgaagcggcggcggtacaccggctggggccggctgtcccggaagctgatcaacggcatccgggacaagcagtccggcaagaccatcctggacttcctgaagtccgacggcttcgccaaccggaacttcatgcagctgatccacgacgactccctgaccttcaaggaggacatccagaaggcccaggtgtccggccagggcgactccctgcacgagcacatcgccaacctggccggctcccccgccatcaagaagggcatcctgcagaccgtgaaggtggtggacgagctggtgaaggtgatgggccggcacaagcccgagaacatcgtgatcgagatggcccgggagaaccagaccacccagaagggccagaagaactcccgggagcggatgaagcggatcgaggagggcatcaaggagctgggctcccagatcctgaaggagcaccccgtggagaacacccagctgcagaacgagaagctgtacctgtactacctgcagaacggccgggacatgtacgtggaccaggagctggacatcaaccggctgtccgactacgacgtggactccatcgtgccccagtccttcctgaaggacgactccatcgacaacaaggtgctgacccggtccgacaagaaccggggcaagtccgacaacgtgccctccgaggaggtggtgaagaagatgaagaactactggcggcagctgctgaacgccaagctgatcacccagcggaagttcgacaacctgaccaaggccgagcggggcggcctgtccgagctggacaaggccggcttcatcaagcggcagctggtggagacccggcagatcaccaagcacgtggcccagatcctggactcccggatgaacaccaagtacgacgagaacgacaagctgatccgggaggtgaaggtgatcaccctgaagtccaagctggtgtccgacttccggaaggacttccagttctacaaggtgcgggagatcaacaactaccaccacgcccacgacgcctacctgaacgccgtggtgggcaccgccctgatcaagaagtaccccaagctggagtccgagttcgtgtacggcgactacaaggtgtacgacgtgcggaagatgatcgccaagtccgagcaggagatcggcaaggccaccgccaagtacttcttctactccaacatcatgaacttcttcaagaccgagatcaccctggccaacggcgagatccggaagcggcccctgatcgagaccaacggcgagaccggcgagatcgtgtgggacaagggccgggacttcgccaccgtgcggaaggtgctgtccatgccccaggtgaacatcgtgaagaagaccgaggtgcagaccggcggcttctccaaggagtccatcctgcccaagcggaactccgacaagctgatcgcccggaagaaggactgggaccccaagaagtacggcggcttcgactcccccaccgtggcctactccgtgctggtggtggccaaggtggagaagggcaagtccaagaagctgaagtccgtgaaggagctgctgggcatcaccatcatggagcggtcctccttcgagaagaaccccatcgacttcctggaggccaagggctacaaggaggtgaagaaggacctgatcatcaagctgcccaagtactccctgttcgagctggagaacggccggaagcggatgctggcctccgccggcgagctgcagaagggcaacgagctggccctgccctccaagtacgtgaacttcctgtacctggcctcccactacgagaagctgaagggctcccccgaggacaacgagcagaagcagctgttcgtggagcagcacaagcactacctggacgagatcatcgagcagatctccgagttctccaagcgggtgatcctggccgacgccaacctggacaaggtgctgtccgcctacaacaagcaccgggacaagcccatccgggagcaggccgagaacatcatccacctgttcaccctgaccaacctgggcgcccccgccgccttcaagtacttcgacaccaccatcgaccggaagcggtacacctccaccaaggaggtgctggacgccaccctgatccaccagtccatcaccggcctgtacgagacccggatcgacctgtcccagctgggcggcgactccggcggctcctccggcggctccaagcggaccgccgacggctccgagttcgagtcccccaagaagaagcggaaggtgtccggcggctcctccggcggctccatggactccaccaaggagaagtgcgactcctacaaggacgacctgctgctgcggatgggcctgaacgacaacaaggccggcatggagggcctggacaaggagaagatcaacaagatcatcatggaggccaccaagggctcccggttctacggcaacgagctgaagaaggagaagcaggtgaaccagcggatcgagaacatgatgcagcagaaggcccagatcacctcccagcagctgcggaaggcccagctgcaggtggaccggttcgccatggagctggagcagtcccggaacctgtccaacaccatcgtgcacatcgacatggacgccttctacgccgccgtggagatgcgggacaaccccgagctgaaggacaagcccatcgccgtgggctccatgtccatgctgtccacctccaactaccacgcccggcggttcggcgtgcgggccgccatgcccggcttcatcgccaagcggctgtgcccccagctgatcatcgtgccccccaacttcgacaagtaccgggccgtgtccaaggaggtgaaggagatcctggccgactacgaccccaacttcatggccatgtccctggacgaggcctacctgaacatcaccaagcacctggaggagcggcagaactggcccgaggacaagcggcggtacttcatcaagatgggctcctccgtggagaacgacaaccccggcaaggaggtgaacaagctgtccgagcacgagcggtccatctcccccctgctgttcgaggagtccccctccgacgtgcagccccccggcgaccccttccaggtgaacttcgaggagcagaacaacccccagatcctgcagaactccgtggtgttcggcacctccgcccaggaggtggtgaaggagatccggttccggatcgagcagaagaccaccctgaccgcctccgccggcatcgcccccaacaccatgctggccaaggtgtgctccgacaagaacaagcccaacggccagtaccagatcctgcccaaccggcaggccgtgatggacttcatcaaggacctgcccatccggaaggtgtccggcatcggcaaggtgaccgagaagatgctgaaggccctgggcatcatcacctgcaccgagctgtaccagcagcgggccctgctgtccctgctgttctccgagacctcctggcactacttcctgcacatctccctgggcctgggctccacccacctgacccgggaccgggtgcggaagtccatgtccgtggagcggaccttctccgagatcaacaaggccgaggagcagtactccctgtgccaggagctgtgctccgagctggcccaggacctgcagaaggagcggctgaagggccggaccgtgaccatcaagctgaagaacgtgaacttcgaggtgaagacccgggcctccaccgtgtcctccgtggtgtccaccgccgaggagatcttcgccatcgccaaggagctgctgaagaccgagatcgacgccgacttcccccaccccctgcggctgcggctgatgggcgtgcggatctcctccttccccaacgaggaggaccggaagcaccagcagtccggctccgagacccccggcacctccgagtccgccacccccgagtcccccaagaagaagcggaaggtgtagctagcaccagcctcaagaacacccgaatggagtctctaagctacataataccaacttacactttacaaaatgttgtcccccaaaatgtagccattcgtatctgctcctaataaaaagaaagtttcttcacattctctcgagaaaaaaaaaaaatggaaaaaaaaaaaacggaaaaaaaaaaaaggtaaaaaaaaaaaatataaaaaaaaaaaacataaaaaaaaaaaacgaaaaaaaaaaaacgtaaaaaaaaaaaactcaaaaaaaaaaaagataaaaaaaaaaaacctaaaaaaaaaaaatgtaaaaaaaaaaaagggaaaaaaaaaaaacgcaaaaaaaaaaaacacaaaaaaaaaaaatgcaaaaaaaaaaaatcgaaaaaaaaaaaatctaaaaaaaaaaaacgaaaaaaaaaaaacccaaaaaaaaaaaagacaaaaaaaaaaaatagaaaaaaaaaaagttaaaaaaaaaaaactgaaaaaaaaaaaatttaaaaaaaaaaaatctag

SEQ ID NO: 2564 - DNA, 6604 bp, synthetic construct
  misc_feature 1..6604: note = Synthetic
  source 1..6604: mol_type = other DNA
aggactcactatttgttttcgcgcccagttgcaaaaagtgtcgaaaaaaaaaaaaccaaaaaaaaaaaacaaaaaaaaaaaataattgactaaaagctcagaataaacgctcaactttggccggatctgccaccatgaagcggaccgccgacggctccgagttcgagtcccccaagaagaagcggaaggtggacaagaagtactccatcggcctggacatcggcaccaactccgtgggctgggccgtgatcaccgacgagtacaaggtgccctccaagaagttcaaggtgctgggcaacaccgaccggcactccatcaagaagaacctgatcggcgccctgctgttcgactccggcgagaccgccgaggccacccggctgaagcggaccgcccggcggcggtacacccggcggaagaaccggatctgctacctgcaggagatcttctccaacgagatggccaaggtggacgactccttcttccaccggctggaggagtccttcctggtggaggaggacaagaagcacgagcggcaccccatcttcggcaacatcgtggacgaggtggcctaccacgagaagtaccccaccatctaccacctgcggaagaagctggtggactccaccgacaaggccgacctgcggctgatctacctggccctggcccacatgatcaagttccggggccacttcctgatcgagggcgacctgaaccccgacaactccgacgtggacaagctgttcatccagctggtgcagacctacaaccagctgttcgaggagaaccccatcaacgcctccggcgtggacgccaaggccatcctgtccgcccggctgtccaagtcccggcggctggagaacctgatcgcccagctgcccggcgagaagaagaacggcctgttcggcaacctgatcgccctgtccctgggcctgacccccaacttcaagtccaacttcgacctggccgaggacgccaagctgcagctgtccaaggacacctacgacgacgacctggacaacctgctggcccagatcggcgaccagtacgccgacctgttcctggccgccaagaacctgtccgacgccatcctgctgtccgacatcctgcgggtgaacaccgagatcaccaaggcccccctgtccgcctccatgatcaagcggtacgacgagcaccaccaggacctgaccctgctgaaggccctggtgcggcagcagctgcccgagaagtacaaggagatcttcttcgaccagtccaagaacggctacgccggctacatcgacggcggcgcctcccaggaggagttctacaagttcatcaagcccatcctggagaagatggacggcaccgaggagctgctggtgaagctgaaccgggaggacctgctgcggaagcagcggaccttcgacaacggctccatcccccaccagatccacctgggcgagctgcacgccatcctgcggcggcaggaggacttctaccccttcctgaaggacaaccgggagaagatcgagaagatcctgaccttccggatcccctactacgtgggccccctggcccggggcaactcccggttcgcctggatgacccggaagtccgaggagaccatcaccccctggaacttcgaggaggtggtggacaagggcgcctccgcccagtccttcatcgagcggatgaccaacttcgacaagaacctgcccaacgagaaggtgctgcccaagcactccctgctgtacgagtacttcaccgtgtacaacgagctgaccaaggtgaagtacgtgaccgagggcatgcggaagcccgccttcctgtccggcgagcagaagaaggccatcgtggacctgctgttcaagaccaaccggaaggtgaccgtgaagcagctgaaggaggactacttcaagaagatcgagtgcttcgactccgtggagatctccggcgtggaggaccggttcaacgcctccctgggcacctaccacgacctgctgaagatcatcaaggacaaggacttcctggacaacgaggagaacgaggacatcctggaggacatcgtgctgaccctgaccctgttcgaggaccgggagatgatcgaggagcggctgaagacctacgcccacctgttcgacgacaaggtgatgaagcagctgaagcggcggcggtacaccggctggggccggctgtcccggaagctgatcaacggcatccgggacaagcagtccggcaagaccatcctggacttcctgaagtccgacggcttcgccaaccggaacttcatgcagctgatccacgacgactccctgaccttcaaggaggacatccagaaggcccaggtgtccggccagggcgactccctgcacgagcacatcgccaacctggccggctcccccgccatcaagaagggcatcctgcagaccgtgaaggtggtggacgagctggtgaaggtgatgggccggcacaagcccgagaacatcgtgatcgagatggcccgggagaaccagaccacccagaagggccagaagaactcccgggagcggatgaagcggatcgaggagggcatcaaggagctgggctcccagatcctgaaggagcaccccgtggagaacacccagctgcagaacgagaagctgtacctgtactacctgcagaacggccgggacatgtacgtggaccaggagctggacatcaaccggctgtccgactacgacgtggactccatcgtgccccagtccttcctgaaggacgactccatcgacaacaaggtgctgacccggtccgacaagaaccggggcaagtccgacaacgtgccctccgaggaggtggtgaagaagatgaagaactactggcggcagctgctgaacgccaagctgatcacccagcggaagttcgacaacctgaccaaggccgagcggggcggcctgtccgagctggacaaggccggcttcatcaagcggcagctggtggagacccggcagatcaccaagcacgtggcccagatcctggactcccggatgaacaccaagtacgacgagaacgacaagctgatccgggaggtgaaggtgatcaccctgaagtccaagctggtgtccgacttccggaaggacttccagttctacaaggtgcgggagatcaacaactaccaccacgcccacgacgcctacctgaacgccgtggtgggcaccgccctgatcaagaagtaccccaagctggagtccgagttcgtgtacggcgactacaaggtgtacgacgtgcggaagatgatcgccaagtccgagcaggagatcggcaaggccaccgccaagtacttcttctactccaacatcatgaacttcttcaagaccgagatcaccctggccaacggcgagatccggaagcggcccctgatcgagaccaacggcgagaccggcgagatcgtgtgggacaagggccgggacttcgccaccgtgcggaaggtgctgtccatgccccaggtgaacatcgtgaagaagaccgaggtgcagaccggcggcttctccaaggagtccatcctgcccaagcggaactccgacaagctgatcgcccggaagaaggactgggaccccaagaagtacggcggcttcgactcccccaccgtggcctactccgtgctggtggtggccaaggtggagaagggcaagtccaagaagctgaagtccgtgaaggagctgctgggcatcaccatcatggagcggtcctccttcgagaagaaccccatcgacttcctggaggccaagggctacaaggaggtgaagaaggacctgatcatcaagctgcccaagtactccctgttcgagctggagaacggccggaagcggatgctggcctccgccggcgagctgcagaagggcaacgagctggccctgccctccaagtacgtgaacttcctgtacctggcctcccactacgagaagctgaagggctcccccgaggacaacgagcagaagcagctgttcgtggagcagcacaagcactacctggacgagatcatcgagcagatctccgagttctccaagcgggtgatcctggccgacgccaacctggacaaggtgctgtccgcctacaacaagcaccgggacaagcccatccgggagcaggccgagaacatcatccacctgttcaccctgaccaacctgggcgcccccgccgccttcaagtacttcgacaccaccatcgaccggaagcggtacacctccaccaaggaggtgctggacgccaccctgatccaccagtccatcaccggcctgtacgagacccggatcgacctgtcccagctgggcggcgacggcgcccccgagtccgccaccgagtccggcggcacctccaccgagtccgagggctccgccggccccaagaagaagcggaaggtgacctccaccgagtccgagggctccgccggctccgccggctccacctccggctcctcctccggcatggactccaccaaggagaagtgcgactcctacaaggacgacctgctgctgcggatgggcctgaacgacaacaaggccggcatggagggcctggacaaggagaagatcaacaagatcatcatggaggccaccaagggctcccggttctacggcaacgagctgaagaaggagaagcaggtgaaccagcggatcgagaacatgatgcagcagaaggcccagatcacctcccagcagctgcggaaggcccagctgcaggtggaccggttcgccatggagctggagcagtcccggaacctgtccaacaccatcgtgcacatcgacatggacgccttctacgccgccgtggagatgcgggacaaccccgagctgaaggacaagcccatcgccgtgggctccatgtccatgctgtccacctccaactaccacgcccggcggttcggcgtgcgggccgccatgcccggcttcatcgccaagcggctgtgcccccagctgatcatcgtgccccccaacttcgacaagtaccgggccgtgtccaaggaggtgaaggagatcctggccgactacgaccccaacttcatggccatgtccctggacgaggcctacctgaacatcaccaagcacctggaggagcggcagaactggcccgaggacaagcggcggtacttcatcaagatgggctcctccgtggagaacgacaaccccggcaaggaggtgaacaagctgtccgagcacgagcggtccatctcccccctgctgttcgaggagtccccctccgacgtgcagccccccggcgaccccttccaggtgaacttcgaggagcagaacaacccccagatcctgcagaactccgtggtgttcggcacctccgcccaggaggtggtgaaggagatccggttccggatcgagcagaagaccaccctgaccgcctccgccggcatcgcccccaacaccatgctggccaaggtgtgctccgacaagaacaagcccaacggccagtaccagatcctgcccaaccggcaggccgtgatggacttcatcaaggacctgcccatccggaaggtgtccggcatcggcaaggtgaccgagaagatgctgaaggccctgggcatcatcacctgcaccgagctgtaccagcagcgggccctgctgtccctgctgttctccgagacctcctggcactacttcctgcacatctccctgggcctgggctccacccacctgacccgggaccgggtgcggaagtccatgtccgtggagcggaccttctccgagatcaacaaggccgaggagcagtactccctgtgccaggagctgtgctccgagctggcccaggacctgcagaaggagcggctgaagggccggaccgtgaccatcaagctgaagaacgtgaacttcgaggtgaagacccgggcctccaccgtgtcctccgtggtgtccaccgccgaggagatcttcgccatcgccaaggagctgctgaagaccgagatcgacgccgacttcccccaccccctgcggctgcggctgatgggcgtgcggatctcctccttccccaacgaggaggaccggaagcaccagcagtccggctccgagacccccggcacctccgagtccgccacccccgagtcccccaagaagaagcggaaggtgtagctagcaccagcctcaagaacacccgaatggagtctctaagctacataataccaacttacactttacaaaatgttgtcccccaaaatgtagccattcgtatctgctcctaataaaaagaaagtttcttcacattctctcgagaaaaaaaaaaaatggaaaaaaaaaaaacggaaaaaaaaaaaaggtaaaaaaaaaaaatataaaaaaaaaaaacataaaaaaaaaaaacgaaaaaaaaaaaacgtaaaaaaaaaaaactcaaaaaaaaaaaagataaaaaaaaaaaacctaaaaaaaaaaaatgtaaaaaaaaaaaagggaaaaaaaaaaaacgcaaaaaaaaaaaacacaaaaaaaaaaaatgcaaaaaaaaaaaatcgaaaaaaaaaaaatctaaaaaaaaaaaacgaaaaaaaaaaaacccaaaaaaaaaaaagacaaaaaaaaaaaatagaaaaaaaaaaagttaaaaaaaaaaaactgaaaaaaaaaaaatttaaaaaaaaaaaatctag

SEQ ID NO: 2565 - DNA, 6574 bp, synthetic construct
  misc_feature 1..6574: note = Synthetic
  source 1..6574: mol_type = other DNA
aggactcactatttgttttcgcgcccagttgcaaaaagtgtcgaaaaaaaaaaaaccaaaaaaaaaaaacaaaaaaaaaaaataattgactaaaagctcagaataaacgctcaactttggccggatctgccaccatgaagcggaccgccgacggctccgagttcgagtcccccaagaagaagcggaaggtggacaagaagtactccatcggcctggacatcggcaccaactccgtgggctgggccgtgatcaccgacgagtacaaggtgccctccaagaagttcaaggtgctgggcaacaccgaccggcactccatcaagaagaacctgatcggcgccctgctgttcgactccggcgagaccgccgaggccacccggctgaagcggaccgcccggcggcggtacacccggcggaagaaccggatctgctacctgcaggagatcttctccaacgagatggccaaggtggacgactccttcttccaccggctggaggagtccttcctggtggaggaggacaagaagcacgagcggcaccccatcttcggcaacatcgtggacgaggtggcctaccacgagaagtaccccaccatctaccacctgcggaagaagctggtggactccaccgacaaggccgacctgcggctgatctacctggccctggcccacatgatcaagttccggggccacttcctgatcgagggcgacctgaaccccgacaactccgacgtggacaagctgttcatccagctggtgcagacctacaaccagctgttcgaggagaaccccatcaacgcctccggcgtggacgccaaggccatcctgtccgcccggctgtccaagtcccggcggctggagaacctgatcgcccagctgcccggcgagaagaagaacggcctgttcggcaacctgatcgccctgtccctgggcctgacccccaacttcaagtccaacttcgacctggccgaggacgccaagctgcagctgtccaaggacacctacgacgacgacctggacaacctgctggcccagatcggcgaccagtacgccgacctgttcctggccgccaagaacctgtccgacgccatcctgctgtccgacatcctgcgggtgaacaccgagatcaccaaggcccccctgtccgcctccatgatcaagcggtacgacgagcaccaccaggacctgaccctgctgaaggccctggtgcggcagcagctgcccgagaagtacaaggagatcttcttcgaccagtccaagaacggctacgccggctacatcgacggcggcgcctcccaggaggagttctacaagttcatcaagcccatcctggagaagatggacggcaccgaggagctgctggtgaagctgaaccgggaggacctgctgcggaagcagcggaccttcgacaacggctccatcccccaccagatccacctgggcgagctgcacgccatcctgcggcggcaggaggacttctaccccttcctgaaggacaaccgggagaagatcgagaagatcctgaccttccggatcccctactacgtgggccccctggcccggggcaactcccggttcgcctggatgacccggaagtccgaggagaccatcaccccctggaacttcgaggaggtggtggacaagggcgcctccgcccagtccttcatcgagcggatgaccaacttcgacaagaacctgcccaacgagaaggtgctgcccaagcactccctgctgtacgagtacttcaccgtgtacaacgagctgaccaaggtgaagtacgtgaccgagggcatgcggaagcccgccttcctgtccggcgagcagaagaaggccatcgtggacctgctgttcaagaccaaccggaaggtgaccgtgaagcagctgaaggaggactacttcaagaagatcgagtgcttcgactccgtggagatctccggcgtggaggaccggttcaacgcctccctgggcacctaccacgacctgctgaagatcatcaaggacaaggacttcctggacaacgaggagaacgaggacatcctggaggacatcgtgctgaccctgaccctgttcgaggaccgggagatgatcgaggagcggctgaagacctacgcccacctgttcgacgacaaggtgatgaagcagctgaagcggcggcggtacaccggctggggccggctgtcccggaagctgatcaacggcatccgggacaagcagtccggcaagaccatcctggacttcctgaagtccgacggcttcgccaaccggaacttcatgcagctgatccacgacgactccctgaccttcaaggaggacatccagaaggcccaggtgtccggccagggcgactccctgcacgagcacatcgccaacctggccggctcccccgccatcaagaagggcatcctgcagaccgtgaaggtggtggacgagctggtgaaggtgatgggccggcacaagcccgagaacatcgtgatcgagatggcccgggagaaccagaccacccagaagggccagaagaactcccgggagcggatgaagcggatcgaggagggcatcaaggagctgggctcccagatcctgaaggagcaccccgtggagaacacccagctgcagaacgagaagctgtacctgtactacctgcagaacggccgggacatgtacgtggaccaggagctggacatcaaccggctgtccgactacgacgtggactccatcgtgccccagtccttcctgaaggacgactccatcgacaacaaggtgctgacccggtccgacaagaaccggggcaagtccgacaacgtgccctccgaggaggtggtgaagaagatgaagaactactggcggcagctgctgaacgccaagctgatcacccagcggaagttcgacaacctgaccaaggccgagcggggcggcctgtccgagctggacaaggccggcttcatcaagcggcagctggtggagacccggcagatcaccaagcacgtggcccagatcctggactcccggatgaacaccaagtacgacgagaacgacaagctgatccgggaggtgaaggtgatcaccctgaagtccaagctggtgtccgacttccggaaggacttccagttctacaaggtgcgggagatcaacaactaccaccacgcccacgacgcctacctgaacgccgtggtgggcaccgccctgatcaagaagtaccccaagctggagtccgagttcgtgtacggcgactacaaggtgtacgacgtgcggaagatgatcgccaagtccgagcaggagatcggcaaggccaccgccaagtacttcttctactccaacatcatgaacttcttcaagaccgagatcaccctggccaacggcgagatccggaagcggcccctgatcgagaccaacggcgagaccggcgagatcgtgtgggacaagggccgggacttcgccaccgtgcggaaggtgctgtccatgccccaggtgaacatcgtgaagaagaccgaggtgcagaccggcggcttctccaaggagtccatcctgcccaagcggaactccgacaagctgatcgcccggaagaaggactgggaccccaagaagtacggcggcttcgactcccccaccgtggcctactccgtgctggtggtggccaaggtggagaagggcaagtccaagaagctgaagtccgtgaaggagctgctgggcatcaccatcatggagcggtcctccttcgagaagaaccccatcgacttcctggaggccaagggctacaaggaggtgaagaaggacctgatcatcaagctgcccaagtactccctgttcgagctggagaacggccggaagcggatgctggcctccgccggcgagctgcagaagggcaacgagctggccctgccctccaagtacgtgaacttcctgtacctggcctcccactacgagaagctgaagggctcccccgaggacaacgagcagaagcagctgttcgtggagcagcacaagcactacctggacgagatcatcgagcagatctccgagttctccaagcgggtgatcctggccgacgccaacctggacaaggtgctgtccgcctacaacaagcaccgggacaagcccatccgggagcaggccgagaacatcatccacctgttcaccctgaccaacctgggcgcccccgccgccttcaagtacttcgacaccaccatcgaccggaagcggtacacctccaccaaggaggtgctggacgccaccctgatccaccagtccatcaccggcctgtacgagacccggatcgacctgtcccagctgggcggcgacggtaccaaggacagcaccaaagatatcccggaaaccccgagcaaggaccccaagaagaagcggaaggtgggtaccaaggacagcaccaaagatatcccggaaaccccgagcaaggacatggactccaccaaggagaagtgcgactcctacaaggacgacctgctgctgcggatgggcctgaacgacaacaaggccggcatggagggcctggacaaggagaagatcaacaagatcatcatggaggccaccaagggctcccggttctacggcaacgagctgaagaaggagaagcaggtgaaccagcggatcgagaacatgatgcagcagaaggcccagatcacctcccagcagctgcggaaggcccagctgcaggtggaccggttcgccatggagctggagcagtcccggaacctgtccaacaccatcgtgcacatcgacatggacgccttctacgccgccgtggagatgcgggacaaccccgagctgaaggacaagcccatcgccgtgggctccatgtccatgctgtccacctccaactaccacgcccggcggttcggcgtgcgggccgccatgcccggcttcatcgccaagcggctgtgcccccagctgatcatcgtgccccccaacttcgacaagtaccgggccgtgtccaaggaggtgaaggagatcctggccgactacgaccccaacttcatggccatgtccctggacgaggcctacctgaacatcaccaagcacctggaggagcggcagaactggcccgaggacaagcggcggtacttcatcaagatgggctcctccgtggagaacgacaaccccggcaaggaggtgaacaagctgtccgagcacgagcggtccatctcccccctgctgttcgaggagtccccctccgacgtgcagccccccggcgaccccttccaggtgaacttcgaggagcagaacaacccccagatcctgcagaactccgtggtgttcggcacctccgcccaggaggtggtgaaggagatccggttccggatcgagcagaagaccaccctgaccgcctccgccggcatcgcccccaacaccatgctggccaaggtgtgctccgacaagaacaagcccaacggccagtaccagatcctgcccaaccggcaggccgtgatggacttcatcaaggacctgcccatccggaaggtgtccggcatcggcaaggtgaccgagaagatgctgaaggccctgggcatcatcacctgcaccgagctgtaccagcagcgggccctgctgtccctgctgttctccgagacctcctggcactacttcctgcacatctccctgggcctgggctccacccacctgacccgggaccgggtgcggaagtccatgtccgtggagcggaccttctccgagatcaacaaggccgaggagcagtactccctgtgccaggagctgtgctccgagctggcccaggacctgcagaaggagcggctgaagggccggaccgtgaccatcaagctgaagaacgtgaacttcgaggtgaagacccgggcctccaccgtgtcctccgtggtgtccaccgccgaggagatcttcgccatcgccaaggagctgctgaagaccgagatcgacgccgacttcccccaccccctgcggctgcggctgatgggcgtgcggatctcctccttccccaacgaggaggaccggaagcaccagcagtccggctccgagacccccggcacctccgagtccgccacccccgagtcccccaagaagaagcggaaggtgtagctagcaccagcctcaagaacacccgaatggagtctctaagctacataataccaacttacactttacaaaatgttgtcccccaaaatgtagccattcgtatctgctcctaataaaaagaaagtttcttcacattctctcgagaaaaaaaaaaaatggaaaaaaaaaaaacggaaaaaaaaaaaaggtaaaaaaaaaaaatataaaaaaaaaaaacataaaaaaaaaaaacgaaaaaaaaaaaacgtaaaaaaaaaaaactcaaaaaaaaaaaagataaaaaaaaaaaacctaaaaaaaaaaaatgtaaaaaaaaaaaagggaaaaaaaaaaaacgcaaaaaaaaaaaacacaaaaaaaaaaaatgcaaaaaaaaaaaatcgaaaaaaaaaaaatctaaaaaaaaaaaacgaaaaaaaaaaaacccaaaaaaaaaaaagacaaaaaaaaaaaatagaaaaaaaaaaagttaaaaaaaaaaaactgaaaaaaaaaaaatttaaaaaaaaaaaatctag

SEQ ID NO: 2566 - DNA, 6524 bp, synthetic construct
  misc_feature 1..6524: note = Synthetic
  source 1..6524: mol_type = other DNA
aggactcactatttgttttcgcgcccagttgcaaaaagtgtcgaagctcagaataaacgctcaactttggccggatctgccaccatgaagcggaccgccgacggctccgagttcgagtcccccaagaagaagcggaaggtggacaagaagtactccatcggcctggacatcggcaccaactccgtgggctgggccgtgatcaccgacgagtacaaggtgccctccaagaagttcaaggtgctgggcaacaccgaccggcactccatcaagaagaacctgatcggcgccctgctgttcgactccggcgagaccgccgaggccacccggctgaagcggaccgcccggcggcggtacacccggcggaagaaccggatctgctacctgcaggagatcttctccaacgagatggccaaggtggacgactccttcttccaccggctggaggagtccttcctggtggaggaggacaagaagcacgagcggcaccccatcttcggcaacatcgtggacgaggtggcctaccacgagaagtaccccaccatctaccacctgcggaagaagctggtggactccaccgacaaggccgacctgcggctgatctacctggccctggcccacatgatcaagttccggggccacttcctgatcgagggcgacctgaaccccgacaactccgacgtggacaagctgttcatccagctggtgcagacctacaaccagctgttcgaggagaaccccatcaacgcctccggcgtggacgccaaggccatcctgtccgcccggctgtccaagtcccggcggctggagaacctgatcgcccagctgcccggcgagaagaagaacggcctgttcggcaacctgatcgccctgtccctgggcctgacccccaacttcaagtccaacttcgacctggccgaggacgccaagctgcagctgtccaaggacacctacgacgacgacctggacaacctgctggcccagatcggcgaccagtacgccgacctgttcctggccgccaagaacctgtccgacgccatcctgctgtccgacatcctgcgggtgaacaccgagatcaccaaggcccccctgtccgcctccatgatcaagcggtacgacgagcaccaccaggacctgaccctgctgaaggccctggtgcggcagcagctgcccgagaagtacaaggagatcttcttcgaccagtccaagaacggctacgccggctacatcgacggcggcgcctcccaggaggagttctacaagttcatcaagcccatcctggagaagatggacggcaccgaggagctgctggtgaagctgaaccgggaggacctgctgcggaagcagcggaccttcgacaacggctccatcccccaccagatccacctgggcgagctgcacgccatcctgcggcggcaggaggacttctaccccttcctgaaggacaaccgggagaagatcgagaagatcctgaccttccggatcccctactacgtgggccccctggcccggggcaactcccggttcgcctggatgacccggaagtccgaggagaccatcaccccctggaacttcgaggaggtggtggacaagggcgcctccgcccagtccttcatcgagcggatgaccaacttcgacaagaacctgcccaacgagaaggtgctgcccaagcactccctgctgtacgagtacttcaccgtgtacaacgagctgaccaaggtgaagtacgtgaccgagggcatgcggaagcccgccttcctgtccggcgagcagaagaaggccatcgtggacctgctgttcaagaccaaccggaaggtgaccgtgaagcagctgaaggaggactacttcaagaagatcgagtgcttcgactccgtggagatctccggcgtggaggaccggttcaacgcctccctgggcacctaccacgacctgctgaagatcatcaaggacaaggacttcctggacaacgaggagaacgaggacatcctggaggacatcgtgctgaccctgaccctgttcgaggaccgggagatgatcgaggagcggctgaagacctacgcccacctgttcgacgacaaggtgatgaagcagctgaagcggcggcggtacaccggctggggccggctgtcccggaagctgatcaacggcatccgggacaagcagtccggcaagaccatcctggacttcctgaagtccgacggcttcgccaaccggaacttcatgcagctgatccacgacgactccctgaccttcaaggaggacatccagaaggcccaggtgtccggccagggcgactccctgcacgagcacatcgccaacctggccggctcccccgccatcaagaagggcatcctgcagaccgtgaaggtggtggacgagctggtgaaggtgatgggccggcacaagcccgagaacatcgtgatcgagatggcccgggagaaccagaccacccagaagggccagaagaactcccgggagcggatgaagcggatcgaggagggcatcaaggagctgggctcccagatcctgaaggagcaccccgtggagaacacccagctgcagaacgagaagctgtacctgtactacctgcagaacggccgggacatgtacgtggaccaggagctggacatcaaccggctgtccgactacgacgtggactccatcgtgccccagtccttcctgaaggacgactccatcgacaacaaggtgctgacccggtccgacaagaaccggggcaagtccgacaacgtgccctccgaggaggtggtgaagaagatgaagaactactggcggcagctgctgaacgccaagctgatcacccagcggaagttcgacaacctgaccaaggccgagcggggcggcctgtccgagctggacaaggccggcttcatcaagcggcagctggtggagacccggcagatcaccaagcacgtggcccagatcctggactcccggatgaacaccaagtacgacgagaacgacaagctgatccgggaggtgaaggtgatcaccctgaagtccaagctggtgtccgacttccggaaggacttccagttctacaaggtgcgggagatcaacaactaccaccacgcccacgacgcctacctgaacgccgtggtgggcaccgccctgatcaagaagtaccccaagctggagtccgagttcgtgtacggcgactacaaggtgtacgacgtgcggaagatgatcgccaagtccgagcaggagatcggcaaggccaccgccaagtacttcttctactccaacatcatgaacttcttcaagaccgagatcaccctggccaacggcgagatccggaagcggcccctgatcgagaccaacggcgagaccggcgagatcgtgtgggacaagggccgggacttcgccaccgtgcggaaggtgctgtccatgccccaggtgaacatcgtgaagaagaccgaggtgcagaccggcggcttctccaaggagtccatcctgcccaagcggaactccgacaagctgatcgcccggaagaaggactgggaccccaagaagtacggcggcttcgactcccccaccgtggcctactccgtgctggtggtggccaaggtggagaagggcaagtccaagaagctgaagtccgtgaaggagctgctgggcatcaccatcatggagcggtcctccttcgagaagaaccccatcgacttcctggaggccaagggctacaaggaggtgaagaaggacctgatcatcaagctgcccaagtactccctgttcgagctggagaacggccggaagcggatgctggcctccgccggcgagctgcagaagggcaacgagctggccctgccctccaagtacgtgaacttcctgtacctggcctcccactacgagaagctgaagggctcccccgaggacaacgagcagaagcagctgttcgtggagcagcacaagcactacctggacgagatcatcgagcagatctccgagttctccaagcgggtgatcctggccgacgccaacctggacaaggtgctgtccgcctacaacaagcaccgggacaagcccatccgggagcaggccgagaacatcatccacctgttcaccctgaccaacctgggcgcccccgccgccttcaagtacttcgacaccaccatcgaccggaagcggtacacctccaccaaggaggtgctggacgccaccctgatccaccagtccatcaccggcctgtacgagacccggatcgacctgtcccagctgggcggcgacggtaccaaggacagcaccaaagatatcccggaaaccccgagcaaggaccccaagaagaagcggaaggtgggtaccaaggacagcaccaaagatatcccggaaaccccgagcaaggacatggactccaccaaggagaagtgcgactcctacaaggacgacctgctgctgcggatgggcctgaacgacaacaaggccggcatggagggcctggacaaggagaagatcaacaagatcatcatggaggccaccaagggctcccggttctacggcaacgagctgaagaaggagaagcaggtgaaccagcggatcgagaacatgatgcagcagaaggcccagatcacctcccagcagctgcggaaggcccagctgcaggtggaccggttcgccatggagctggagcagtcccggaacctgtccaacaccatcgtgcacatcgacatggacgccttctacgccgccgtggagatgcgggacaaccccgagctgaaggacaagcccatcgccgtgggctccatgtccatgctgtccacctccaactaccacgcccggcggttcggcgtgcgggccgccatgcccggcttcatcgccaagcggctgtgcccccagctgatcatcgtgccccccaacttcgacaagtaccgggccgtgtccaaggaggtgaaggagatcctggccgactacgaccccaacttcatggccatgtccctggacgaggcctacctgaacatcaccaagcacctggaggagcggcagaactggcccgaggacaagcggcggtacttcatcaagatgggctcctccgtggagaacgacaaccccggcaaggaggtgaacaagctgtccgagcacgagcggtccatctcccccctgctgttcgaggagtccccctccgacgtgcagccccccggcgaccccttccaggtgaacttcgaggagcagaacaacccccagatcctgcagaactccgtggtgttcggcacctccgcccaggaggtggtgaaggagatccggttccggatcgagcagaagaccaccctgaccgcctccgccggcatcgcccccaacaccatgctggccaaggtgtgctccgacaagaacaagcccaacggccagtaccagatcctgcccaaccggcaggccgtgatggacttcatcaaggacctgcccatccggaaggtgtccggcatcggcaaggtgaccgagaagatgctgaaggccctgggcatcatcacctgcaccgagctgtaccagcagcgggccctgctgtccctgctgttctccgagacctcctggcactacttcctgcacatctccctgggcctgggctccacccacctgacccgggaccgggtgcggaagtccatgtccgtggagcggaccttctccgagatcaacaaggccgaggagcagtactccctgtgccaggagctgtgctccgagctggcccaggacctgcagaaggagcggctgaagggccggaccgtgaccatcaagctgaagaacgtgaacttcgaggtgaagacccgggcctccaccgtgtcctccgtggtgtccaccgccgaggagatcttcgccatcgccaaggagctgctgaagaccgagatcgacgccgacttcccccaccccctgcggctgcggctgatgggcgtgcggatctcctccttccccaacgaggaggaccggaagcaccagcagtccggctccgagacccccggcacctccgagtccgccacccccgagtcccccaagaagaagcggaaggtgtagctagcaccagcctcaagaacacccgaatggagtctctaagctacataataccaacttacactttacaaaatgttgtcccccaaaatgtagccattcgtatctgctcctaataaaaagaaagtttcttcacattctctcgagaaaaaaaaaaaatggaaaaaaaaaaaacggaaaaaaaaaaaaggtaaaaaaaaaaaatataaaaaaaaaaaacataaaaaaaaaaaacgaaaaaaaaaaaacgtaaaaaaaaaaaactcaaaaaaaaaaaagataaaaaaaaaaaacctaaaaaaaaaaaatgtaaaaaaaaaaaagggaaaaaaaaaaaacgcaaaaaaaaaaaacacaaaaaaaaaaaatgcaaaaaaaaaaaatcgaaaaaaaaaaaatctaaaaaaaaaaaacgaaaaaaaaaaaacccaaaaaaaaaaaagacaaaaaaaaaaaatagaaaaaaaaaaagttaaaaaaaaaaaactgaaaaaaaaaaaatttaaaaaaaaaaaatctag

SEQ ID NO: 2567 - DNA, 6526 bp, synthetic construct
  misc_feature 1..6526: note = Synthetic
  source 1..6526: mol_type = other DNA
aggaagctcagaataaacgctcaactttggccggatctgccaccatgaaaagaactgctgacggatcagactttgaaagccctaaaaaaaaacggaaggtggacaagaagtactccatcggcctggacatcggcaccaactccgtgggctgggccgtgatcaccgacgagtacaaggtgccctccaagaagttcaaggtgctgggcaacaccgaccggcactccatcaagaagaacctgatcggcgccctgctgttcgactccggcgagaccgccgaggccacccggctgaagcggaccgcccggcggcggtacacccggcggaagaaccggatctgctacctgcaggagatcttctccaacgagatggccaaggtggacgactccttcttccaccggctggaggagtccttcctggtggaggaggacaagaagcacgagcggcaccccatcttcggcaacatcgtggacgaggtggcctaccacgagaagtaccccaccatctaccacctgcggaagaagctggtggactccaccgacaaggccgacctgcggctgatctacctggccctggcccacatgatcaagttccggggccacttcctgatcgagggcgacctgaaccccgacaactccgacgtggacaagctgttcatccagctggtgcagacctacaaccagctgttcgaggagaaccccatcaacgcctccggcgtggacgccaaggccatcctgtccgcccggctgtccaagtcccggcggctggagaacctgatcgcccagctgcccggcgagaagaagaacggcctgttcggcaacctgatcgccctgtccctgggcctgacccccaacttcaagtccaacttcgacctggccgaggacgccaagctgcagctgtccaaggacacctacgacgacgacctggacaacctgctggcccagatcggcgaccagtacgccgacctgttcctggccgccaagaacctgtccgacgccatcctgctgtccgacatcctgcgggtgaacaccgagatcaccaaggcccccctgtccgcctccatgatcaagcggtacgacgagcaccaccaggacctgaccctgctgaaggccctggtgcggcagcagctgcccgagaagtacaaggagatcttcttcgaccagtccaagaacggctacgccggctacatcgacggcggcgcctcccaggaggagttctacaagttcatcaagcccatcctggagaagatggacggcaccgaggagctgctggtgaagctgaaccgggaggacctgctgcggaagcagcggaccttcgacaacggctccatcccccaccagatccacctgggcgagctgcacgccatcctgcggcggcaggaggacttctaccccttcctgaaggacaaccgggagaagatcgagaagatcctgaccttccggatcccctactacgtgggccccctggcccggggcaactcccggttcgcctggatgacccggaagtccgaggagaccatcaccccctggaacttcgaggaggtggtggacaagggcgcctccgcccagtccttcatcgagcggatgaccaacttcgacaagaacctgcccaacgagaaggtgctgcccaagcactccctgctgtacgagtacttcaccgtgtacaacgagctgaccaaggtgaagtacgtgaccgagggcatgcggaagcccgccttcctgtccggcgagcagaagaaggccatcgtggacctgctgttcaagaccaaccggaaggtgaccgtgaagcagctgaaggaggactacttcaagaagatcgagtgcttcgactccgtggagatctccggcgtggaggaccggttcaacgcctccctgggcacctaccacgacctgctgaagatcatcaaggacaaggacttcctggacaacgaggagaacgaggacatcctggaggacatcgtgctgaccctgaccctgttcgaggaccgggagatgatcgaggagcggctgaagacctacgcccacctgttcgacgacaaggtgatgaagcagctgaagcggcggcggtacaccggctggggccggctgtcccggaagctgatcaacggcatccgggacaagcagtccggcaagaccatcctggacttcctgaagtccgacggcttcgccaaccggaacttcatgcagctgatccacgacgactccctgaccttcaaggaggacatccagaaggcccaggtgtccggccagggcgactccctgcacgagcacatcgccaacctggccggctcccccgccatcaagaagggcatcctgcagaccgtgaaggtggtggacgagctggtgaaggtgatgggccggcacaagcccgagaacatcgtgatcgagatggcccgggagaaccagaccacccagaagggccagaagaactcccgggagcggatgaagcggatcgaggagggcatcaaggagctgggctcccagatcctgaaggagcaccccgtggagaacacccagctgcagaacgagaagctgtacctgtactacctgcagaacggccgggacatgtacgtggaccaggagctggacatcaaccggctgtccgactacgacgtggacgccatcgtgccccagtccttcctgaaggacgactccatcgacaacaaggtgctgacccggtccgacaagaaccggggcaagtccgacaacgtgccctccgaggaggtggtgaagaagatgaagaactactggcggcagctgctgaacgccaagctgatcacccagcggaagttcgacaacctgaccaaggccgagcggggcggcctgtccgagctggacaaggccggcttcatcaagcggcagctggtggagacccggcagatcaccaagcacgtggcccagatcctggactcccggatgaacaccaagtacgacgagaacgacaagctgatccgggaggtgaaggtgatcaccctgaagtccaagctggtgtccgacttccggaaggacttccagttctacaaggtgcgggagatcaacaactaccaccacgcccacgacgcctacctgaacgccgtggtgggcaccgccctgatcaagaagtaccccaagctggagtccgagttcgtgtacggcgactacaaggtgtacgacgtgcggaagatgatcgccaagtccgagcaggagatcggcaaggccaccgccaagtacttcttctactccaacatcatgaacttcttcaagaccgagatcaccctggccaacggcgagatccggaagcggcccctgatcgagaccaacggcgagaccggcgagatcgtgtgggacaagggccgggacttcgccaccgtgcggaaggtgctgtccatgccccaggtgaacatcgtgaagaagaccgaggtgcagaccggcggcttctccaaggagtccatcctgcccaagcggaactccgacaagctgatcgcccggaagaaggactgggaccccaagaagtacggcggcttcgactcccccaccgtggcctactccgtgctggtggtggccaaggtggagaagggcaagtccaagaagctgaagtccgtgaaggagctgctgggcatcaccatcatggagcggtcctccttcgagaagaaccccatcgacttcctggaggccaagggctacaaggaggtgaagaaggacctgatcatcaagctgcccaagtactccctgttcgagctggagaacggccggaagcggatgctggcctccgccggcgagctgcagaagggcaacgagctggccctgccctccaagtacgtgaacttcctgtacctggcctcccactacgagaagctgaagggctcccccgaggacaacgagcagaagcagctgttcgtggagcagcacaagcactacctggacgagatcatcgagcagatctccgagttctccaagcgggtgatcctggccgacgccaacctggacaaggtgctgtccgcctacaacaagcaccgggacaagcccatccgggagcaggccgagaacatcatccacctgttcaccctgaccaacctgggcgcccccgccgccttcaagtacttcgacaccaccatcgaccggaagcggtacacctccaccaaggaggtgctggacgccaccctgatccaccagtccatcaccggcctgtacgagacccggatcgacctgtcccagctgggcggcgactccggcggctcctccggcggctccaagcggaccgccgacggctccgagttcgagtcccccaagaagaagcggaaggtgtccggcggctcctccggcggctccatggactccaccaaggagaagtgcgactcctacaaggacgacctgctgctgcggatgggcctgaacgacaacaaggccggcatggagggcctggacaaggagaagatcaacaagatcatcatggaggccaccaagggctcccggttctacggcaacgagctgaagaaggagaagcaggtgaaccagcggatcgagaacatgatgcagcagaaggcccagatcacctcccagcagctgcggaaggcccagctgcaggtggaccggttcgccatggagctggagcagtcccggaacctgtccaacaccatcgtgcacatcgacatggacgccttctacgccgccgtggagatgcgggacaaccccgagctgaaggacaagcccatcgccgtgggctccatgtccatgctgtccacctccaactaccacgcccggcggttcggcgtgcgggccgccatgcccggcttcatcgccaagcggctgtgcccccagctgatcatcgtgccccccaacttcgacaagtaccgggccgtgtccaaggaggtgaaggagatcctggccgactacgaccccaacttcatggccatgtccctggacgaggcctacctgaacatcaccaagcacctggaggagcggcagaactggcccgaggacaagcggcggtacttcatcaagatgggctcctccgtggagaacgacaaccccggcaaggaggtgaacaagctgtccgagcacgagcggtccatctcccccctgctgttcgaggagtccccctccgacgtgcagccccccggcgaccccttccaggtgaacttcgaggagcagaacaacccccagatcctgcagaactccgtggtgttcggcacctccgcccaggaggtggtgaaggagatccggttccggatcgagcagaagaccaccctgaccgcctccgccggcatcgcccccaacaccatgctggccaaggtgtgctccgacaagaacaagcccaacggccagtaccagatcctgcccaaccggcaggccgtgatggacttcatcaaggacctgcccatccggaaggtgtccggcatcggcaaggtgaccgagaagatgctgaaggccctgggcatcatcacctgcaccgagctgtaccagcagcgggccctgctgtccctgctgttctccgagacctcctggcactacttcctgcacatctccctgggcctgggctccacccacctgacccgggaccgggtgcggaagtccatgtccgtggagcggaccttctccgagatcaacaaggccgaggagcagtactccctgtgccaggagctgtgctccgagctggcccaggacctgcagaaggagcggctgaagggccggaccgtgaccatcaagctgaagaacgtgaacttcgaggtgaagacccgggcctccaccgtgtcctccgtggtgtccaccgccgaggagatcttcgccatcgccaaggagctgctgaagaccgagatcgacgccgacttcccccaccccctgcggctgcggctgatgggcgtgcggatctcctccttccccaacgaggaggaccggaagcaccagcagggcggcggctccggcaagcggaccgccgacggctccggcggcggctcccccaagaagaagcggaaggtgtccgagtccgccacccccgagtccgtgtccggctggcggctgttcaagaagatctcctagctagcaccagcctcaagaacacccgaatggagtctctaagctacataataccaacttacactttacaaaatgttgtcccccaaaatgtagccattcgtatctgctcctaataaaaagaaagtttcttcacattctctcgagaaaaaaaaaaaatggaaaaaaaaaaaacggaaaaaaaaaaaaggtaaaaaaaaaaaatataaaaaaaaaaaacataaaaaaaaaaaacgaaaaaaaaaaaacgtaaaaaaaaaaaactcaaaaaaaaaaaagataaaaaaaaaaaacctaaaaaaaaaaaatgtaaaaaaaaaaaagggaaaaaaaaaaaacgcaaaaaaaaaaaacacaaaaaaaaaaaatgcaaaaaaaaaaaatcgaaaaaaaaaaaatctaaaaaaaaaaaacgaaaaaaaaaaaacccaaaaaaaaaaaagacaaaaaaaaaaaatagaaaaaaaaaaagttaaaaaaaaaaaactgaaaaaaaaaaaatttaaaaaaaaaaaatctag

SEQ ID NO: 2568 - DNA, 6641 bp, synthetic construct
  misc_feature 1..6641: note = Synthetic
  source 1..6641: mol_type = other DNA
aggactcactatttgttttcgcgcccagttgcaaaaagtgtcgaagctcagaataaacgctcaactttggccggatctgccaccatgggcaagcggaccgccgacggctccgagttcgagtcccccaagaagaagcggaaggtggacaagaagtactccatcggcctggacatcggcaccaactccgtgggctgggccgtgatcaccgacgagtacaaggtgccctccaagaagttcaaggtgctgggcaacaccgaccggcactccatcaagaagaacctgatcggcgccctgctgttcgactccggcgagaccgccgaggccacccggctgaagcggaccgcccggcggcggtacacccggcggaagaaccggatctgctacctgcaggagatcttctccaacgagatggccaaggtggacgactccttcttccaccggctggaggagtccttcctggtggaggaggacaagaagcacgagcggcaccccatcttcggcaacatcgtggacgaggtggcctaccacgagaagtaccccaccatctaccacctgcggaagaagctggtggactccaccgacaaggccgacctgcggctgatctacctggccctggcccacatgatcaagttccggggccacttcctgatcgagggcgacctgaaccccgacaactccgacgtggacaagctgttcatccagctggtgcagacctacaaccagctgttcgaggagaaccccatcaacgcctccggcgtggacgccaaggccatcctgtccgcccggctgtccaagtcccggcggctggagaacctgatcgcccagctgcccggcgagaagaagaacggcctgttcggcaacctgatcgccctgtccctgggcctgacccccaacttcaagtccaacttcgacctggccgaggacgccaagctgcagctgtccaaggacacctacgacgacgacctggacaacctgctggcccagatcggcgaccagtacgccgacctgttcctggccgccaagaacctgtccgacgccatcctgctgtccgacatcctgcgggtgaacaccgagatcaccaaggcccccctgtccgcctccatgatcaagcggtacgacgagcaccaccaggacctgaccctgctgaaggccctggtgcggcagcagctgcccgagaagtacaaggagatcttcttcgaccagtccaagaacggctacgccggctacatcgacggcggcgcctcccaggaggagttctacaagttcatcaagcccatcctggagaagatggacggcaccgaggagctgctggtgaagctgaaccgggaggacctgctgcggaagcagcggaccttcgacaacggctccatcccccaccagatccacctgggcgagctgcacgccatcctgcggcggcaggaggacttctaccccttcctgaaggacaaccgggagaagatcgagaagatcctgaccttccggatcccctactacgtgggccccctggcccggggcaactcccggttcgcctggatgacccggaagtccgaggagaccatcaccccctggaacttcgaggaggtggtggacaagggcgcctccgcccagtccttcatcgagcggatgaccaacttcgacaagaacctgcccaacgagaaggtgctgcccaagcactccctgctgtacgagtacttcaccgtgtacaacgagctgaccaaggtgaagtacgtgaccgagggcatgcggaagcccgccttcctgtccggcgagcagaagaaggccatcgtggacctgctgttcaagaccaaccggaaggtgaccgtgaagcagctgaaggaggactacttcaagaagatcgagtgcttcgactccgtggagatctccggcgtggaggaccggttcaacgcctccctgggcacctaccacgacctgctgaagatcatcaaggacaaggacttcctggacaacgaggagaacgaggacatcctggaggacatcgtgctgaccctgaccctgttcgaggaccgggagatgatcgaggagcggctgaagacctacgcccacctgttcgacgacaaggtgatgaagcagctgaagcggcggcggtacaccggctggggccggctgtcccggaagctgatcaacggcatccgggacaagcagtccggcaagaccatcctggacttcctgaagtccgacggcttcgccaaccggaacttcatgcagctgatccacgacgactccctgaccttcaaggaggacatccagaaggcccaggtgtccggccagggcgactccctgcacgagcacatcgccaacctggccggctcccccgccatcaagaagggcatcctgcagaccgtgaaggtggtggacgagctggtgaaggtgatgggccggcacaagcccgagaacatcgtgatcgagatggcccgggagaaccagaccacccagaagggccagaagaactcccgggagcggatgaagcggatcgaggagggcatcaaggagctgggctcccagatcctgaaggagcaccccgtggagaacacccagctgcagaacgagaagctgtacctgtactacctgcagaacggccgggacatgtacgtggaccaggagctggacatcaaccggctgtccgactacgacgtggacgccatcgtgccccagtccttcctgaaggacgactccatcgacaacaaggtgctgacccggtccgacaagaaccggggcaagtccgacaacgtgccctccgaggaggtggtgaagaagatgaagaactactggcggcagctgctgaacgccaagctgatcacccagcggaagttcgacaacctgaccaaggccgagcggggcggcctgtccgagctggacaaggccggcttcatcaagcggcagctggtggagacccggcagatcaccaagcacgtggcccagatcctggactcccggatgaacaccaagtacgacgagaacgacaagctgatccgggaggtgaaggtgatcaccctgaagtccaagctggtgtccgacttccggaaggacttccagttctacaaggtgcgggagatcaacaactaccaccacgcccacgacgcctacctgaacgccgtggtgggcaccgccctgatcaagaagtaccccaagctggagtccgagttcgtgtacggcgactacaaggtgtacgacgtgcggaagatgatcgccaagtccgagcaggagatcggcaaggccaccgccaagtacttcttctactccaacatcatgaacttcttcaagaccgagatcaccctggccaacggcgagatccggaagcggcccctgatcgagaccaacggcgagaccggcgagatcgtgtgggacaagggccgggacttcgccaccgtgcggaaggtgctgtccatgccccaggtgaacatcgtgaagaagaccgaggtgcagaccggcggcttctccaaggagtccatcctgcccaagcggaactccgacaagctgatcgcccggaagaaggactgggaccccaagaagtacggcggcttcgactcccccaccgtggcctactccgtgctggtggtggccaaggtggagaagggcaagtccaagaagctgaagtccgtgaaggagctgctgggcatcaccatcatggagcggtcctccttcgagaagaaccccatcgacttcctggaggccaagggctacaaggaggtgaagaaggacctgatcatcaagctgcccaagtactccctgttcgagctggagaacggccggaagcggatgctggcctccgccggcgagctgcagaagggcaacgagctggccctgccctccaagtacgtgaacttcctgtacctggcctcccactacgagaagctgaagggctcccccgaggacaacgagcagaagcagctgttcgtggagcagcacaagcactacctggacgagatcatcgagcagatctccgagttctccaagcgggtgatcctggccgacgccaacctggacaaggtgctgtccgcctacaacaagcaccgggacaagcccatccgggagcaggccgagaacatcatccacctgttcaccctgaccaacctgggcgcccccgccgccttcaagtacttcgacaccaccatcgaccggaagcggtacacctccaccaaggaggtgctggacgccaccctgatccaccagtccatcaccggcctgtacgagacccggatcgacctgtcccagctgggcggcgactccggcggctcctccggcggctccaagcggaccgccgacggctccgagttcgagtcccccaagaagaagcggaaggtgtccggcggctcctccggcggctccatggactccaccaaggagaagtgcgactcctacaaggacgacctgctgctgcggatgggcctgaacgacaacaaggccggcatggagggcctggacaaggagaagatcaacaagatcatcatggaggccaccaagggctcccggttctacggcaacgagctgaagaaggagaagcaggtgaaccagcggatcgagaacatgatgcagcagaaggcccagatcacctcccagcagctgcggaaggcccagctgcaggtggaccggttcgccatggagctggagcagtcccggaacctgtccaacaccatcgtgcacatcgacatggacgccttctacgccgccgtggagatgcgggacaaccccgagctgaaggacaagcccatcgccgtgggctccatgtccatgctgtccacctccaactaccacgcccggcggttcggcgtgcgggccgccatgcccggcttcatcgccaagcggctgtgcccccagctgatcatcgtgccccccaacttcgacaagtaccgggccgtgtccaaggaggtgaaggagatcctggccgactacgaccccaacttcatggccatgtccctggacgaggcctacctgaacatcaccaagcacctggaggagcggcagaactggcccgaggacaagcggcggtacttcatcaagatgggctcctccgtggagaacgacaaccccggcaaggaggtgaacaagctgtccgagcacgagcggtccatctcccccctgctgttcgaggagtccccctccgacgtgcagccccccggcgaccccttccaggtgaacttcgaggagcagaacaacccccagatcctgcagaactccgtggtgttcggcacctccgcccaggaggtggtgaaggagatccggttccggatcgagcagaagaccaccctgaccgcctccgccggcatcgcccccaacaccatgctggccaaggtgtgctccgacaagaacaagcccaacggccagtaccagatcctgcccaaccggcaggccgtgatggacttcatcaaggacctgcccatccggaaggtgtccggcatcggcaaggtgaccgagaagatgctgaaggccctgggcatcatcacctgcaccgagctgtaccagcagcgggccctgctgtccctgctgttctccgagacctcctggcactacttcctgcacatctccctgggcctgggctccacccacctgacccgggaccgggtgcggaagtccatgtccgtggagcggaccttctccgagatcaacaaggccgaggagcagtactccctgtgccaggagctgtgctccgagctggcccaggacctgcagaaggagcggctgaagggccggaccgtgaccatcaagctgaagaacgtgaacttcgaggtgaagacccgggcctccaccgtgtcctccgtggtgtccaccgccgaggagatcttcgccatcgccaaggagctgctgaagaccgagatcgacgccgacttcccccaccccctgcggctgcggctgatgggcgtgcggatctcctccttccccaacgaggaggaccggaagcaccagcagtccggctccgagacccccggcacctccgagtccgccacccccgagtccatcgccgccctggagaaggagatcgccgccctggagaaggagaacgccgccctggagtgggagatcgccgccctggagaagtccggctccgagacccccggcacctccgagtccgccacccccgagtcccccaagaagaagcggaaggtgtagctagcaccagcctcaagaacacccgaatggagtctctaagctacataataccaacttacactttacaaaatgttgtcccccaaaatgtagccattcgtatctgctcctaataaaaagaaagtttcttcacattctctcgagaaaaaaaaaaaatggaaaaaaaaaaaacggaaaaaaaaaaaaggtaaaaaaaaaaaatataaaaaaaaaaaacataaaaaaaaaaaacgaaaaaaaaaaaacgtaaaaaaaaaaaactcaaaaaaaaaaaagataaaaaaaaaaaacctaaaaaaaaaaaatgtaaaaaaaaaaaagggaaaaaaaaaaaacgcaaaaaaaaaaaacacaaaaaaaaaaaatgcaaaaaaaaaaaatcgaaaaaaaaaaaatctaaaaaaaaaaaacgaaaaaaaaaaaacccaaaaaaaaaaaagacaaaaaaaaaaaatagaaaaaaaaaaagttaaaaaaaaaaaactgaaaaaaaaaaaatttaaaaaaaaaaaatctag

SEQ ID NO: 2569 - DNA, 6526 bp, synthetic construct
  misc_feature 1..6526: note = Synthetic
  source 1..6526: mol_type = other DNA
aggaagctcagaataaacgctcaactttggccggatctgccaccatgaagcggaccgccgacggctccgagttcgagtcccccaagaagaagcggaaggtggacaagaagtactccatcggcctggacatcggcaccaactccgtgggctgggccgtgatcaccgacgagtacaaggtgccctccaagaagttcaaggtgctgggcaacaccgaccggcactccatcaagaagaacctgatcggcgccctgctgttcgactccggcgagaccgccgaggccacccggctgaagcggaccgcccggcggcggtacacccggcggaagaaccggatctgctacctgcaggagatcttctccaacgagatggccaaggtggacgactccttcttccaccggctggaggagtccttcctggtggaggaggacaagaagcacgagcggcaccccatcttcggcaacatcgtggacgaggtggcctaccacgagaagtaccccaccatctaccacctgcggaagaagctggtggactccaccgacaaggccgacctgcggctgatctacctggccctggcccacatgatcaagttccggggccacttcctgatcgagggcgacctgaaccccgacaactccgacgtggacaagctgttcatccagctggtgcagacctacaaccagctgttcgaggagaaccccatcaacgcctccggcgtggacgccaaggccatcctgtccgcccggctgtccaagtcccggcggctggagaacctgatcgcccagctgcccggcgagaagaagaacggcctgttcggcaacctgatcgccctgtccctgggcctgacccccaacttcaagtccaacttcgacctggccgaggacgccaagctgcagctgtccaaggacacctacgacgacgacctggacaacctgctggcccagatcggcgaccagtacgccgacctgttcctggccgccaagaacctgtccgacgccatcctgctgtccgacatcctgcgggtgaacaccgagatcaccaaggcccccctgtccgcctccatgatcaagcggtacgacgagcaccaccaggacctgaccctgctgaaggccctggtgcggcagcagctgcccgagaagtacaaggagatcttcttcgaccagtccaagaacggctacgccggctacatcgacggcggcgcctcccaggaggagttctacaagttcatcaagcccatcctggagaagatggacggcaccgaggagctgctggtgaagctgaaccgggaggacctgctgcggaagcagcggaccttcgacaacggctccatcccccaccagatccacctgggcgagctgcacgccatcctgcggcggcaggaggacttctaccccttcctgaaggacaaccgggagaagatcgagaagatcctgaccttccggatcccctactacgtgggccccctggcccggggcaactcccggttcgcctggatgacccggaagtccgaggagaccatcaccccctggaacttcgaggaggtggtggacaagggcgcctccgcccagtccttcatcgagcggatgaccaacttcgacaagaacctgcccaacgagaaggtgctgcccaagcactccctgctgtacgagtacttcaccgtgtacaacgagctgaccaaggtgaagtacgtgaccgagggcatgcggaagcccgccttcctgtccggcgagcagaagaaggccatcgtggacctgctgttcaagaccaaccggaaggtgaccgtgaagcagctgaaggaggactacttcaagaagatcgagtgcttcgactccgtggagatctccggcgtggaggaccggttcaacgcctccctgggcacctaccacgacctgctgaagatcatcaaggacaaggacttcctggacaacgaggagaacgaggacatcctggaggacatcgtgctgaccctgaccctgttcgaggaccgggagatgatcgaggagcggctgaagacctacgcccacctgttcgacgacaaggtgatgaagcagctgaagcggcggcggtacaccggctggggccggctgtcccggaagctgatcaacggcatccgggacaagcagtccggcaagaccatcctggacttcctgaagtccgacggcttcgccaaccggaacttcatgcagctgatccacgacgactccctgaccttcaaggaggacatccagaaggcccaggtgtccggccagggcgactccctgcacgagcacatcgccaacctggccggctcccccgccatcaagaagggcatcctgcagaccgtgaaggtggtggacgagctggtgaaggtgatgggccggcacaagcccgagaacatcgtgatcgagatggcccgggagaaccagaccacccagaagggccagaagaactcccgggagcggatgaagcggatcgaggagggcatcaaggagctgggctcccagatcctgaaggagcaccccgtggagaacacccagctgcagaacgagaagctgtacctgtactacctgcagaacggccgggacatgtacgtggaccaggagctggacatcaaccggctgtccgactacgacgtggacgacatcgtgccccagtccttcctgaaggacgactccatcgacaacaaggtgctgacccggtccgacaagaaccggggcaagtccgacaacgtgccctccgaggaggtggtgaagaagatgaagaactactggcggcagctgctgaacgccaagctgatcacccagcggaagttcgacaacctgaccaaggccgagcggggcggcctgtccgagctggacaaggccggcttcatcaagcggcagctggtggagacccggcagatcaccaagcacgtggcccagatcctggactcccggatgaacaccaagtacgacgagaacgacaagctgatccgggaggtgaaggtgatcaccctgaagtccaagctggtgtccgacttccggaaggacttccagttctacaaggtgcgggagatcaacaactaccaccacgcccacgacgcctacctgaacgccgtggtgggcaccgccctgatcaagaagtaccccaagctggagtccgagttcgtgtacggcgactacaaggtgtacgacgtgcggaagatgatcgccaagtccgagcaggagatcggcaaggccaccgccaagtacttcttctactccaacatcatgaacttcttcaagaccgagatcaccctggccaacggcgagatccggaagcggcccctgatcgagaccaacggcgagaccggcgagatcgtgtgggacaagggccgggacttcgccaccgtgcggaaggtgctgtccatgccccaggtgaacatcgtgaagaagaccgaggtgcagaccggcggcttctccaaggagtccatcctgcccaagcggaactccgacaagctgatcgcccggaagaaggactgggaccccaagaagtacggcggcttcgactcccccaccgtggcctactccgtgctggtggtggccaaggtggagaagggcaagtccaagaagctgaagtccgtgaaggagctgctgggcatcaccatcatggagcggtcctccttcgagaagaaccccatcgacttcctggaggccaagggctacaaggaggtgaagaaggacctgatcatcaagctgcccaagtactccctgttcgagctggagaacggccggaagcggatgctggcctccgccggcgagctgcagaagggcaacgagctggccctgccctccaagtacgtgaacttcctgtacctggcctcccactacgagaagctgaagggctcccccgaggacaacgagcagaagcagctgttcgtggagcagcacaagcactacctggacgagatcatcgagcagatctccgagttctccaagcgggtgatcctggccgacgccaacctggacaaggtgctgtccgcctacaacaagcaccgggacaagcccatccgggagcaggccgagaacatcatccacctgttcaccctgaccaacctgggcgcccccgccgccttcaagtacttcgacaccaccatcgaccggaagcggtacacctccaccaaggaggtgctggacgccaccctgatccaccagtccatcaccggcctgtacgagacccggatcgacctgtcccagctgggcggcgactccggcggctcctccggcggctccaagcggaccgccgacggctccgagttcgagtcccccaagaagaagcggaaggtgtccggcggctcctccggcggctccatggactccaccaaggagaagtgcgactcctacaaggacgacctgctgctgcggatgggcctgaacgacaacaaggccggcatggagggcctggacaaggagaagatcaacaagatcatcatggaggccaccaagggctcccggttctacggcaacgagctgaagaaggagaagcaggtgaaccagcggatcgagaacatgatgcagcagaaggcccagatcacctcccagcagctgcggaaggcccagctgcaggtggaccggttcgccatggagctggagcagtcccggaacctgtccaacaccatcgtgcacatcgacatggacgccttctacgccgccgtggagatgcgggacaaccccgagctgaaggacaagcccatcgccgtgggctccatgtccatgctgtccacctccaactaccacgcccggcggttcggcgtgcgggccgccatgcccggcttcatcgccaagcggctgtgcccccagctgatcatcgtgccccccaacttcgacaagtaccgggccgtgtccaaggaggtgaaggagatcctggccgactacgaccccaacttcatggccatgtccctggacgaggcctacctgaacatcaccaagcacctggaggagcggcagaactggcccgaggacaagcggcggtacttcatcaagatgggctcctccgtggagaacgacaaccccggcaaggaggtgaacaagctgtccgagcacgagcggtccatctcccccctgctgttcgaggagtccccctccgacgtgcagccccccggcgaccccttccaggtgaacttcgaggagcagaacaacccccagatcctgcagaactccgtggtgttcggcacctccgcccaggaggtggtgaaggagatccggttccggatcgagcagaagaccaccctgaccgcctccgccggcatcgcccccaacaccatgctggccaaggtgtgctccgacaagaacaagcccaacggccagtaccagatcctgcccaaccggcaggccgtgatggacttcatcaaggacctgcccatccggaaggtgtccggcatcggcaaggtgaccgagaagatgctgaaggccctgggcatcatcacctgcaccgagctgtaccagcagcgggccctgctgtccctgctgttctccgagacctcctggcactacttcctgcacatctccctgggcctgggctccacccacctgacccgggaccgggtgcggaagtccatgtccgtggagcggaccttctccgagatcaacaaggccgaggagcagtactccctgtgccaggagctgtgctccgagctggcccaggacctgcagaaggagcggctgaagggccggaccgtgaccatcaagctgaagaacgtgaacttcgaggtgaagacccgggcctccaccgtgtcctccgtggtgtccaccgccgaggagatcttcgccatcgccaaggagctgctgaagaccgagatcgacgccgacttcccccaccccctgcggctgcggctgatgggcgtgcggatctcctccttccccaacgaggaggaccggaagcaccagcagggcggcggctccggcaagcggaccgccgacggctccggcggcggctcccccaagaagaagcggaaggtgtccgagtccgccacccccgagtccgtgtccggctggcggctgttcaagaagatctcctagctagcaccagcctcaagaacacccgaatggagtctctaagctacataataccaacttacactttacaaaatgttgtcccccaaaatgtagccattcgtatctgctcctaataaaaagaaagtttcttcacattctctcgagaaaaaaaaaaaatggaaaaaaaaaaaacggaaaaaaaaaaaaggtaaaaaaaaaaaatataaaaaaaaaaaacataaaaaaaaaaaacgaaaaaaaaaaaacgtaaaaaaaaaaaactcaaaaaaaaaaaagataaaaaaaaaaaacctaaaaaaaaaaaatgtaaaaaaaaaaaagggaaaaaaaaaaaacgcaaaaaaaaaaaacacaaaaaaaaaaaatgcaaaaaaaaaaaatcgaaaaaaaaaaaatctaaaaaaaaaaaacgaaaaaaaaaaaacccaaaaaaaaaaaagacaaaaaaaaaaaatagaaaaaaaaaaagttaaaaaaaaaaaactgaaaaaaaaaaaatttaaaaaaaaaaaatctag

SEQ ID NO: 2570 - DNA, 6526 bp, synthetic construct
  misc_feature 1..6526: note = Synthetic
  source 1..6526: mol_type = other DNA
aggaagctcagaataaacgctcaactttggccggatctgccaccatgaagcggaccgccgacggctccgagttcgagtcccccaagaagaagcggaaggtggacaagaagtactccatcggcctggacatcggcaccaactccgtgggctgggccgtgatcaccgacgagtacaaggtgccctccaagaagttcaaggtgctgggcaacaccgaccggcactccatcaagaagaacctgatcggcgccctgctgttcgactccggcgagaccgccgaggccacccggctgaagcggaccgcccggcggcggtacacccggcggaagaaccggatctgctacctgcaggagatcttctccaacgagatggccaaggtggacgactccttcttccaccggctggaggagtccttcctggtggaggaggacaagaagcacgagcggcaccccatcttcggcaacatcgtggacgaggtggcctaccacgagaagtaccccaccatctaccacctgcggaagaagctggtggactccaccgacaaggccgacctgcggctgatctacctggccctggcccacatgatcaagttccggggccacttcctgatcgagggcgacctgaaccccgacaactccgacgtggacaagctgttcatccagctggtgcagacctacaaccagctgttcgaggagaaccccatcaacgcctccggcgtggacgccaaggccatcctgtccgcccggctgtccaagtcccggcggctggagaacctgatcgcccagctgcccggcgagaagaagaacggcctgttcggcaacctgatcgccctgtccctgggcctgacccccaacttcaagtccaacttcgacctggccgaggacgccaagctgcagctgtccaaggacacctacgacgacgacctggacaacctgctggcccagatcggcgaccagtacgccgacctgttcctggccgccaagaacctgtccgacgccatcctgctgtccgacatcctgcgggtgaacaccgagatcaccaaggcccccctgtccgcctccatgatcaagcggtacgacgagcaccaccaggacctgaccctgctgaaggccctggtgcggcagcagctgcccgagaagtacaaggagatcttcttcgaccagtccaagaacggctacgccggctacatcgacggcggcgcctcccaggaggagttctacaagttcatcaagcccatcctggagaagatggacggcaccgaggagctgctggtgaagctgaaccgggaggacctgctgcggaagcagcggaccttcgacaacggctccatcccccaccagatccacctgggcgagctgcacgccatcctgcggcggcaggaggacttctaccccttcctgaaggacaaccgggagaagatcgagaagatcctgaccttccggatcccctactacgtgggccccctggcccggggcaactcccggttcgcctggatgacccggaagtccgaggagaccatcaccccctggaacttcgaggaggtggtggacaagggcgcctccgcccagtccttcatcgagcggatgaccaacttcgacaagaacctgcccaacgagaaggtgctgcccaagcactccctgctgtacgagtacttcaccgtgtacaacgagctgaccaaggtgaagtacgtgaccgagggcatgcggaagcccgccttcctgtccggcgagcagaagaaggccatcgtggacctgctgttcaagaccaaccggaaggtgaccgtgaagcagctgaaggaggactacttcaagaagatcgagtgcttcgactccgtggagatctccggcgtggaggaccggttcaacgcctccctgggcacctaccacgacctgctgaagatcatcaaggacaaggacttcctggacaacgaggagaacgaggacatcctggaggacatcgtgctgaccctgaccctgttcgaggaccgggagatgatcgaggagcggctgaagacctacgcccacctgttcgacgacaaggtgatgaagcagctgaagcggcggcggtacaccggctggggccggctgtcccggaagctgatcaacggcatccgggacaagcagtccggcaagaccatcctggacttcctgaagtccgacggcttcgccaaccggaacttcatgcagctgatccacgacgactccctgaccttcaaggaggacatccagaaggcccaggtgtccggccagggcgactccctgcacgagcacatcgccaacctggccggctcccccgccatcaagaagggcatcctgcagaccgtgaaggtggtggacgagctggtgaaggtgatgggccggcacaagcccgagaacatcgtgatcgagatggcccgggagaaccagaccacccagaagggccagaagaactcccgggagcggatgaagcggatcgaggagggcatcaaggagctgggctcccagatcctgaaggagcaccccgtggagaacacccagctgcagaacgagaagctgtacctgtactacctgcagaacggccgggacatgtacgtggaccaggagctggacatcaaccggctgtccgactacgacgtggacttcatcgtgccccagtccttcctgaaggacgactccatcgacaacaaggtgctgacccggtccgacaagaaccggggcaagtccgacaacgtgccctccgaggaggtggtgaagaagatgaagaactactggcggcagctgctgaacgccaagctgatcacccagcggaagttcgacaacctgaccaaggccgagcggggcggcctgtccgagctggacaaggccggcttcatcaagcggcagctggtggagacccggcagatcaccaagcacgtggcccagatcctggactcccggatgaacaccaagtacgacgagaacgacaagctgatccgggaggtgaaggtgatcaccctgaagtccaagctggtgtccgacttccggaaggacttccagttctacaaggtgcgggagatcaacaactaccaccacgcccacgacgcctacctgaacgccgtggtgggcaccgccctgatcaagaagtaccccaagctggagtccgagttcgtgtacggcgactacaaggtgtacgacgtgcggaagatgatcgccaagtccgagcaggagatcggcaaggccaccgccaagtacttcttctactccaacatcatgaacttcttcaagaccgagatcaccctggccaacggcgagatccggaagcggcccctgatcgagaccaacggcgagaccggcgagatcgtgtgggacaagggccgggacttcgccaccgtgcggaaggtgctgtccatgccccaggtgaacatcgtgaagaagaccgaggtgcagaccggcggcttctccaaggagtccatcctgcccaagcggaactccgacaagctgatcgcccggaagaaggactgggaccccaagaagtacggcggcttcgactcccccaccgtggcctactccgtgctggtggtggccaaggtggagaagggcaagtccaagaagctgaagtccgtgaaggagctgctgggcatcaccatcatggagcggtcctccttcgagaagaaccccatcgacttcctggaggccaagggctacaaggaggtgaagaaggacctgatcatcaagctgcccaagtactccctgttcgagctggagaacggccggaagcggatgctggcctccgccggcgagctgcagaagggcaacgagctggccctgccctccaagtacgtgaacttcctgtacctggcctcccactacgagaagctgaagggctcccccgaggacaacgagcagaagcagctgttcgtggagcagcacaagcactacctggacgagatcatcgagcagatctccgagttctccaagcgggtgatcctggccgacgccaacctggacaaggtgctgtccgcctacaacaagcaccgggacaagcccatccgggagcaggccgagaacatcatccacctgttcaccctgaccaacctgggcgcccccgccgccttcaagtacttcgacaccaccatcgaccggaagcggtacacctccaccaaggaggtgctggacgccaccctgatccaccagtccatcaccggcctgtacgagacccggatcgacctgtcccagctgggcggcgactccggcggctcctccggcggctccaagcggaccgccgacggctccgagttcgagtcccccaagaagaagcggaaggtgtccggcggctcctccggcggctccatggactccaccaaggagaagtgcgactcctacaaggacgacctgctgctgcggatgggcctgaacgacaacaaggccggcatggagggcctggacaaggagaagatcaacaagatcatcatggaggccaccaagggctcccggttctacggcaacgagctgaagaaggagaagcaggtgaaccagcggatcgagaacatgatgcagcagaaggcccagatcacctcccagcagctgcggaaggcccagctgcaggtggaccggttcgccatggagctggagcagtcccggaacctgtccaacaccatcgtgcacatcgacatggacgccttctacgccgccgtggagatgcgggacaaccccgagctgaaggacaagcccatcgccgtgggctccatgtccatgctgtccacctccaactaccacgcccggcggttcggcgtgcgggccgccatgcccggcttcatcgccaagcggctgtgcccccagctgatcatcgtgccccccaacttcgacaagtaccgggccgtgtccaaggaggtgaaggagatcctggccgactacgaccccaacttcatggccatgtccctggacgaggcctacctgaacatcaccaagcacctggaggagcggcagaactggcccgaggacaagcggcggtacttcatcaagatgggctcctccgtggagaacgacaaccccggcaaggaggtgaacaagctgtccgagcacgagcggtccatctcccccctgctgttcgaggagtccccctccgacgtgcagccccccggcgaccccttccaggtgaacttcgaggagcagaacaacccccagatcctgcagaactccgtggtgttcggcacctccgcccaggaggtggtgaaggagatccggttccggatcgagcagaagaccaccctgaccgcctccgccggcatcgcccccaacaccatgctggccaaggtgtgctccgacaagaacaagcccaacggccagtaccagatcctgcccaaccggcaggccgtgatggacttcatcaaggacctgcccatccggaaggtgtccggcatcggcaaggtgaccgagaagatgctgaaggccctgggcatcatcacctgcaccgagctgtaccagcagcgggccctgctgtccctgctgttctccgagacctcctggcactacttcctgcacatctccctgggcctgggctccacccacctgacccgggaccgggtgcggaagtccatgtccgtggagcggaccttctccgagatcaacaaggccgaggagcagtactccctgtgccaggagctgtgctccgagctggcccaggacctgcagaaggagcggctgaagggccggaccgtgaccatcaagctgaagaacgtgaacttcgaggtgaagacccgggcctccaccgtgtcctccgtggtgtccaccgccgaggagatcttcgccatcgccaaggagctgctgaagaccgagatcgacgccgacttcccccaccccctgcggctgcggctgatgggcgtgcggatctcctccttccccaacgaggaggaccggaagcaccagcagggcggcggctccggcaagcggaccgccgacggctccggcggcggctcccccaagaagaagcggaaggtgtccgagtccgccacccccgagtccgtgtccggctggcggctgttcaagaagatctcctagctagcaccagcctcaagaacacccgaatggagtctctaagctacataataccaacttacactttacaaaatgttgtcccccaaaatgtagccattcgtatctgctcctaataaaaagaaagtttcttcacattctctcgagaaaaaaaaaaaatggaaaaaaaaaaaacggaaaaaaaaaaaaggtaaaaaaaaaaaatataaaaaaaaaaaacataaaaaaaaaaaacgaaaaaaaaaaaacgtaaaaaaaaaaaactcaaaaaaaaaaaagataaaaaaaaaaaacctaaaaaaaaaaaatgtaaaaaaaaaaaagggaaaaaaaaaaaacgcaaaaaaaaaaaacacaaaaaaaaaaaatgcaaaaaaaaaaaatcgaaaaaaaaaaaatctaaaaaaaaaaaacgaaaaaaaaaaaacccaaaaaaaaaaaagacaaaaaaaaaaaatagaaaaaaaaaaagttaaaaaaaaaaaactgaaaaaaaaaaaatttaaaaaaaaaaaatctag

SEQ ID NO: 2571 - DNA, 6526 bp, synthetic construct
  misc_feature 1..6526: note = Synthetic
  source 1..6526: mol_type = other DNA
aggaagctcagaataaacgctcaactttggccggatctgccaccatgaagcggaccgccgacggctccgagttcgagtcccccaagaagaagcggaaggtggacaagaagtactccatcggcctggacatcggcaccaactccgtgggctgggccgtgatcaccgacgagtacaaggtgccctccaagaagttcaaggtgctgggcaacaccgaccggcactccatcaagaagaacctgatcggcgccctgctgttcgactccggcgagaccgccgaggccacccggctgaagcggaccgcccggcggcggtacacccggcggaagaaccggatctgctacctgcaggagatcttctccaacgagatggccaaggtggacgactccttcttccaccggctggaggagtccttcctggtggaggaggacaagaagcacgagcggcaccccatcttcggcaacatcgtggacgaggtggcctaccacgagaagtaccccaccatctaccacctgcggaagaagctggtggactccaccgacaaggccgacctgcggctgatctacctggccctggcccacatgatcaagttccggggccacttcctgatcgagggcgacctgaaccccgacaactccgacgtggacaagctgttcatccagctggtgcagacctacaaccagctgttcgaggagaaccccatcaacgcctccggcgtggacgccaaggccatcctgtccgcccggctgtccaagtcccggcggctggagaacctgatcgcccagctgcccggcgagaagaagaacggcctgttcggcaacctgatcgccctgtccctgggcctgacccccaacttcaagtccaacttcgacctggccgaggacgccaagctgcagctgtccaaggacacctacgacgacgacctggacaacctgctggcccagatcggcgaccagtacgccgacctgttcctggccgccaagaacctgtccgacgccatcctgctgtccgacatcctgcgggtgaacaccgagatcaccaaggcccccctgtccgcctccatgatcaagcggtacgacgagcaccaccaggacctgaccctgctgaaggccctggtgcggcagcagctgcccgagaagtacaaggagatcttcttcgaccagtccaagaacggctacgccggctacatcgacggcggcgcctcccaggaggagttctacaagttcatcaagcccatcctggagaagatggacggcaccgaggagctgctggtgaagctgaaccgggaggacctgctgcggaagcagcggaccttcgacaacggctccatcccccaccagatccacctgggcgagctgcacgccatcctgcggcggcaggaggacttctaccccttcctgaaggacaaccgggagaagatcgagaagatcctgaccttccggatcccctactacgtgggccccctggcccggggcaactcccggttcgcctggatgacccggaagtccgaggagaccatcaccccctggaacttcgaggaggtggtggacaagggcgcctccgcccagtccttcatcgagcggatgaccaacttcgacaagaacctgcccaacgagaaggtgctgcccaagcactccctgctgtacgagtacttcaccgtgtacaacgagctgaccaaggtgaagtacgtgaccgagggcatgcggaagcccgccttcctgtccggcgagcagaagaaggccatcgtggacctgctgttcaagaccaaccggaaggtgaccgtgaagcagctgaaggaggactacttcaagaagatcgagtgcttcgactccgtggagatctccggcgtggaggaccggttcaacgcctccctgggcacctaccacgacctgctgaagatcatcaaggacaaggacttcctggacaacgaggagaacgaggacatcctggaggacatcgtgctgaccctgaccctgttcgaggaccgggagatgatcgaggagcggctgaagacctacgcccacctgttcgacgacaaggtgatgaagcagctgaagcggcggcggtacaccggctggggccggctgtcccggaagctgatcaacggcatccgggacaagcagtccggcaagaccatcctggacttcctgaagtccgacggcttcgccaaccggaacttcatgcagctgatccacgacgactccctgaccttcaaggaggacatccagaaggcccaggtgtccggccagggcgactccctgcacgagcacatcgccaacctggccggctcccccgccatcaagaagggcatcctgcagaccgtgaaggtggtggacgagctggtgaaggtgatgggccggcacaagcccgagaacatcgtgatcgagatggcccgggagaaccagaccacccagaagggccagaagaactcccgggagcggatgaagcggatcgaggagggcatcaaggagctgggctcccagatcctgaaggagcaccccgtggagaacacccagctgcagaacgagaagctgtacctgtactacctgcagaacggccgggacatgtacgtggaccaggagctggacatcaaccggctgtccgactacgacgtggacaagatcgtgccccagtccttcctgaaggacgactccatcgacaacaaggtgctgacccggtccgacaagaaccggggcaagtccgacaacgtgccctccgaggaggtggtgaagaagatgaagaactactggcggcagctgctgaacgccaagctgatcacccagcggaagttcgacaacctgaccaaggccgagcggggcggcctgtccgagctggacaaggccggcttcatcaagcggcagctggtggagacccggcagatcaccaagcacgtggcccagatcctggactcccggatgaacaccaagtacgacgagaacgacaagctgatccgggaggtgaaggtgatcaccctgaagtccaagctggtgtccgacttccggaaggacttccagttctacaaggtgcgggagatcaacaactaccaccacgcccacgacgcctacctgaacgccgtggtgggcaccgccctgatcaagaagtaccccaagctggagtccgagttcgtgtacggcgactacaaggtgtacgacgtgcggaagatgatcgccaagtccgagcaggagatcggcaaggccaccgccaagtacttcttctactccaacatcatgaacttcttcaagaccgagatcaccctggccaacggcgagatccggaagcggcccctgatcgagaccaacggcgagaccggcgagatcgtgtgggacaagggccgggacttcgccaccgtgcggaaggtgctgtccatgccccaggtgaacatcgtgaagaagaccgaggtgcagaccggcggcttctccaaggagtccatcctgcccaagcggaactccgacaagctgatcgcccggaagaaggactgggaccccaagaagtacggcggcttcgactcccccaccgtggcctactccgtgctggtggtggccaaggtggagaagggcaagtccaagaagctgaagtccgtgaaggagctgctgggcatcaccatcatggagcggtcctccttcgagaagaaccccatcgacttcctggaggccaagggctacaaggaggtgaagaaggacctgatcatcaagctgcccaagtactccctgttcgagctggagaacggccggaagcggatgctggcctccgccggcgagctgcagaagggcaacgagctggccctgccctccaagtacgtgaacttcctgtacctggcctcccactacgagaagctgaagggctcccccgaggacaacgagcagaagcagctgttcgtggagcagcacaagcactacctggacgagatcatcgagcagatctccgagttctccaagcgggtgatcctggccgacgccaacctggacaaggtgctgtccgcctacaacaagcaccgggacaagcccatccgggagcaggccgagaacatcatccacctgttcaccctgaccaacctgggcgcccccgccgccttcaagtacttcgacaccaccatcgaccggaagcggtacacctccaccaaggaggtgctggacgccaccctgatccaccagtccatcaccggcctgtacgagacccggatcgacctgtcccagctgggcggcgactccggcggctcctccggcggctccaagcggaccgccgacggctccgagttcgagtcccccaagaagaagcggaaggtgtccggcggctcctccggcggctccatggactccaccaaggagaagtgcgactcctacaaggacgacctgctgctgcggatgggcctgaacgacaacaaggccggcatggagggcctggacaaggagaagatcaacaagatcatcatggaggccaccaagggctcccggttctacggcaacgagctgaagaaggagaagcaggtgaaccagcggatcgagaacatgatgcagcagaaggcccagatcacctcccagcagctgcggaaggcccagctgcaggtggaccggttcgccatggagctggagcagtcccggaacctgtccaacaccatcgtgcacatcgacatggacgccttctacgccgccgtggagatgcgggacaaccccgagctgaaggacaagcccatcgccgtgggctccatgtccatgctgtccacctccaactaccacgcccggcggttcggcgtgcgggccgccatgcccggcttcatcgccaagcggctgtgcccccagctgatcatcgtgccccccaacttcgacaagtaccgggccgtgtccaaggaggtgaaggagatcctggccgactacgaccccaacttcatggccatgtccctggacgaggcctacctgaacatcaccaagcacctggaggagcggcagaactggcccgaggacaagcggcggtacttcatcaagatgggctcctccgtggagaacgacaaccccggcaaggaggtgaacaagctgtccgagcacgagcggtccatctcccccctgctgttcgaggagtccccctccgacgtgcagccccccggcgaccccttccaggtgaacttcgaggagcagaacaacccccagatcctgcagaactccgtggtgttcggcacctccgcccaggaggtggtgaaggagatccggttccggatcgagcagaagaccaccctgaccgcctccgccggcatcgcccccaacaccatgctggccaaggtgtgctccgacaagaacaagcccaacggccagtaccagatcctgcccaaccggcaggccgtgatggacttcatcaaggacctgcccatccggaaggtgtccggcatcggcaaggtgaccgagaagatgctgaaggccctgggcatcatcacctgcaccgagctgtaccagcagcgggccctgctgtccctgctgttctccgagacctcctggcactacttcctgcacatctccctgggcctgggctccacccacctgacccgggaccgggtgcggaagtccatgtccgtggagcggaccttctccgagatcaacaaggccgaggagcagtactccctgtgccaggagctgtgctccgagctggcccaggacctgcagaaggagcggctgaagggccggaccgtgaccatcaagctgaagaacgtgaacttcgaggtgaagacccgggcctccaccgtgtcctccgtggtgtccaccgccgaggagatcttcgccatcgccaaggagctgctgaagaccgagatcgacgccgacttcccccaccccctgcggctgcggctgatgggcgtgcggatctcctccttccccaacgaggaggaccggaagcaccagcagggcggcggctccggcaagcggaccgccgacggctccggcggcggctcccccaagaagaagcggaaggtgtccgagtccgccacccccgagtccgtgtccggctggcggctgttcaagaagatctcctagctagcaccagcctcaagaacacccgaatggagtctctaagctacataataccaacttacactttacaaaatgttgtcccccaaaatgtagccattcgtatctgctcctaataaaaagaaagtttcttcacattctctcgagaaaaaaaaaaaatggaaaaaaaaaaaacggaaaaaaaaaaaaggtaaaaaaaaaaaatataaaaaaaaaaaacataaaaaaaaaaaacgaaaaaaaaaaaacgtaaaaaaaaaaaactcaaaaaaaaaaaagataaaaaaaaaaaacctaaaaaaaaaaaatgtaaaaaaaaaaaagggaaaaaaaaaaaacgcaaaaaaaaaaaacacaaaaaaaaaaaatgcaaaaaaaaaaaatcgaaaaaaaaaaaatctaaaaaaaaaaaacgaaaaaaaaaaaacccaaaaaaaaaaaagacaaaaaaaaaaaatagaaaaaaaaaaagttaaaaaaaaaaaactgaaaaaaaaaaaatttaaaaaaaaaaaatctag

SEQ ID NO: 2572 - DNA, 6526 bp, synthetic construct
  misc_feature 1..6526: note = Synthetic
  source 1..6526: mol_type = other DNA
aggaagctcagaataaacgctcaactttggccggatctgccaccatgaagcggaccgccgacggctccgagttcgagtcccccaagaagaagcggaaggtggacaagaagtactccatcggcctggacatcggcaccaactccgtgggctgggccgtgatcaccgacgagtacaaggtgccctccaagaagttcaaggtgctgggcaacaccgaccggcactccatcaagaagaacctgatcggcgccctgctgttcgactccggcgagaccgccgaggccacccggctgaagcggaccgcccggcggcggtacacccggcggaagaaccggatctgctacctgcaggagatcttctccaacgagatggccaaggtggacgactccttcttccaccggctggaggagtccttcctggtggaggaggacaagaagcacgagcggcaccccatcttcggcaacatcgtggacgaggtggcctaccacgagaagtaccccaccatctaccacctgcggaagaagctggtggactccaccgacaaggccgacctgcggctgatctacctggccctggcccacatgatcaagttccggggccacttcctgatcgagggcgacctgaaccccgacaactccgacgtggacaagctgttcatccagctggtgcagacctacaaccagctgttcgaggagaaccccatcaacgcctccggcgtggacgccaaggccatcctgtccgcccggctgtccaagtcccggcggctggagaacctgatcgcccagctgcccggcgagaagaagaacggcctgttcggcaacctgatcgccctgtccctgggcctgacccccaacttcaagtccaacttcgacctggccgaggacgccaagctgcagctgtccaaggacacctacgacgacgacctggacaacctgctggcccagatcggcgaccagtacgccgacctgttcctggccgccaagaacctgtccgacgccatcctgctgtccgacatcctgcgggtgaacaccgagatcaccaaggcccccctgtccgcctccatgatcaagcggtacgacgagcaccaccaggacctgaccctgctgaaggccctggtgcggcagcagctgcccgagaagtacaaggagatcttcttcgaccagtccaagaacggctacgccggctacatcgacggcggcgcctcccaggaggagttctacaagttcatcaagcccatcctggagaagatggacggcaccgaggagctgctggtgaagctgaaccgggaggacctgctgcggaagcagcggaccttcgacaacggctccatcccccaccagatccacctgggcgagctgcacgccatcctgcggcggcaggaggacttctaccccttcctgaaggacaaccgggagaagatcgagaagatcctgaccttccggatcccctactacgtgggccccctggcccggggcaactcccggttcgcctggatgacccggaagtccgaggagaccatcaccccctggaacttcgaggaggtggtggacaagggcgcctccgcccagtccttcatcgagcggatgaccaacttcgacaagaacctgcccaacgagaaggtgctgcccaagcactccctgctgtacgagtacttcaccgtgtacaacgagctgaccaaggtgaagtacgtgaccgagggcatgcggaagcccgccttcctgtccggcgagcagaagaaggccatcgtggacctgctgttcaagaccaaccggaaggtgaccgtgaagcagctgaaggaggactacttcaagaagatcgagtgcttcgactccgtggagatctccggcgtggaggaccggttcaacgcctccctgggcacctaccacgacctgctgaagatcatcaaggacaaggacttcctggacaacgaggagaacgaggacatcctggaggacatcgtgctgaccctgaccctgttcgaggaccgggagatgatcgaggagcggctgaagacctacgcccacctgttcgacgacaaggtgatgaagcagctgaagcggcggcggtacaccggctggggccggctgtcccggaagctgatcaacggcatccgggacaagcagtccggcaagaccatcctggacttcctgaagtccgacggcttcgccaaccggaacttcatgcagctgatccacgacgactccctgaccttcaaggaggacatccagaaggcccaggtgtccggccagggcgactccctgcacgagcacatcgccaacctggccggctcccccgccatcaagaagggcatcctgcagaccgtgaaggtggtggacgagctggtgaaggtgatgggccggcacaagcccgagaacatcgtgatcgagatggcccgggagaaccagaccacccagaagggccagaagaactcccgggagcggatgaagcggatcgaggagggcatcaaggagctgggctcccagatcctgaaggagcaccccgtggagaacacccagctgcagaacgagaagctgtacctgtactacctgcagaacggccgggacatgtacgtggaccaggagctggacatcaaccggctgtccgactacgacgtggacaacatcgtgccccagtccttcctgaaggacgactccatcgacaacaaggtgctgacccggtccgacaagaaccggggcaagtccgacaacgtgccctccgaggaggtggtgaagaagatgaagaactactggcggcagctgctgaacgccaagctgatcacccagcggaagttcgacaacctgaccaaggccgagcggggcggcctgtccgagctggacaaggccggcttcatcaagcggcagctggtggagacccggcagatcaccaagcacgtggcccagatcctggactcccggatgaacaccaagtacgacgagaacgacaagctgatccgggaggtgaaggtgatcaccctgaagtccaagctggtgtccgacttccggaaggacttccagttctacaaggtgcgggagatcaacaactaccaccacgcccacgacgcctacctgaacgccgtggtgggcaccgccctgatcaagaagtaccccaagctggagtccgagttcgtgtacggcgactacaaggtgtacgacgtgcggaagatgatcgccaagtccgagcaggagatcggcaaggccaccgccaagtacttcttctactccaacatcatgaacttcttcaagaccgagatcaccctggccaacggcgagatccggaagcggcccctgatcgagaccaacggcgagaccggcgagatcgtgtgggacaagggccgggacttcgccaccgtgcggaaggtgctgtccatgccccaggtgaacatcgtgaagaagaccgaggtgcagaccggcggcttctccaaggagtccatcctgcccaagcggaactccgacaagctgatcgcccggaagaaggactgggaccccaagaagtacggcggcttcgactcccccaccgtggcctactccgtgctggtggtggccaaggtggagaagggcaagtccaagaagctgaagtccgtgaaggagctgctgggcatcaccatcatggagcggtcctccttcgagaagaaccccatcgacttcctggaggccaagggctacaaggaggtgaagaaggacctgatcatcaagctgcccaagtactccctgttcgagctggagaacggccggaagcggatgctggcctccgccggcgagctgcagaagggcaacgagctggccctgccctccaagtacgtgaacttcctgtacctggcctcccactacgagaagctgaagggctcccccgaggacaacgagcagaagcagctgttcgtggagcagcacaagcactacctggacgagatcatcgagcagatctccgagttctccaagcgggtgatcctggccgacgccaacctggacaaggtgctgtccgcctacaacaagcaccgggacaagcccatccgggagcaggccgagaacatcatccacctgttcaccctgaccaacctgggcgcccccgccgccttcaagtacttcgacaccaccatcgaccggaagcggtacacctccaccaaggaggtgctggacgccaccctgatccaccagtccatcaccggcctgtacgagacccggatcgacctgtcccagctgggcggcgactccggcggctcctccggcggctccaagcggaccgccgacggctccgagttcgagtcccccaagaagaagcggaaggtgtccggcggctcctccggcggctccatggactccaccaaggagaagtgcgactcctacaaggacgacctgctgctgcggatgggcctgaacgacaacaaggccggcatggagggcctggacaaggagaagatcaacaagatcatcatggaggccaccaagggctcccggttctacggcaacgagctgaagaaggagaagcaggtgaaccagcggatcgagaacatgatgcagcagaaggcccagatcacctcccagcagctgcggaaggcccagctgcaggtggaccggttcgccatggagctggagcagtcccggaacctgtccaacaccatcgtgcacatcgacatggacgccttctacgccgccgtggagatgcgggacaaccccgagctgaaggacaagcccatcgccgtgggctccatgtccatgctgtccacctccaactaccacgcccggcggttcggcgtgcgggccgccatgcccggcttcatcgccaagcggctgtgcccccagctgatcatcgtgccccccaacttcgacaagtaccgggccgtgtccaaggaggtgaaggagatcctggccgactacgaccccaacttcatggccatgtccctggacgaggcctacctgaacatcaccaagcacctggaggagcggcagaactggcccgaggacaagcggcggtacttcatcaagatgggctcctccgtggagaacgacaaccccggcaaggaggtgaacaagctgtccgagcacgagcggtccatctcccccctgctgttcgaggagtccccctccgacgtgcagccccccggcgaccccttccaggtgaacttcgaggagcagaacaacccccagatcctgcagaactccgtggtgttcggcacctccgcccaggaggtggtgaaggagatccggttccggatcgagcagaagaccaccctgaccgcctccgccggcatcgcccccaacaccatgctggccaaggtgtgctccgacaagaacaagcccaacggccagtaccagatcctgcccaaccggcaggccgtgatggacttcatcaaggacctgcccatccggaaggtgtccggcatcggcaaggtgaccgagaagatgctgaaggccctgggcatcatcacctgcaccgagctgtaccagcagcgggccctgctgtccctgctgttctccgagacctcctggcactacttcctgcacatctccctgggcctgggctccacccacctgacccgggaccgggtgcggaagtccatgtccgtggagcggaccttctccgagatcaacaaggccgaggagcagtactccctgtgccaggagctgtgctccgagctggcccaggacctgcagaaggagcggctgaagggccggaccgtgaccatcaagctgaagaacgtgaacttcgaggtgaagacccgggcctccaccgtgtcctccgtggtgtccaccgccgaggagatcttcgccatcgccaaggagctgctgaagaccgagatcgacgccgacttcccccaccccctgcggctgcggctgatgggcgtgcggatctcctccttccccaacgaggaggaccggaagcaccagcagggcggcggctccggcaagcggaccgccgacggctccggcggcggctcccccaagaagaagcggaaggtgtccgagtccgccacccccgagtccgtgtccggctggcggctgttcaagaagatctcctagctagcaccagcctcaagaacacccgaatggagtctctaagctacataataccaacttacactttacaaaatgttgtcccccaaaatgtagccattcgtatctgctcctaataaaaagaaagtttcttcacattctctcgagaaaaaaaaaaaatggaaaaaaaaaaaacggaaaaaaaaaaaaggtaaaaaaaaaaaatataaaaaaaaaaaacataaaaaaaaaaaacgaaaaaaaaaaaacgtaaaaaaaaaaaactcaaaaaaaaaaaagataaaaaaaaaaaacctaaaaaaaaaaaatgtaaaaaaaaaaaagggaaaaaaaaaaaacgcaaaaaaaaaaaacacaaaaaaaaaaaatgcaaaaaaaaaaaatcgaaaaaaaaaaaatctaaaaaaaaaaaacgaaaaaaaaaaaacccaaaaaaaaaaaagacaaaaaaaaaaaatagaaaaaaaaaaagttaaaaaaaaaaaactgaaaaaaaaaaaatttaaaaaaaaaaaatctag

SEQ ID NO: 2573 - DNA, 6526 bp, synthetic construct
  misc_feature 1..6526: note = Synthetic
  source 1..6526: mol_type = other DNA
aggaagctcagaataaacgctcaactttggccggatctgccaccatgaagcggaccgccgacggctccgagttcgagtcccccaagaagaagcggaaggtggacaagaagtactccatcggcctggacatcggcaccaactccgtgggctgggccgtgatcaccgacgagtacaaggtgccctccaagaagttcaaggtgctgggcaacaccgaccggcactccatcaagaagaacctgatcggcgccctgctgttcgactccggcgagaccgccgaggccacccggctgaagcggaccgcccggcggcggtacacccggcggaagaaccggatctgctacctgcaggagatcttctccaacgagatggccaaggtggacgactccttcttccaccggctggaggagtccttcctggtggaggaggacaagaagcacgagcggcaccccatcttcggcaacatcgtggacgaggtggcctaccacgagaagtaccccaccatctaccacctgcggaagaagctggtggactccaccgacaaggccgacctgcggctgatctacctggccctggcccacatgatcaagttccggggccacttcctgatcgagggcgacctgaaccccgacaactccgacgtggacaagctgttcatccagctggtgcagacctacaaccagctgttcgaggagaaccccatcaacgcctccggcgtggacgccaaggccatcctgtccgcccggctgtccaagtcccggcggctggagaacctgatcgcccagctgcccggcgagaagaagaacggcctgttcggcaacctgatcgccctgtccctgggcctgacccccaacttcaagtccaacttcgacctggccgaggacgccaagctgcagctgtccaaggacacctacgacgacgacctggacaacctgctggcccagatcggcgaccagtacgccgacctgttcctggccgccaagaacctgtccgacgccatcctgctgtccgacatcctgcgggtgaacaccgagatcaccaaggcccccctgtccgcctccatgatcaagcggtacgacgagcaccaccaggacctgaccctgctgaaggccctggtgcggcagcagctgcccgagaagtacaaggagatcttcttcgaccagtccaagaacggctacgccggctacatcgacggcggcgcctcccaggaggagttctacaagttcatcaagcccatcctggagaagatggacggcaccgaggagctgctggtgaagctgaaccgggaggacctgctgcggaagcagcggaccttcgacaacggctccatcccccaccagatccacctgggcgagctgcacgccatcctgcggcggcaggaggacttctaccccttcctgaaggacaaccgggagaagatcgagaagatcctgaccttccggatcccctactacgtgggccccctggcccggggcaactcccggttcgcctggatgacccggaagtccgaggagaccatcaccccctggaacttcgaggaggtggtggacaagggcgcctccgcccagtccttcatcgagcggatgaccaacttcgacaagaacctgcccaacgagaaggtgctgcccaagcactccctgctgtacgagtacttcaccgtgtacaacgagctgaccaaggtgaagtacgtgaccgagggcatgcggaagcccgccttcctgtccggcgagcagaagaaggccatcgtggacctgctgttcaagaccaaccggaaggtgaccgtgaagcagctgaaggaggactacttcaagaagatcgagtgcttcgactccgtggagatctccggcgtggaggaccggttcaacgcctccctgggcacctaccacgacctgctgaagatcatcaaggacaaggacttcctggacaacgaggagaacgaggacatcctggaggacatcgtgctgaccctgaccctgttcgaggaccgggagatgatcgaggagcggctgaagacctacgcccacctgttcgacgacaaggtgatgaagcagctgaagcggcggcggtacaccggctggggccggctgtcccggaagctgatcaacggcatccgggacaagcagtccggcaagaccatcctggacttcctgaagtccgacggcttcgccaaccggaacttcatgcagctgatccacgacgactccctgaccttcaaggaggacatccagaaggcccaggtgtccggccagggcgactccctgcacgagcacatcgccaacctggccggctcccccgccatcaagaagggcatcctgcagaccgtgaaggtggtggacgagctggtgaaggtgatgggccggcacaagcccgagaacatcgtgatcgagatggcccgggagaaccagaccacccagaagggccagaagaactcccgggagcggatgaagcggatcgaggagggcatcaaggagctgggctcccagatcctgaaggagcaccccgtggagaacacccagctgcagaacgagaagctgtacctgtactacctgcagaacggccgggacatgtacgtggaccaggagctggacatcaaccggctgtccgactacgacgtggaccaaatcgtgccccagtccttcctgaaggacgactccatcgacaacaaggtgctgacccggtccgacaagaaccggggcaagtccgacaacgtgccctccgaggaggtggtgaagaagatgaagaactactggcggcagctgctgaacgccaagctgatcacccagcggaagttcgacaacctgaccaaggccgagcggggcggcctgtccgagctggacaaggccggcttcatcaagcggcagctggtggagacccggcagatcaccaagcacgtggcccagatcctggactcccggatgaacaccaagtacgacgagaacgacaagctgatccgggaggtgaaggtgatcaccctgaagtccaagctggtgtccgacttccggaaggacttccagttctacaaggtgcgggagatcaacaactaccaccacgcccacgacgcctacctgaacgccgtggtgggcaccgccctgatcaagaagtaccccaagctggagtccgagttcgtgtacggcgactacaaggtgtacgacgtgcggaagatgatcgccaagtccgagcaggagatcggcaaggccaccgccaagtacttcttctactccaacatcatgaacttcttcaagaccgagatcaccctggccaacggcgagatccggaagcggcccctgatcgagaccaacggcgagaccggcgagatcgtgtgggacaagggccgggacttcgccaccgtgcggaaggtgctgtccatgccccaggtgaacatcgtgaagaagaccgaggtgcagaccggcggcttctccaaggagtccatcctgcccaagcggaactccgacaagctgatcgcccggaagaaggactgggaccccaagaagtacggcggcttcgactcccccaccgtggcctactccgtgctggtggtggccaaggtggagaagggcaagtccaagaagctgaagtccgtgaaggagctgctgggcatcaccatcatggagcggtcctccttcgagaagaaccccatcgacttcctggaggccaagggctacaaggaggtgaagaaggacctgatcatcaagctgcccaagtactccctgttcgagctggagaacggccggaagcggatgctggcctccgccggcgagctgcagaagggcaacgagctggccctgccctccaagtacgtgaacttcctgtacctggcctcccactacgagaagctgaagggctcccccgaggacaacgagcagaagcagctgttcgtggagcagcacaagcactacctggacgagatcatcgagcagatctccgagttctccaagcgggtgatcctggccgacgccaacctggacaaggtgctgtccgcctacaacaagcaccgggacaagcccatccgggagcaggccgagaacatcatccacctgttcaccctgaccaacctgggcgcccccgccgccttcaagtacttcgacaccaccatcgaccggaagcggtacacctccaccaaggaggtgctggacgccaccctgatccaccagtccatcaccggcctgtacgagacccggatcgacctgtcccagctgggcggcgactccggcggctcctccggcggctccaagcggaccgccgacggctccgagttcgagtcccccaagaagaagcggaaggtgtccggcggctcctccggcggctccatggactccaccaaggagaagtgcgactcctacaaggacgacctgctgctgcggatgggcctgaacgacaacaaggccggcatggagggcctggacaaggagaagatcaacaagatcatcatggaggccaccaagggctcccggttctacggcaacgagctgaagaaggagaagcaggtgaaccagcggatcgagaacatgatgcagcagaaggcccagatcacctcccagcagctgcggaaggcccagctgcaggtggaccggttcgccatggagctggagcagtcccggaacctgtccaacaccatcgtgcacatcgacatggacgccttctacgccgccgtggagatgcgggacaaccccgagctgaaggacaagcccatcgccgtgggctccatgtccatgctgtccacctccaactaccacgcccggcggttcggcgtgcgggccgccatgcccggcttcatcgccaagcggctgtgcccccagctgatcatcgtgccccccaacttcgacaagtaccgggccgtgtccaaggaggtgaaggagatcctggccgactacgaccccaacttcatggccatgtccctggacgaggcctacctgaacatcaccaagcacctggaggagcggcagaactggcccgaggacaagcggcggtacttcatcaagatgggctcctccgtggagaacgacaaccccggcaaggaggtgaacaagctgtccgagcacgagcggtccatctcccccctgctgttcgaggagtccccctccgacgtgcagccccccggcgaccccttccaggtgaacttcgaggagcagaacaacccccagatcctgcagaactccgtggtgttcggcacctccgcccaggaggtggtgaaggagatccggttccggatcgagcagaagaccaccctgaccgcctccgccggcatcgcccccaacaccatgctggccaaggtgtgctccgacaagaacaagcccaacggccagtaccagatcctgcccaaccggcaggccgtgatggacttcatcaaggacctgcccatccggaaggtgtccggcatcggcaaggtgaccgagaagatgctgaaggccctgggcatcatcacctgcaccgagctgtaccagcagcgggccctgctgtccctgctgttctccgagacctcctggcactacttcctgcacatctccctgggcctgggctccacccacctgacccgggaccgggtgcggaagtccatgtccgtggagcggaccttctccgagatcaacaaggccgaggagcagtactccctgtgccaggagctgtgctccgagctggcccaggacctgcagaaggagcggctgaagggccggaccgtgaccatcaagctgaagaacgtgaacttcgaggtgaagacccgggcctccaccgtgtcctccgtggtgtccaccgccgaggagatcttcgccatcgccaaggagctgctgaagaccgagatcgacgccgacttcccccaccccctgcggctgcggctgatgggcgtgcggatctcctccttccccaacgaggaggaccggaagcaccagcagggcggcggctccggcaagcggaccgccgacggctccggcggcggctcccccaagaagaagcggaaggtgtccgagtccgccacccccgagtccgtgtccggctggcggctgttcaagaagatctcctagctagcaccagcctcaagaacacccgaatggagtctctaagctacataataccaacttacactttacaaaatgttgtcccccaaaatgtagccattcgtatctgctcctaataaaaagaaagtttcttcacattctctcgagaaaaaaaaaaaatggaaaaaaaaaaaacggaaaaaaaaaaaaggtaaaaaaaaaaaatataaaaaaaaaaaacataaaaaaaaaaaacgaaaaaaaaaaaacgtaaaaaaaaaaaactcaaaaaaaaaaaagataaaaaaaaaaaacctaaaaaaaaaaaatgtaaaaaaaaaaaagggaaaaaaaaaaaacgcaaaaaaaaaaaacacaaaaaaaaaaaatgcaaaaaaaaaaaatcgaaaaaaaaaaaatctaaaaaaaaaaaacgaaaaaaaaaaaacccaaaaaaaaaaaagacaaaaaaaaaaaatagaaaaaaaaaaagttaaaaaaaaaaaactgaaaaaaaaaaaatttaaaaaaaaaaaatctag

SEQ ID NO: 2574 - DNA, 6526 bp, synthetic construct
  misc_feature 1..6526: note = Synthetic
  source 1..6526: mol_type = other DNA
aggaagctcagaataaacgctcaactttggccggatctgccaccatgaagcggaccgccgacggctccgagttcgagtcccccaagaagaagcggaaggtggacaagaagtactccatcggcctggacatcggcaccaactccgtgggctgggccgtgatcaccgacgagtacaaggtgccctccaagaagttcaaggtgctgggcaacaccgaccggcactccatcaagaagaacctgatcggcgccctgctgttcgactccggcgagaccgccgaggccacccggctgaagcggaccgcccggcggcggtacacccggcggaagaaccggatctgctacctgcaggagatcttctccaacgagatggccaaggtggacgactccttcttccaccggctggaggagtccttcctggtggaggaggacaagaagcacgagcggcaccccatcttcggcaacatcgtggacgaggtggcctaccacgagaagtaccccaccatctaccacctgcggaagaagctggtggactccaccgacaaggccgacctgcggctgatctacctggccctggcccacatgatcaagttccggggccacttcctgatcgagggcgacctgaaccccgacaactccgacgtggacaagctgttcatccagctggtgcagacctacaaccagctgttcgaggagaaccccatcaacgcctccggcgtggacgccaaggccatcctgtccgcccggctgtccaagtcccggcggctggagaacctgatcgcccagctgcccggcgagaagaagaacggcctgttcggcaacctgatcgccctgtccctgggcctgacccccaacttcaagtccaacttcgacctggccgaggacgccaagctgcagctgtccaaggacacctacgacgacgacctggacaacctgctggcccagatcggcgaccagtacgccgacctgttcctggccgccaagaacctgtccgacgccatcctgctgtccgacatcctgcgggtgaacaccgagatcaccaaggcccccctgtccgcctccatgatcaagcggtacgacgagcaccaccaggacctgaccctgctgaaggccctggtgcggcagcagctgcccgagaagtacaaggagatcttcttcgaccagtccaagaacggctacgccggctacatcgacggcggcgcctcccaggaggagttctacaagttcatcaagcccatcctggagaagatggacggcaccgaggagctgctggtgaagctgaaccgggaggacctgctgcggaagcagcggaccttcgacaacggctccatcccccaccagatccacctgggcgagctgcacgccatcctgcggcggcaggaggacttctaccccttcctgaaggacaaccgggagaagatcgagaagatcctgaccttccggatcccctactacgtgggccccctggcccggggcaactcccggttcgcctggatgacccggaagtccgaggagaccatcaccccctggaacttcgaggaggtggtggacaagggcgcctccgcccagtccttcatcgagcggatgaccaacttcgacaagaacctgcccaacgagaaggtgctgcccaagcactccctgctgtacgagtacttcaccgtgtacaacgagctgaccaaggtgaagtacgtgaccgagggcatgcggaagcccgccttcctgtccggcgagcagaagaaggccatcgtggacctgctgttcaagaccaaccggaaggtgaccgtgaagcagctgaaggaggactacttcaagaagatcgagtgcttcgactccgtggagatctccggcgtggaggaccggttcaacgcctccctgggcacctaccacgacctgctgaagatcatcaaggacaaggacttcctggacaacgaggagaacgaggacatcctggaggacatcgtgctgaccctgaccctgttcgaggaccgggagatgatcgaggagcggctgaagacctacgcccacctgttcgacgacaaggtgatgaagcagctgaagcggcggcggtacaccggctggggccggctgtcccggaagctgatcaacggcatccgggacaagcagtccggcaagaccatcctggacttcctgaagtccgacggcttcgccaaccggaacttcatgcagctgatccacgacgactccctgaccttcaaggaggacatccagaaggcccaggtgtccggccagggcgactccctgcacgagcacatcgccaacctggccggctcccccgccatcaagaagggcatcctgcagaccgtgaaggtggtggacgagctggtgaaggtgatgggccggcacaagcccgagaacatcgtgatcgagatggcccgggagaaccagaccacccagaagggccagaagaactcccgggagcggatgaagcggatcgaggagggcatcaaggagctgggctcccagatcctgaaggagcaccccgtggagaacacccagctgcagaacgagaagctgtacctgtactacctgcagaacggccgggacatgtacgtggaccaggagctggacatcaaccggctgtccgactacgacgtggaccgcatcgtgccccagtccttcctgaaggacgactccatcgacaacaaggtgctgacccggtccgacaagaaccggggcaagtccgacaacgtgccctccgaggaggtggtgaagaagatgaagaactactggcggcagctgctgaacgccaagctgatcacccagcggaagttcgacaacctgaccaaggccgagcggggcggcctgtccgagctggacaaggccggcttcatcaagcggcagctggtggagacccggcagatcaccaagcacgtggcccagatcctggactcccggatgaacaccaagtacgacgagaacgacaagctgatccgggaggtgaaggtgatcaccctgaagtccaagctggtgtccgacttccggaaggacttccagttctacaaggtgcgggagatcaacaactaccaccacgcccacgacgcctacctgaacgccgtggtgggcaccgccctgatcaagaagtaccccaagctggagtccgagttcgtgtacggcgactacaaggtgtacgacgtgcggaagatgatcgccaagtccgagcaggagatcggcaaggccaccgccaagtacttcttctactccaacatcatgaacttcttcaagaccgagatcaccctggccaacggcgagatccggaagcggcccctgatcgagaccaacggcgagaccggcgagatcgtgtgggacaagggccgggacttcgccaccgtgcggaaggtgctgtccatgccccaggtgaacatcgtgaagaagaccgaggtgcagaccggcggcttctccaaggagtccatcctgcccaagcggaactccgacaagctgatcgcccggaagaaggactgggaccccaagaagtacggcggcttcgactcccccaccgtggcctactccgtgctggtggtggccaaggtggagaagggcaagtccaagaagctgaagtccgtgaaggagctgctgggcatcaccatcatggagcggtcctccttcgagaagaaccccatcgacttcctggaggccaagggctacaaggaggtgaagaaggacctgatcatcaagctgcccaagtactccctgttcgagctggagaacggccggaagcggatgctggcctccgccggcgagctgcagaagggcaacgagctggccctgccctccaagtacgtgaacttcctgtacctggcctcccactacgagaagctgaagggctcccccgaggacaacgagcagaagcagctgttcgtggagcagcacaagcactacctggacgagatcatcgagcagatctccgagttctccaagcgggtgatcctggccgacgccaacctggacaaggtgctgtccgcctacaacaagcaccgggacaagcccatccgggagcaggccgagaacatcatccacctgttcaccctgaccaacctgggcgcccccgccgccttcaagtacttcgacaccaccatcgaccggaagcggtacacctccaccaaggaggtgctggacgccaccctgatccaccagtccatcaccggcctgtacgagacccggatcgacctgtcccagctgggcggcgactccggcggctcctccggcggctccaagcggaccgccgacggctccgagttcgagtcccccaagaagaagcggaaggtgtccggcggctcctccggcggctccatggactccaccaaggagaagtgcgactcctacaaggacgacctgctgctgcggatgggcctgaacgacaacaaggccggcatggagggcctggacaaggagaagatcaacaagatcatcatggaggccaccaagggctcccggttctacggcaacgagctgaagaaggagaagcaggtgaaccagcggatcgagaacatgatgcagcagaaggcccagatcacctcccagcagctgcggaaggcccagctgcaggtggaccggttcgccatggagctggagcagtcccggaacctgtccaacaccatcgtgcacatcgacatggacgccttctacgccgccgtggagatgcgggacaaccccgagctgaaggacaagcccatcgccgtgggctccatgtccatgctgtccacctccaactaccacgcccggcggttcggcgtgcgggccgccatgcccggcttcatcgccaagcggctgtgcccccagctgatcatcgtgccccccaacttcgacaagtaccgggccgtgtccaaggaggtgaaggagatcctggccgactacgaccccaacttcatggccatgtccctggacgaggcctacctgaacatcaccaagcacctggaggagcggcagaactggcccgaggacaagcggcggtacttcatcaagatgggctcctccgtggagaacgacaaccccggcaaggaggtgaacaagctgtccgagcacgagcggtccatctcccccctgctgttcgaggagtccccctccgacgtgcagccccccggcgaccccttccaggtgaacttcgaggagcagaacaacccccagatcctgcagaactccgtggtgttcggcacctccgcccaggaggtggtgaaggagatccggttccggatcgagcagaagaccaccctgaccgcctccgccggcatcgcccccaacaccatgctggccaaggtgtgctccgacaagaacaagcccaacggccagtaccagatcctgcccaaccggcaggccgtgatggacttcatcaaggacctgcccatccggaaggtgtccggcatcggcaaggtgaccgagaagatgctgaaggccctgggcatcatcacctgcaccgagctgtaccagcagcgggccctgctgtccctgctgttctccgagacctcctggcactacttcctgcacatctccctgggcctgggctccacccacctgacccgggaccgggtgcggaagtccatgtccgtggagcggaccttctccgagatcaacaaggccgaggagcagtactccctgtgccaggagctgtgctccgagctggcccaggacctgcagaaggagcggctgaagggccggaccgtgaccatcaagctgaagaacgtgaacttcgaggtgaagacccgggcctccaccgtgtcctccgtggtgtccaccgccgaggagatcttcgccatcgccaaggagctgctgaagaccgagatcgacgccgacttcccccaccccctgcggctgcggctgatgggcgtgcggatctcctccttccccaacgaggaggaccggaagcaccagcagggcggcggctccggcaagcggaccgccgacggctccggcggcggctcccccaagaagaagcggaaggtgtccgagtccgccacccccgagtccgtgtccggctggcggctgttcaagaagatctcctagctagcaccagcctcaagaacacccgaatggagtctctaagctacataataccaacttacactttacaaaatgttgtcccccaaaatgtagccattcgtatctgctcctaataaaaagaaagtttcttcacattctctcgagaaaaaaaaaaaatggaaaaaaaaaaaacggaaaaaaaaaaaaggtaaaaaaaaaaaatataaaaaaaaaaaacataaaaaaaaaaaacgaaaaaaaaaaaacgtaaaaaaaaaaaactcaaaaaaaaaaaagataaaaaaaaaaaacctaaaaaaaaaaaatgtaaaaaaaaaaaagggaaaaaaaaaaaacgcaaaaaaaaaaaacacaaaaaaaaaaaatgcaaaaaaaaaaaatcgaaaaaaaaaaaatctaaaaaaaaaaaacgaaaaaaaaaaaacccaaaaaaaaaaaagacaaaaaaaaaaaatagaaaaaaaaaaagttaaaaaaaaaaaactgaaaaaaaaaaaatttaaaaaaaaaaaatctag

SEQ ID NO: 2575 - DNA, 6526 bp, synthetic construct
  misc_feature 1..6526: note = Synthetic
  source 1..6526: mol_type = other DNA
aggaagctcagaataaacgctcaactttggccggatctgccaccatgaagcggaccgccgacggctccgagttcgagtcccccaagaagaagcggaaggtggacaagaagtactccatcggcctggacatcggcaccaactccgtgggctgggccgtgatcaccgacgagtacaaggtgccctccaagaagttcaaggtgctgggcaacaccgaccggcactccatcaagaagaacctgatcggcgccctgctgttcgactccggcgagaccgccgaggccacccggctgaagcggaccgcccggcggcggtacacccggcggaagaaccggatctgctacctgcaggagatcttctccaacgagatggccaaggtggacgactccttcttccaccggctggaggagtccttcctggtggaggaggacaagaagcacgagcggcaccccatcttcggcaacatcgtggacgaggtggcctaccacgagaagtaccccaccatctaccacctgcggaagaagctggtggactccaccgacaaggccgacctgcggctgatctacctggccctggcccacatgatcaagttccggggccacttcctgatcgagggcgacctgaaccccgacaactccgacgtggacaagctgttcatccagctggtgcagacctacaaccagctgttcgaggagaaccccatcaacgcctccggcgtggacgccaaggccatcctgtccgcccggctgtccaagtcccggcggctggagaacctgatcgcccagctgcccggcgagaagaagaacggcctgttcggcaacctgatcgccctgtccctgggcctgacccccaacttcaagtccaacttcgacctggccgaggacgccaagctgcagctgtccaaggacacctacgacgacgacctggacaacctgctggcccagatcggcgaccagtacgccgacctgttcctggccgccaagaacctgtccgacgccatcctgctgtccgacatcctgcgggtgaacaccgagatcaccaaggcccccctgtccgcctccatgatcaagcggtacgacgagcaccaccaggacctgaccctgctgaaggccctggtgcggcagcagctgcccgagaagtacaaggagatcttcttcgaccagtccaagaacggctacgccggctacatcgacggcggcgcctcccaggaggagttctacaagttcatcaagcccatcctggagaagatggacggcaccgaggagctgctggtgaagctgaaccgggaggacctgctgcggaagcagcggaccttcgacaacggctccatcccccaccagatccacctgggcgagctgcacgccatcctgcggcggcaggaggacttctaccccttcctgaaggacaaccgggagaagatcgagaagatcctgaccttccggatcccctactacgtgggccccctggcccggggcaactcccggttcgcctggatgacccggaagtccgaggagaccatcaccccctggaacttcgaggaggtggtggacaagggcgcctccgcccagtccttcatcgagcggatgaccaacttcgacaagaacctgcccaacgagaaggtgctgcccaagcactccctgctgtacgagtacttcaccgtgtacaacgagctgaccaaggtgaagtacgtgaccgagggcatgcggaagcccgccttcctgtccggcgagcagaagaaggccatcgtggacctgctgttcaagaccaaccggaaggtgaccgtgaagcagctgaaggaggactacttcaagaagatcgagtgcttcgactccgtggagatctccggcgtggaggaccggttcaacgcctccctgggcacctaccacgacctgctgaagatcatcaaggacaaggacttcctggacaacgaggagaacgaggacatcctggaggacatcgtgctgaccctgaccctgttcgaggaccgggagatgatcgaggagcggctgaagacctacgcccacctgttcgacgacaaggtgatgaagcagctgaagcggcggcggtacaccggctggggccggctgtcccggaagctgatcaacggcatccgggacaagcagtccggcaagaccatcctggacttcctgaagtccgacggcttcgccaaccggaacttcatgcagctgatccacgacgactccctgaccttcaaggaggacatccagaaggcccaggtgtccggccagggcgactccctgcacgagcacatcgccaacctggccggctcccccgccatcaagaagggcatcctgcagaccgtgaaggtggtggacgagctggtgaaggtgatgggccggcacaagcccgagaacatcgtgatcgagatggcccgggagaaccagaccacccagaagggccagaagaactcccgggagcggatgaagcggatcgaggagggcatcaaggagctgggctcccagatcctgaaggagcaccccgtggagaacacccagctgcagaacgagaagctgtacctgtactacctgcagaacggccgggacatgtacgtggaccaggagctggacatcaaccggctgtccgactacgacgtggacaccatcgtgccccagtccttcctgaaggacgactccatcgacaacaaggtgctgacccggtccgacaagaaccggggcaagtccgacaacgtgccctccgaggaggtggtgaagaagatgaagaactactggcggcagctgctgaacgccaagctgatcacccagcggaagttcgacaacctgaccaaggccgagcggggcggcctgtccgagctggacaaggccggcttcatcaagcggcagctggtggagacccggcagatcaccaagcacgtggcccagatcctggactcccggatgaacaccaagtacgacgagaacgacaagctgatccgggaggtgaaggtgatcaccctgaagtccaagctggtgtccgacttccggaaggacttccagttctacaaggtgcgggagatcaacaactaccaccacgcccacgacgcctacctgaacgccgtggtgggcaccgccctgatcaagaagtaccccaagctggagtccgagttcgtgtacggcgactacaaggtgtacgacgtgcggaagatgatcgccaagtccgagcaggagatcggcaaggccaccgccaagtacttcttctactccaacatcatgaacttcttcaagaccgagatcaccctggccaacggcgagatccggaagcggcccctgatcgagaccaacggcgagaccggcgagatcgtgtgggacaagggccgggacttcgccaccgtgcggaaggtgctgtccatgccccaggtgaacatcgtgaagaagaccgaggtgcagaccggcggcttctccaaggagtccatcctgcccaagcggaactccgacaagctgatcgcccggaagaaggactgggaccccaagaagtacggcggcttcgactcccccaccgtggcctactccgtgctggtggtggccaaggtggagaagggcaagtccaagaagctgaagtccgtgaaggagctgctgggcatcaccatcatggagcggtcctccttcgagaagaaccccatcgacttcctggaggccaagggctacaaggaggtgaagaaggacctgatcatcaagctgcccaagtactccctgttcgagctggagaacggccggaagcggatgctggcctccgccggcgagctgcagaagggcaacgagctggccctgccctccaagtacgtgaacttcctgtacctggcctcccactacgagaagctgaagggctcccccgaggacaacgagcagaagcagctgttcgtggagcagcacaagcactacctggacgagatcatcgagcagatctccgagttctccaagcgggtgatcctggccgacgccaacctggacaaggtgctgtccgcctacaacaagcaccgggacaagcccatccgggagcaggccgagaacatcatccacctgttcaccctgaccaacctgggcgcccccgccgccttcaagtacttcgacaccaccatcgaccggaagcggtacacctccaccaaggaggtgctggacgccaccctgatccaccagtccatcaccggcctgtacgagacccggatcgacctgtcccagctgggcggcgactccggcggctcctccggcggctccaagcggaccgccgacggctccgagttcgagtcccccaagaagaagcggaaggtgtccggcggctcctccggcggctccatggactccaccaaggagaagtgcgactcctacaaggacgacctgctgctgcggatgggcctgaacgacaacaaggccggcatggagggcctggacaaggagaagatcaacaagatcatcatggaggccaccaagggctcccggttctacggcaacgagctgaagaaggagaagcaggtgaaccagcggatcgagaacatgatgcagcagaaggcccagatcacctcccagcagctgcggaaggcccagctgcaggtggaccggttcgccatggagctggagcagtcccggaacctgtccaacaccatcgtgcacatcgacatggacgccttctacgccgccgtggagatgcgggacaaccccgagctgaaggacaagcccatcgccgtgggctccatgtccatgctgtccacctccaactaccacgcccggcggttcggcgtgcgggccgccatgcccggcttcatcgccaagcggctgtgcccccagctgatcatcgtgccccccaacttcgacaagtaccgggccgtgtccaaggaggtgaaggagatcctggccgactacgaccccaacttcatggccatgtccctggacgaggcctacctgaacatcaccaagcacctggaggagcggcagaactggcccgaggacaagcggcggtacttcatcaagatgggctcctccgtggagaacgacaaccccggcaaggaggtgaacaagctgtccgagcacgagcggtccatctcccccctgctgttcgaggagtccccctccgacgtgcagccccccggcgaccccttccaggtgaacttcgaggagcagaacaacccccagatcctgcagaactccgtggtgttcggcacctccgcccaggaggtggtgaaggagatccggttccggatcgagcagaagaccaccctgaccgcctccgccggcatcgcccccaacaccatgctggccaaggtgtgctccgacaagaacaagcccaacggccagtaccagatcctgcccaaccggcaggccgtgatggacttcatcaaggacctgcccatccggaaggtgtccggcatcggcaaggtgaccgagaagatgctgaaggccctgggcatcatcacctgcaccgagctgtaccagcagcgggccctgctgtccctgctgttctccgagacctcctggcactacttcctgcacatctccctgggcctgggctccacccacctgacccgggaccgggtgcggaagtccatgtccgtggagcggaccttctccgagatcaacaaggccgaggagcagtactccctgtgccaggagctgtgctccgagctggcccaggacctgcagaaggagcggctgaagggccggaccgtgaccatcaagctgaagaacgtgaacttcgaggtgaagacccgggcctccaccgtgtcctccgtggtgtccaccgccgaggagatcttcgccatcgccaaggagctgctgaagaccgagatcgacgccgacttcccccaccccctgcggctgcggctgatgggcgtgcggatctcctccttccccaacgaggaggaccggaagcaccagcagggcggcggctccggcaagcggaccgccgacggctccggcggcggctcccccaagaagaagcggaaggtgtccgagtccgccacccccgagtccgtgtccggctggcggctgttcaagaagatctcctagctagcaccagcctcaagaacacccgaatggagtctctaagctacataataccaacttacactttacaaaatgttgtcccccaaaatgtagccattcgtatctgctcctaataaaaagaaagtttcttcacattctctcgagaaaaaaaaaaaatggaaaaaaaaaaaacggaaaaaaaaaaaaggtaaaaaaaaaaaatataaaaaaaaaaaacataaaaaaaaaaaacgaaaaaaaaaaaacgtaaaaaaaaaaaactcaaaaaaaaaaaagataaaaaaaaaaaacctaaaaaaaaaaaatgtaaaaaaaaaaaagggaaaaaaaaaaaacgcaaaaaaaaaaaacacaaaaaaaaaaaatgcaaaaaaaaaaaatcgaaaaaaaaaaaatctaaaaaaaaaaaacgaaaaaaaaaaaacccaaaaaaaaaaaagacaaaaaaaaaaaatagaaaaaaaaaaagttaaaaaaaaaaaactgaaaaaaaaaaaatttaaaaaaaaaaaatctag

SEQ ID NO: 2576 - DNA, 6526 bp, synthetic construct
  misc_feature 1..6526: note = Synthetic
  source 1..6526: mol_type = other DNA
aggaagctcagaataaacgctcaactttggccggatctgccaccatgaagcggaccgccgacggctccgagttcgagtcccccaagaagaagcggaaggtggacaagaagtactccatcggcctggacatcggcaccaactccgtgggctgggccgtgatcaccgacgagtacaaggtgccctccaagaagttcaaggtgctgggcaacaccgaccggcactccatcaagaagaacctgatcggcgccctgctgttcgactccggcgagaccgccgaggccacccggctgaagcggaccgcccggcggcggtacacccggcggaagaaccggatctgctacctgcaggagatcttctccaacgagatggccaaggtggacgactccttcttccaccggctggaggagtccttcctggtggaggaggacaagaagcacgagcggcaccccatcttcggcaacatcgtggacgaggtggcctaccacgagaagtaccccaccatctaccacctgcggaagaagctggtggactccaccgacaaggccgacctgcggctgatctacctggccctggcccacatgatcaagttccggggccacttcctgatcgagggcgacctgaaccccgacaactccgacgtggacaagctgttcatccagctggtgcagacctacaaccagctgttcgaggagaaccccatcaacgcctccggcgtggacgccaaggccatcctgtccgcccggctgtccaagtcccggcggctggagaacctgatcgcccagctgcccggcgagaagaagaacggcctgttcggcaacctgatcgccctgtccctgggcctgacccccaacttcaagtccaacttcgacctggccgaggacgccaagctgcagctgtccaaggacacctacgacgacgacctggacaacctgctggcccagatcggcgaccagtacgccgacctgttcctggccgccaagaacctgtccgacgccatcctgctgtccgacatcctgcgggtgaacaccgagatcaccaaggcccccctgtccgcctccatgatcaagcggtacgacgagcaccaccaggacctgaccctgctgaaggccctggtgcggcagcagctgcccgagaagtacaaggagatcttcttcgaccagtccaagaacggctacgccggctacatcgacggcggcgcctcccaggaggagttctacaagttcatcaagcccatcctggagaagatggacggcaccgaggagctgctggtgaagctgaaccgggaggacctgctgcggaagcagcggaccttcgacaacggctccatcccccaccagatccacctgggcgagctgcacgccatcctgcggcggcaggaggacttctaccccttcctgaaggacaaccgggagaagatcgagaagatcctgaccttccggatcccctactacgtgggccccctggcccggggcaactcccggttcgcctggatgacccggaagtccgaggagaccatcaccccctggaacttcgaggaggtggtggacaagggcgcctccgcccagtccttcatcgagcggatgaccaacttcgacaagaacctgcccaacgagaaggtgctgcccaagcactccctgctgtacgagtacttcaccgtgtacaacgagctgaccaaggtgaagtacgtgaccgagggcatgcggaagcccgccttcctgtccggcgagcagaagaaggccatcgtggacctgctgttcaagaccaaccggaaggtgaccgtgaagcagctgaaggaggactacttcaagaagatcgagtgcttcgactccgtggagatctccggcgtggaggaccggttcaacgcctccctgggcacctaccacgacctgctgaagatcatcaaggacaaggacttcctggacaacgaggagaacgaggacatcctggaggacatcgtgctgaccctgaccctgttcgaggaccgggagatgatcgaggagcggctgaagacctacgcccacctgttcgacgacaaggtgatgaagcagctgaagcggcggcggtacaccggctggggccggctgtcccggaagctgatcaacggcatccgggacaagcagtccggcaagaccatcctggacttcctgaagtccgacggcttcgccaaccggaacttcatgcagctgatccacgacgactccctgaccttcaaggaggacatccagaaggcccaggtgtccggccagggcgactccctgcacgagcacatcgccaacctggccggctcccccgccatcaagaagggcatcctgcagaccgtgaaggtggtggacgagctggtgaaggtgatgggccggcacaagcccgagaacatcgtgatcgagatggcccgggagaaccagaccacccagaagggccagaagaactcccgggagcggatgaagcggatcgaggagggcatcaaggagctgggctcccagatcctgaaggagcaccccgtggagaacacccagctgcagaacgagaagctgtacctgtactacctgcagaacggccgggacatgtacgtggaccaggagctggacatcaaccggctgtccgactacgacgtggactacatcgtgccccagtccttcctgaaggacgactccatcgacaacaaggtgctgacccggtccgacaagaaccggggcaagtccgacaacgtgccctccgaggaggtggtgaagaagatgaagaactactggcggcagctgctgaacgccaagctgatcacccagcggaagttcgacaacctgaccaaggccgagcggggcggcctgtccgagctggacaaggccggcttcatcaagcggcagctggtggagacccggcagatcaccaagcacgtggcccagatcctggactcccggatgaacaccaagtacgacgagaacgacaagctgatccgggaggtgaaggtgatcaccctgaagtccaagctggtgtccgacttccggaaggacttccagttctacaaggtgcgggagatcaacaactaccaccacgcccacgacgcctacctgaacgccgtggtgggcaccgccctgatcaagaagtaccccaagctggagtccgagttcgtgtacggcgactacaaggtgtacgacgtgcggaagatgatcgccaagtccgagcaggagatcggcaaggccaccgccaagtacttcttctactccaacatcatgaacttcttcaagaccgagatcaccctggccaacggcgagatccggaagcggcccctgatcgagaccaacggcgagaccggcgagatcgtgtgggacaagggccgggacttcgccaccgtgcggaaggtgctgtccatgccccaggtgaacatcgtgaagaagaccgaggtgcagaccggcggcttctccaaggagtccatcctgcccaagcggaactccgacaagctgatcgcccggaagaaggactgggaccccaagaagtacggcggcttcgactcccccaccgtggcctactccgtgctggtggtggccaaggtggagaagggcaagtccaagaagctgaagtccgtgaaggagctgctgggcatcaccatcatggagcggtcctccttcgagaagaaccccatcgacttcctggaggccaagggctacaaggaggtgaagaaggacctgatcatcaagctgcccaagtactccctgttcgagctggagaacggccggaagcggatgctggcctccgccggcgagctgcagaagggcaacgagctggccctgccctccaagtacgtgaacttcctgtacctggcctcccactacgagaagctgaagggctcccccgaggacaacgagcagaagcagctgttcgtggagcagcacaagcactacctggacgagatcatcgagcagatctccgagttctccaagcgggtgatcctggccgacgccaacctggacaaggtgctgtccgcctacaacaagcaccgggacaagcccatccgggagcaggccgagaacatcatccacctgttcaccctgaccaacctgggcgcccccgccgccttcaagtacttcgacaccaccatcgaccggaagcggtacacctccaccaaggaggtgctggacgccaccctgatccaccagtccatcaccggcctgtacgagacccggatcgacctgtcccagctgggcggcgactccggcggctcctccggcggctccaagcggaccgccgacggctccgagttcgagtcccccaagaagaagcggaaggtgtccggcggctcctccggcggctccatggactccaccaaggagaagtgcgactcctacaaggacgacctgctgctgcggatgggcctgaacgacaacaaggccggcatggagggcctggacaaggagaagatcaacaagatcatcatggaggccaccaagggctcccggttctacggcaacgagctgaagaaggagaagcaggtgaaccagcggatcgagaacatgatgcagcagaaggcccagatcacctcccagcagctgcggaaggcccagctgcaggtggaccggttcgccatggagctggagcagtcccggaacctgtccaacaccatcgtgcacatcgacatggacgccttctacgccgccgtggagatgcgggacaaccccgagctgaaggacaagcccatcgccgtgggctccatgtccatgctgtccacctccaactaccacgcccggcggttcggcgtgcgggccgccatgcccggcttcatcgccaagcggctgtgcccccagctgatcatcgtgccccccaacttcgacaagtaccgggccgtgtccaaggaggtgaaggagatcctggccgactacgaccccaacttcatggccatgtccctggacgaggcctacctgaacatcaccaagcacctggaggagcggcagaactggcccgaggacaagcggcggtacttcatcaagatgggctcctccgtggagaacgacaaccccggcaaggaggtgaacaagctgtccgagcacgagcggtccatctcccccctgctgttcgaggagtccccctccgacgtgcagccccccggcgaccccttccaggtgaacttcgaggagcagaacaacccccagatcctgcagaactccgtggtgttcggcacctccgcccaggaggtggtgaaggagatccggttccggatcgagcagaagaccaccctgaccgcctccgccggcatcgcccccaacaccatgctggccaaggtgtgctccgacaagaacaagcccaacggccagtaccagatcctgcccaaccggcaggccgtgatggacttcatcaaggacctgcccatccggaaggtgtccggcatcggcaaggtgaccgagaagatgctgaaggccctgggcatcatcacctgcaccgagctgtaccagcagcgggccctgctgtccctgctgttctccgagacctcctggcactacttcctgcacatctccctgggcctgggctccacccacctgacccgggaccgggtgcggaagtccatgtccgtggagcggaccttctccgagatcaacaaggccgaggagcagtactccctgtgccaggagctgtgctccgagctggcccaggacctgcagaaggagcggctgaagggccggaccgtgaccatcaagctgaagaacgtgaacttcgaggtgaagacccgggcctccaccgtgtcctccgtggtgtccaccgccgaggagatcttcgccatcgccaaggagctgctgaagaccgagatcgacgccgacttcccccaccccctgcggctgcggctgatgggcgtgcggatctcctccttccccaacgaggaggaccggaagcaccagcagggcggcggctccggcaagcggaccgccgacggctccggcggcggctcccccaagaagaagcggaaggtgtccgagtccgccacccccgagtccgtgtccggctggcggctgttcaagaagatctcctagctagcaccagcctcaagaacacccgaatggagtctctaagctacataataccaacttacactttacaaaatgttgtcccccaaaatgtagccattcgtatctgctcctaataaaaagaaagtttcttcacattctctcgagaaaaaaaaaaaatggaaaaaaaaaaaacggaaaaaaaaaaaaggtaaaaaaaaaaaatataaaaaaaaaaaacataaaaaaaaaaaacgaaaaaaaaaaaacgtaaaaaaaaaaaactcaaaaaaaaaaaagataaaaaaaaaaaacctaaaaaaaaaaaatgtaaaaaaaaaaaagggaaaaaaaaaaaacgcaaaaaaaaaaaacacaaaaaaaaaaaatgcaaaaaaaaaaaatcgaaaaaaaaaaaatctaaaaaaaaaaaacgaaaaaaaaaaaacccaaaaaaaaaaaagacaaaaaaaaaaaatagaaaaaaaaaaagttaaaaaaaaaaaactgaaaaaaaaaaaatttaaaaaaaaaaaatctag

SEQ ID NO: 2577 - DNA, 6526 bp, synthetic construct
  misc_feature 1..6526: note = Synthetic
  source 1..6526: mol_type = other DNA
aggaagctcagaataaacgctcaactttggccggatctgccaccatgaagcggaccgccgacggctccgagttcgagtcccccaagaagaagcggaaggtggacaagaagtactccatcggcctggacatcggcaccaactccgtgggctgggccgtgatcaccgacgagtacaaggtgccctccaagaagttcaaggtgctgggcaacaccgaccggcactccatcaagaagaacctgatcggcgccctgctgttcgactccggcgagaccgccgaggccacccggctgaagcggaccgcccggcggcggtacacccggcggaagaaccggatctgctacctgcaggagatcttctccaacgagatggccaaggtggacgactccttcttccaccggctggaggagtccttcctggtggaggaggacaagaagcacgagcggcaccccatcttcggcaacatcgtggacgaggtggcctaccacgagaagtaccccaccatctaccacctgcggaagaagctggtggactccaccgacaaggccgacctgcggctgatctacctggccctggcccacatgatcaagttccggggccacttcctgatcgagggcgacctgaaccccgacaactccgacgtggacaagctgttcatccagctggtgcagacctacaaccagctgttcgaggagaaccccatcaacgcctccggcgtggacgccaaggccatcctgtccgcccggctgtccaagtcccggcggctggagaacctgatcgcccagctgcccggcgagaagaagaacggcctgttcggcaacctgatcgccctgtccctgggcctgacccccaacttcaagtccaacttcgacctggccgaggacgccaagctgcagctgtccaaggacacctacgacgacgacctggacaacctgctggcccagatcggcgaccagtacgccgacctgttcctggccgccaagaacctgtccgacgccatcctgctgtccgacatcctgcgggtgaacaccgagatcaccaaggcccccctgtccgcctccatgatcaagcggtacgacgagcaccaccaggacctgaccctgctgaaggccctggtgcggcagcagctgcccgagaagtacaaggagatcttcttcgaccagtccaagaacggctacgccggctacatcgacggcggcgcctcccaggaggagttctacaagttcatcaagcccatcctggagaagatggacggcaccgaggagctgctggtgaagctgaaccgggaggacctgctgcggaagcagcggaccttcgacaacggctccatcccccaccagatccacctgggcgagctgcacgccatcctgcggcggcaggaggacttctaccccttcctgaaggacaaccgggagaagatcgagaagatcctgaccttccggatcccctactacgtgggccccctggcccggggcaactcccggttcgcctggatgacccggaagtccgaggagaccatcaccccctggaacttcgaggaggtggtggacaagggcgcctccgcccagtccttcatcgagcggatgaccaacttcgacaagaacctgcccaacgagaaggtgctgcccaagcactccctgctgtacgagtacttcaccgtgtacaacgagctgaccaaggtgaagtacgtgaccgagggcatgcggaagcccgccttcctgtccggcgagcagaagaaggccatcgtggacctgctgttcaagaccaaccggaaggtgaccgtgaagcagctgaaggaggactacttcaagaagatcgagtgcttcgactccgtggagatctccggcgtggaggaccggttcaacgcctccctgggcacctaccacgacctgctgaagatcatcaaggacaaggacttcctggacaacgaggagaacgaggacatcctggaggacatcgtgctgaccctgaccctgttcgaggaccgggagatgatcgaggagcggctgaagacctacgcccacctgttcgacgacaaggtgatgaagcagctgaagcggcggcggtacaccggctggggccggctgtcccggaagctgatcaacggcatccgggacaagcagtccggcaagaccatcctggacttcctgaagtccgacggcttcgccaaccggaacttcatgcagctgatccacgacgactccctgaccttcaaggaggacatccagaaggcccaggtgtccggccagggcgactccctgcacgagcacatcgccaacctggccggctcccccgccatcaagaagggcatcctgcagaccgtgaaggtggtggacgagctggtgaaggtgatgggccggcacaagcccgagaacatcgtgatcgagatggcccgggagaaccagaccacccagaagggccagaagaactcccgggagcggatgaagcggatcgaggagggcatcaaggagctgggctcccagatcctgaaggagcaccccgtggagaacacccagctgcagaacgagaagctgtacctgtactacctgcagaacggccgggacatgtacgtggaccaggagctggacatcaaccggctgtccgactacgacgtggacgccatcgtgccccagtccttcctgaaggacgactccatcgacaacaaggtgctgacccggtccgacaagaaccggggcaagtccgacaacgtgccctccgaggaggtggtgaagaagatgaagaactactggcggcagctgctgaacgccaagctgatcacccagcggaagttcgacaacctgaccaaggccgagcggggcggcctgtccgagctggacaaggccggcttcatcaagcggcagctggtggagacccggcagatcaccaagcacgtggcccagatcctggactcccggatgaacaccaagtacgacgagaacgacaagctgatccgggaggtgaaggtgatcaccctgaagtccaagctggtgtccgacttccggaaggacttccagttctacaaggtgcgggagatcaacaactaccaccacgcccacgacgcctacctgaacgccgtggtgggcaccgccctgatcaagaagtaccccaagctggagtccgagttcgtgtacggcgactacaaggtgtacgacgtgcggaagatgatcgccaagtccgagcaggagatcggcaaggccaccgccaagtacttcttctactccaacatcatgaacttcttcaagaccgagatcaccctggccaacggcgagatccggaagcggcccctgatcgagaccaacggcgagaccggcgagatcgtgtgggacaagggccgggacttcgccaccgtgcggaaggtgctgtccatgccccaggtgaacatcgtgaagaagaccgaggtgcagaccggcggcttctccaaggagtccatcctgcccaagcggaactccgacaagctgatcgcccggaagaaggactgggaccccaagaagtacggcggcttcgactcccccaccgtggcctactccgtgctggtggtggccaaggtggagaagggcaagtccaagaagctgaagtccgtgaaggagctgctgggcatcaccatcatggagcggtcctccttcgagaagaaccccatcgacttcctggaggccaagggctacaaggaggtgaagaaggacctgatcatcaagctgcccaagtactccctgttcgagctggagaacggccggaagcggatgctggcctccgccggcgagctgcagaagggcaacgagctggccctgccctccaagtacgtgaacttcctgtacctggcctcccactacgagaagctgaagggctcccccgaggacaacgagcagaagcagctgttcgtggagcagcacaagcactacctggacgagatcatcgagcagatctccgagttctccaagcgggtgatcctggccgacgccaacctggacaaggtgctgtccgcctacaacaagcaccgggacaagcccatccgggagcaggccgagaacatcatccacctgttcaccctgaccaacctgggcgcccccgccgccttcaagtacttcgacaccaccatcgaccggaagcggtacacctccaccaaggaggtgctggacgccaccctgatccaccagtccatcaccggcctgtacgagacccggatcgacctgtcccagctgggcggcgactccggcggctcctccggcggctccaagcggaccgccgacggctccgagttcgagtcccccaagaagaagcggaaggtgtccggcggctcctccggcggctccatggactccaccaaggagaagtgcgactcctacaaggacgacctgctgctgcggatgggcctgaacgacaacaaggccggcatggagggcctggacaaggagaagatcaacaagatcatcatggaggccaccaagggctcccggttctacggcaacgagctgaagaaggagaagcaggtgaaccagcggatcgagaacatgatgcagcagaaggcccagatcacctcccagcagctgcggaaggcccagctgcaggtggaccggttcgccatggagctggagcagtcccggaacctgtccaacaccatcgtgcacatcgacatggacgccttctacgccgccgtggagatgcgggacaaccccgagctgaaggacaagcccatcgccgtgggctccatgtccatgctgtccacctccaactaccacgcccggcggttcggcgtgcgggccgccatgcccggcttcatcgccaagcggctgtgcccccagctgatcatcgtgccccccaacttcgacaagtaccgggccgtgtccaaggaggtgaaggagatcctggccgactacgaccccaacttcatggccatgtccctggacgaggcctacctgaacatcaccaagcacctggaggagcggcagaactggcccgaggacaagcggcggtacttcatcaagatgggctcctccgtggagaacgacaaccccggcaaggaggtgaacaagctgtccgagcacgagcggtccatctcccccctgctgttcgaggagtccccctccgacgtgcagccccccggcgaccccttccaggtgaacttcgaggagcagaacaacccccagatcctgcagaactccgtggtgttcggcacctccgcccaggaggtggtgaaggagatccggttccggatcgagcagaagaccaccctgaccgcctccgccggcatcgcccccaacaccatgctggccaaggtgtgctccgacaagaacaagcccaacggccagtaccagatcctgcccaaccggcaggccgtgatggacttcatcaaggacctgcccatccggaaggtgtccggcatcggcaaggtgaccgagaagatgctgaaggccctgggcatcatcacctgcaccgagctgtaccagcagcgggccctgctgtccctgctgttctccgagacctcctggcactacttcctgcacatctccctgggcctgggctccacccacctgacccgggaccgggtgcggaagtccatgtccgtggagcggaccttctccgagatcaacaaggccgaggagcagtactccctgtgccaggagctgtgctccgagctggcccaggacctgcagaaggagcggctgaagggccggaccgtgaccatcaagctgaagaacgtgaacttcgaggtgaagacccgggcctccaccgtgtcctccgtggtgtccaccgccgaggagatcttcgccatcgccaaggagctgctgaagaccgagatcgacgccgacttcccccaccccctgcggctgcggctgatgggcgtgcggatctcctccttccccaacgaggaggaccggaagcaccagcagtccggctccgagacccccggcacctccgagtccgccacccccgagtcccccaagaagaagcggaaggtgtccgagtccgccacccccgagtccgtgtccggctggcggctgttcaagaagatctcctagctagcaccagcctcaagaacacccgaatggagtctctaagctacataataccaacttacactttacaaaatgttgtcccccaaaatgtagccattcgtatctgctcctaataaaaagaaagtttcttcacattctctcgagaaaaaaaaaaaatggaaaaaaaaaaaacggaaaaaaaaaaaaggtaaaaaaaaaaaatataaaaaaaaaaaacataaaaaaaaaaaacgaaaaaaaaaaaacgtaaaaaaaaaaaactcaaaaaaaaaaaagataaaaaaaaaaaacctaaaaaaaaaaaatgtaaaaaaaaaaaagggaaaaaaaaaaaacgcaaaaaaaaaaaacacaaaaaaaaaaaatgcaaaaaaaaaaaatcgaaaaaaaaaaaatctaaaaaaaaaaaacgaaaaaaaaaaaacccaaaaaaaaaaaagacaaaaaaaaaaaatagaaaaaaaaaaagttaaaaaaaaaaaactgaaaaaaaaaaaatttaaaaaaaaaaaatctag

SEQ ID NO: 2578 - DNA, 6550 bp, synthetic construct
  misc_feature 1..6550: note = Synthetic
  source 1..6550: mol_type = other DNA
aggaagctcagaataaacgctcaactttggccggatctgccaccatgaagcggaccgccgacggctccgagttcgagtcccccaagaagaagcggaaggtggacaagaagtactccatcggcctggacatcggcaccaactccgtgggctgggccgtgatcaccgacgagtacaaggtgccctccaagaagttcaaggtgctgggcaacaccgaccggcactccatcaagaagaacctgatcggcgccctgctgttcgactccggcgagaccgccgaggccacccggctgaagcggaccgcccggcggcggtacacccggcggaagaaccggatctgctacctgcaggagatcttctccaacgagatggccaaggtggacgactccttcttccaccggctggaggagtccttcctggtggaggaggacaagaagcacgagcggcaccccatcttcggcaacatcgtggacgaggtggcctaccacgagaagtaccccaccatctaccacctgcggaagaagctggtggactccaccgacaaggccgacctgcggctgatctacctggccctggcccacatgatcaagttccggggccacttcctgatcgagggcgacctgaaccccgacaactccgacgtggacaagctgttcatccagctggtgcagacctacaaccagctgttcgaggagaaccccatcaacgcctccggcgtggacgccaaggccatcctgtccgcccggctgtccaagtcccggcggctggagaacctgatcgcccagctgcccggcgagaagaagaacggcctgttcggcaacctgatcgccctgtccctgggcctgacccccaacttcaagtccaacttcgacctggccgaggacgccaagctgcagctgtccaaggacacctacgacgacgacctggacaacctgctggcccagatcggcgaccagtacgccgacctgttcctggccgccaagaacctgtccgacgccatcctgctgtccgacatcctgcgggtgaacaccgagatcaccaaggcccccctgtccgcctccatgatcaagcggtacgacgagcaccaccaggacctgaccctgctgaaggccctggtgcggcagcagctgcccgagaagtacaaggagatcttcttcgaccagtccaagaacggctacgccggctacatcgacggcggcgcctcccaggaggagttctacaagttcatcaagcccatcctggagaagatggacggcaccgaggagctgctggtgaagctgaaccgggaggacctgctgcggaagcagcggaccttcgacaacggctccatcccccaccagatccacctgggcgagctgcacgccatcctgcggcggcaggaggacttctaccccttcctgaaggacaaccgggagaagatcgagaagatcctgaccttccggatcccctactacgtgggccccctggcccggggcaactcccggttcgcctggatgacccggaagtccgaggagaccatcaccccctggaacttcgaggaggtggtggacaagggcgcctccgcccagtccttcatcgagcggatgaccaacttcgacaagaacctgcccaacgagaaggtgctgcccaagcactccctgctgtacgagtacttcaccgtgtacaacgagctgaccaaggtgaagtacgtgaccgagggcatgcggaagcccgccttcctgtccggcgagcagaagaaggccatcgtggacctgctgttcaagaccaaccggaaggtgaccgtgaagcagctgaaggaggactacttcaagaagatcgagtgcttcgactccgtggagatctccggcgtggaggaccggttcaacgcctccctgggcacctaccacgacctgctgaagatcatcaaggacaaggacttcctggacaacgaggagaacgaggacatcctggaggacatcgtgctgaccctgaccctgttcgaggaccgggagatgatcgaggagcggctgaagacctacgcccacctgttcgacgacaaggtgatgaagcagctgaagcggcggcggtacaccggctggggccggctgtcccggaagctgatcaacggcatccgggacaagcagtccggcaagaccatcctggacttcctgaagtccgacggcttcgccaaccggaacttcatgcagctgatccacgacgactccctgaccttcaaggaggacatccagaaggcccaggtgtccggccagggcgactccctgcacgagcacatcgccaacctggccggctcccccgccatcaagaagggcatcctgcagaccgtgaaggtggtggacgagctggtgaaggtgatgggccggcacaagcccgagaacatcgtgatcgagatggcccgggagaaccagaccacccagaagggccagaagaactcccgggagcggatgaagcggatcgaggagggcatcaaggagctgggctcccagatcctgaaggagcaccccgtggagaacacccagctgcagaacgagaagctgtacctgtactacctgcagaacggccgggacatgtacgtggaccaggagctggacatcaaccggctgtccgactacgacgtggacgccatcgtgccccagtccttcctgaaggacgactccatcgacaacaaggtgctgacccggtccgacaagaaccggggcaagtccgacaacgtgccctccgaggaggtggtgaagaagatgaagaactactggcggcagctgctgaacgccaagctgatcacccagcggaagttcgacaacctgaccaaggccgagcggggcggcctgtccgagctggacaaggccggcttcatcaagcggcagctggtggagacccggcagatcaccaagcacgtggcccagatcctggactcccggatgaacaccaagtacgacgagaacgacaagctgatccgggaggtgaaggtgatcaccctgaagtccaagctggtgtccgacttccggaaggacttccagttctacaaggtgcgggagatcaacaactaccaccacgcccacgacgcctacctgaacgccgtggtgggcaccgccctgatcaagaagtaccccaagctggagtccgagttcgtgtacggcgactacaaggtgtacgacgtgcggaagatgatcgccaagtccgagcaggagatcggcaaggccaccgccaagtacttcttctactccaacatcatgaacttcttcaagaccgagatcaccctggccaacggcgagatccggaagcggcccctgatcgagaccaacggcgagaccggcgagatcgtgtgggacaagggccgggacttcgccaccgtgcggaaggtgctgtccatgccccaggtgaacatcgtgaagaagaccgaggtgcagaccggcggcttctccaaggagtccatcctgcccaagcggaactccgacaagctgatcgcccggaagaaggactgggaccccaagaagtacggcggcttcgactcccccaccgtggcctactccgtgctggtggtggccaaggtggagaagggcaagtccaagaagctgaagtccgtgaaggagctgctgggcatcaccatcatggagcggtcctccttcgagaagaaccccatcgacttcctggaggccaagggctacaaggaggtgaagaaggacctgatcatcaagctgcccaagtactccctgttcgagctggagaacggccggaagcggatgctggcctccgccggcgagctgcagaagggcaacgagctggccctgccctccaagtacgtgaacttcctgtacctggcctcccactacgagaagctgaagggctcccccgaggacaacgagcagaagcagctgttcgtggagcagcacaagcactacctggacgagatcatcgagcagatctccgagttctccaagcgggtgatcctggccgacgccaacctggacaaggtgctgtccgcctacaacaagcaccgggacaagcccatccgggagcaggccgagaacatcatccacctgttcaccctgaccaacctgggcgcccccgccgccttcaagtacttcgacaccaccatcgaccggaagcggtacacctccaccaaggaggtgctggacgccaccctgatccaccagtccatcaccggcctgtacgagacccggatcgacctgtcccagctgggcggcgacggcgcccccgagtccgccaccgagtccggcggcacctccaccgagtccgagggctccgccggcacctccaccgagtccgagggctccgccggctccgccggctccacctccggctcctcctcctccatggactccaccaaggagaagtgcgactcctacaaggacgacctgctgctgcggatgggcctgaacgacaacaaggccggcatggagggcctggacaaggagaagatcaacaagatcatcatggaggccaccaagggctcccggttctacggcaacgagctgaagaaggagaagcaggtgaaccagcggatcgagaacatgatgcagcagaaggcccagatcacctcccagcagctgcggaaggcccagctgcaggtggaccggttcgccatggagctggagcagtcccggaacctgtccaacaccatcgtgcacatcgacatggacgccttctacgccgccgtggagatgcgggacaaccccgagctgaaggacaagcccatcgccgtgggctccatgtccatgctgtccacctccaactaccacgcccggcggttcggcgtgcgggccgccatgcccggcttcatcgccaagcggctgtgcccccagctgatcatcgtgccccccaacttcgacaagtaccgggccgtgtccaaggaggtgaaggagatcctggccgactacgaccccaacttcatggccatgtccctggacgaggcctacctgaacatcaccaagcacctggaggagcggcagaactggcccgaggacaagcggcggtacttcatcaagatgggctcctccgtggagaacgacaaccccggcaaggaggtgaacaagctgtccgagcacgagcggtccatctcccccctgctgttcgaggagtccccctccgacgtgcagccccccggcgaccccttccaggtgaacttcgaggagcagaacaacccccagatcctgcagaactccgtggtgttcggcacctccgcccaggaggtggtgaaggagatccggttccggatcgagcagaagaccaccctgaccgcctccgccggcatcgcccccaacaccatgctggccaaggtgtgctccgacaagaacaagcccaacggccagtaccagatcctgcccaaccggcaggccgtgatggacttcatcaaggacctgcccatccggaaggtgtccggcatcggcaaggtgaccgagaagatgctgaaggccctgggcatcatcacctgcaccgagctgtaccagcagcgggccctgctgtccctgctgttctccgagacctcctggcactacttcctgcacatctccctgggcctgggctccacccacctgacccgggaccgggtgcggaagtccatgtccgtggagcggaccttctccgagatcaacaaggccgaggagcagtactccctgtgccaggagctgtgctccgagctggcccaggacctgcagaaggagcggctgaagggccggaccgtgaccatcaagctgaagaacgtgaacttcgaggtgaagacccgggcctccaccgtgtcctccgtggtgtccaccgccgaggagatcttcgccatcgccaaggagctgctgaagaccgagatcgacgccgacttcccccaccccctgcggctgcggctgatgggcgtgcggatctcctccttccccaacgaggaggaccggaagcaccagcagtccggctccgagacccccggcacctccgagtccgccacccccgagtcccccaagaagaagcggaaggtgtccgagtccgccacccccgagtccgtgtccggctggcggctgttcaagaagatctcctagctagcaccagcctcaagaacacccgaatggagtctctaagctacataataccaacttacactttacaaaatgttgtcccccaaaatgtagccattcgtatctgctcctaataaaaagaaagtttcttcacattctctcgagaaaaaaaaaaaatggaaaaaaaaaaaacggaaaaaaaaaaaaggtaaaaaaaaaaaatataaaaaaaaaaaacataaaaaaaaaaaacgaaaaaaaaaaaacgtaaaaaaaaaaaactcaaaaaaaaaaaagataaaaaaaaaaaacctaaaaaaaaaaaatgtaaaaaaaaaaaagggaaaaaaaaaaaacgcaaaaaaaaaaaacacaaaaaaaaaaaatgcaaaaaaaaaaaatcgaaaaaaaaaaaatctaaaaaaaaaaaacgaaaaaaaaaaaacccaaaaaaaaaaaagacaaaaaaaaaaaatagaaaaaaaaaaagttaaaaaaaaaaaactgaaaaaaaaaaaatttaaaaaaaaaaaatctag

SEQ ID NO: 2579 - DNA, 6544 bp, synthetic construct
  misc_feature 1..6544: note = Synthetic
  source 1..6544: mol_type = other DNA
aggaagctcagaataaacgctcaactttggccggatctgccaccatgaagcggaccgccgacggctccgagttcgagtcccccaagaagaagcggaaggtggacaagaagtactccatcggcctggacatcggcaccaactccgtgggctgggccgtgatcaccgacgagtacaaggtgccctccaagaagttcaaggtgctgggcaacaccgaccggcactccatcaagaagaacctgatcggcgccctgctgttcgactccggcgagaccgccgaggccacccggctgaagcggaccgcccggcggcggtacacccggcggaagaaccggatctgctacctgcaggagatcttctccaacgagatggccaaggtggacgactccttcttccaccggctggaggagtccttcctggtggaggaggacaagaagcacgagcggcaccccatcttcggcaacatcgtggacgaggtggcctaccacgagaagtaccccaccatctaccacctgcggaagaagctggtggactccaccgacaaggccgacctgcggctgatctacctggccctggcccacatgatcaagttccggggccacttcctgatcgagggcgacctgaaccccgacaactccgacgtggacaagctgttcatccagctggtgcagacctacaaccagctgttcgaggagaaccccatcaacgcctccggcgtggacgccaaggccatcctgtccgcccggctgtccaagtcccggcggctggagaacctgatcgcccagctgcccggcgagaagaagaacggcctgttcggcaacctgatcgccctgtccctgggcctgacccccaacttcaagtccaacttcgacctggccgaggacgccaagctgcagctgtccaaggacacctacgacgacgacctggacaacctgctggcccagatcggcgaccagtacgccgacctgttcctggccgccaagaacctgtccgacgccatcctgctgtccgacatcctgcgggtgaacaccgagatcaccaaggcccccctgtccgcctccatgatcaagcggtacgacgagcaccaccaggacctgaccctgctgaaggccctggtgcggcagcagctgcccgagaagtacaaggagatcttcttcgaccagtccaagaacggctacgccggctacatcgacggcggcgcctcccaggaggagttctacaagttcatcaagcccatcctggagaagatggacggcaccgaggagctgctggtgaagctgaaccgggaggacctgctgcggaagcagcggaccttcgacaacggctccatcccccaccagatccacctgggcgagctgcacgccatcctgcggcggcaggaggacttctaccccttcctgaaggacaaccgggagaagatcgagaagatcctgaccttccggatcccctactacgtgggccccctggcccggggcaactcccggttcgcctggatgacccggaagtccgaggagaccatcaccccctggaacttcgaggaggtggtggacaagggcgcctccgcccagtccttcatcgagcggatgaccaacttcgacaagaacctgcccaacgagaaggtgctgcccaagcactccctgctgtacgagtacttcaccgtgtacaacgagctgaccaaggtgaagtacgtgaccgagggcatgcggaagcccgccttcctgtccggcgagcagaagaaggccatcgtggacctgctgttcaagaccaaccggaaggtgaccgtgaagcagctgaaggaggactacttcaagaagatcgagtgcttcgactccgtggagatctccggcgtggaggaccggttcaacgcctccctgggcacctaccacgacctgctgaagatcatcaaggacaaggacttcctggacaacgaggagaacgaggacatcctggaggacatcgtgctgaccctgaccctgttcgaggaccgggagatgatcgaggagcggctgaagacctacgcccacctgttcgacgacaaggtgatgaagcagctgaagcggcggcggtacaccggctggggccggctgtcccggaagctgatcaacggcatccgggacaagcagtccggcaagaccatcctggacttcctgaagtccgacggcttcgccaaccggaacttcatgcagctgatccacgacgactccctgaccttcaaggaggacatccagaaggcccaggtgtccggccagggcgactccctgcacgagcacatcgccaacctggccggctcccccgccatcaagaagggcatcctgcagaccgtgaaggtggtggacgagctggtgaaggtgatgggccggcacaagcccgagaacatcgtgatcgagatggcccgggagaaccagaccacccagaagggccagaagaactcccgggagcggatgaagcggatcgaggagggcatcaaggagctgggctcccagatcctgaaggagcaccccgtggagaacacccagctgcagaacgagaagctgtacctgtactacctgcagaacggccgggacatgtacgtggaccaggagctggacatcaaccggctgtccgactacgacgtggacgccatcgtgccccagtccttcctgaaggacgactccatcgacaacaaggtgctgacccggtccgacaagaaccggggcaagtccgacaacgtgccctccgaggaggtggtgaagaagatgaagaactactggcggcagctgctgaacgccaagctgatcacccagcggaagttcgacaacctgaccaaggccgagcggggcggcctgtccgagctggacaaggccggcttcatcaagcggcagctggtggagacccggcagatcaccaagcacgtggcccagatcctggactcccggatgaacaccaagtacgacgagaacgacaagctgatccgggaggtgaaggtgatcaccctgaagtccaagctggtgtccgacttccggaaggacttccagttctacaaggtgcgggagatcaacaactaccaccacgcccacgacgcctacctgaacgccgtggtgggcaccgccctgatcaagaagtaccccaagctggagtccgagttcgtgtacggcgactacaaggtgtacgacgtgcggaagatgatcgccaagtccgagcaggagatcggcaaggccaccgccaagtacttcttctactccaacatcatgaacttcttcaagaccgagatcaccctggccaacggcgagatccggaagcggcccctgatcgagaccaacggcgagaccggcgagatcgtgtgggacaagggccgggacttcgccaccgtgcggaaggtgctgtccatgccccaggtgaacatcgtgaagaagaccgaggtgcagaccggcggcttctccaaggagtccatcctgcccaagcggaactccgacaagctgatcgcccggaagaaggactgggaccccaagaagtacggcggcttcgactcccccaccgtggcctactccgtgctggtggtggccaaggtggagaagggcaagtccaagaagctgaagtccgtgaaggagctgctgggcatcaccatcatggagcggtcctccttcgagaagaaccccatcgacttcctggaggccaagggctacaaggaggtgaagaaggacctgatcatcaagctgcccaagtactccctgttcgagctggagaacggccggaagcggatgctggcctccgccggcgagctgcagaagggcaacgagctggccctgccctccaagtacgtgaacttcctgtacctggcctcccactacgagaagctgaagggctcccccgaggacaacgagcagaagcagctgttcgtggagcagcacaagcactacctggacgagatcatcgagcagatctccgagttctccaagcgggtgatcctggccgacgccaacctggacaaggtgctgtccgcctacaacaagcaccgggacaagcccatccgggagcaggccgagaacatcatccacctgttcaccctgaccaacctgggcgcccccgccgccttcaagtacttcgacaccaccatcgaccggaagcggtacacctccaccaaggaggtgctggacgccaccctgatccaccagtccatcaccggcctgtacgagacccggatcgacctgtcccagctgggcggcgacggtaccaaggacagcaccaaagatatcccggaaaccccgagcaaggaccccaagaagaagcggaaggtgggtaccaaggacagcaccaaagatatcccggaaaccccgagcaaggactccatggactccaccaaggagaagtgcgactcctacaaggacgacctgctgctgcggatgggcctgaacgacaacaaggccggcatggagggcctggacaaggagaagatcaacaagatcatcatggaggccaccaagggctcccggttctacggcaacgagctgaagaaggagaagcaggtgaaccagcggatcgagaacatgatgcagcagaaggcccagatcacctcccagcagctgcggaaggcccagctgcaggtggaccggttcgccatggagctggagcagtcccggaacctgtccaacaccatcgtgcacatcgacatggacgccttctacgccgccgtggagatgcgggacaaccccgagctgaaggacaagcccatcgccgtgggctccatgtccatgctgtccacctccaactaccacgcccggcggttcggcgtgcgggccgccatgcccggcttcatcgccaagcggctgtgcccccagctgatcatcgtgccccccaacttcgacaagtaccgggccgtgtccaaggaggtgaaggagatcctggccgactacgaccccaacttcatggccatgtccctggacgaggcctacctgaacatcaccaagcacctggaggagcggcagaactggcccgaggacaagcggcggtacttcatcaagatgggctcctccgtggagaacgacaaccccggcaaggaggtgaacaagctgtccgagcacgagcggtccatctcccccctgctgttcgaggagtccccctccgacgtgcagccccccggcgaccccttccaggtgaacttcgaggagcagaacaacccccagatcctgcagaactccgtggtgttcggcacctccgcccaggaggtggtgaaggagatccggttccggatcgagcagaagaccaccctgaccgcctccgccggcatcgcccccaacaccatgctggccaaggtgtgctccgacaagaacaagcccaacggccagtaccagatcctgcccaaccggcaggccgtgatggacttcatcaaggacctgcccatccggaaggtgtccggcatcggcaaggtgaccgagaagatgctgaaggccctgggcatcatcacctgcaccgagctgtaccagcagcgggccctgctgtccctgctgttctccgagacctcctggcactacttcctgcacatctccctgggcctgggctccacccacctgacccgggaccgggtgcggaagtccatgtccgtggagcggaccttctccgagatcaacaaggccgaggagcagtactccctgtgccaggagctgtgctccgagctggcccaggacctgcagaaggagcggctgaagggccggaccgtgaccatcaagctgaagaacgtgaacttcgaggtgaagacccgggcctccaccgtgtcctccgtggtgtccaccgccgaggagatcttcgccatcgccaaggagctgctgaagaccgagatcgacgccgacttcccccaccccctgcggctgcggctgatgggcgtgcggatctcctccttccccaacgaggaggaccggaagcaccagcagtccggctccgagacccccggcacctccgagtccgccacccccgagtcccccaagaagaagcggaaggtgtccgagtccgccacccccgagtccgtgtccggctggcggctgttcaagaagatctcctagctagcaccagcctcaagaacacccgaatggagtctctaagctacataataccaacttacactttacaaaatgttgtcccccaaaatgtagccattcgtatctgctcctaataaaaagaaagtttcttcacattctctcgagaaaaaaaaaaaatggaaaaaaaaaaaacggaaaaaaaaaaaaggtaaaaaaaaaaaatataaaaaaaaaaaacataaaaaaaaaaaacgaaaaaaaaaaaacgtaaaaaaaaaaaactcaaaaaaaaaaaagataaaaaaaaaaaacctaaaaaaaaaaaatgtaaaaaaaaaaaagggaaaaaaaaaaaacgcaaaaaaaaaaaacacaaaaaaaaaaaatgcaaaaaaaaaaaatcgaaaaaaaaaaaatctaaaaaaaaaaaacgaaaaaaaaaaaacccaaaaaaaaaaaagacaaaaaaaaaaaatagaaaaaaaaaaagttaaaaaaaaaaaactgaaaaaaaaaaaatttaaaaaaaaaaaatctag

SEQ ID NO: 2580 - DNA, 6641 bp, synthetic construct
  misc_feature 1..6641: note = Synthetic
  source 1..6641: mol_type = other DNA
aggactcactatttgttttcgcgcccagttgcaaaaagtgtcgaagctcagaataaacgctcaactttggccggatctgccaccatgggcaagcggaccgccgacggctccgagttcgagtcccccaagaagaagcggaaggtggacaagaagtactccatcggcctggacatcggcaccaactccgtgggctgggccgtgatcaccgacgagtacaaggtgccctccaagaagttcaaggtgctgggcaacaccgaccggcactccatcaagaagaacctgatcggcgccctgctgttcgactccggcgagaccgccgaggccacccggctgaagcggaccgcccggcggcggtacacccggcggaagaaccggatctgctacctgcaggagatcttctccaacgagatggccaaggtggacgactccttcttccaccggctggaggagtccttcctggtggaggaggacaagaagcacgagcggcaccccatcttcggcaacatcgtggacgaggtggcctaccacgagaagtaccccaccatctaccacctgcggaagaagctggtggactccaccgacaaggccgacctgcggctgatctacctggccctggcccacatgatcaagttccggggccacttcctgatcgagggcgacctgaaccccgacaactccgacgtggacaagctgttcatccagctggtgcagacctacaaccagctgttcgaggagaaccccatcaacgcctccggcgtggacgccaaggccatcctgtccgcccggctgtccaagtcccggcggctggagaacctgatcgcccagctgcccggcgagaagaagaacggcctgttcggcaacctgatcgccctgtccctgggcctgacccccaacttcaagtccaacttcgacctggccgaggacgccaagctgcagctgtccaaggacacctacgacgacgacctggacaacctgctggcccagatcggcgaccagtacgccgacctgttcctggccgccaagaacctgtccgacgccatcctgctgtccgacatcctgcgggtgaacaccgagatcaccaaggcccccctgtccgcctccatgatcaagcggtacgacgagcaccaccaggacctgaccctgctgaaggccctggtgcggcagcagctgcccgagaagtacaaggagatcttcttcgaccagtccaagaacggctacgccggctacatcgacggcggcgcctcccaggaggagttctacaagttcatcaagcccatcctggagaagatggacggcaccgaggagctgctggtgaagctgaaccgggaggacctgctgcggaagcagcggaccttcgacaacggctccatcccccaccagatccacctgggcgagctgcacgccatcctgcggcggcaggaggacttctaccccttcctgaaggacaaccgggagaagatcgagaagatcctgaccttccggatcccctactacgtgggccccctggcccggggcaactcccggttcgcctggatgacccggaagtccgaggagaccatcaccccctggaacttcgaggaggtggtggacaagggcgcctccgcccagtccttcatcgagcggatgaccaacttcgacaagaacctgcccaacgagaaggtgctgcccaagcactccctgctgtacgagtacttcaccgtgtacaacgagctgaccaaggtgaagtacgtgaccgagggcatgcggaagcccgccttcctgtccggcgagcagaagaaggccatcgtggacctgctgttcaagaccaaccggaaggtgaccgtgaagcagctgaaggaggactacttcaagaagatcgagtgcttcgactccgtggagatctccggcgtggaggaccggttcaacgcctccctgggcacctaccacgacctgctgaagatcatcaaggacaaggacttcctggacaacgaggagaacgaggacatcctggaggacatcgtgctgaccctgaccctgttcgaggaccgggagatgatcgaggagcggctgaagacctacgcccacctgttcgacgacaaggtgatgaagcagctgaagcggcggcggtacaccggctggggccggctgtcccggaagctgatcaacggcatccgggacaagcagtccggcaagaccatcctggacttcctgaagtccgacggcttcgccaaccggaacttcatgcagctgatccacgacgactccctgaccttcaaggaggacatccagaaggcccaggtgtccggccagggcgactccctgcacgagcacatcgccaacctggccggctcccccgccatcaagaagggcatcctgcagaccgtgaaggtggtggacgagctggtgaaggtgatgggccggcacaagcccgagaacatcgtgatcgagatggcccgggagaaccagaccacccagaagggccagaagaactcccgggagcggatgaagcggatcgaggagggcatcaaggagctgggctcccagatcctgaaggagcaccccgtggagaacacccagctgcagaacgagaagctgtacctgtactacctgcagaacggccgggacatgtacgtggaccaggagctggacatcaaccggctgtccgactacgacgtggacgccatcgtgccccagtccttcctgaaggacgactccatcgacaacaaggtgctgacccggtccgacaagaaccggggcaagtccgacaacgtgccctccgaggaggtggtgaagaagatgaagaactactggcggcagctgctgaacgccaagctgatcacccagcggaagttcgacaacctgaccaaggccgagcggggcggcctgtccgagctggacaaggccggcttcatcaagcggcagctggtggagacccggcagatcaccaagcacgtggcccagatcctggactcccggatgaacaccaagtacgacgagaacgacaagctgatccgggaggtgaaggtgatcaccctgaagtccaagctggtgtccgacttccggaaggacttccagttctacaaggtgcgggagatcaacaactaccaccacgcccacgacgcctacctgaacgccgtggtgggcaccgccctgatcaagaagtaccccaagctggagtccgagttcgtgtacggcgactacaaggtgtacgacgtgcggaagatgatcgccaagtccgagcaggagatcggcaaggccaccgccaagtacttcttctactccaacatcatgaacttcttcaagaccgagatcaccctggccaacggcgagatccggaagcggcccctgatcgagaccaacggcgagaccggcgagatcgtgtgggacaagggccgggacttcgccaccgtgcggaaggtgctgtccatgccccaggtgaacatcgtgaagaagaccgaggtgcagaccggcggcttctccaaggagtccatcctgcccaagcggaactccgacaagctgatcgcccggaagaaggactgggaccccaagaagtacggcggcttcgactcccccaccgtggcctactccgtgctggtggtggccaaggtggagaagggcaagtccaagaagctgaagtccgtgaaggagctgctgggcatcaccatcatggagcggtcctccttcgagaagaaccccatcgacttcctggaggccaagggctacaaggaggtgaagaaggacctgatcatcaagctgcccaagtactccctgttcgagctggagaacggccggaagcggatgctggcctccgccggcgagctgcagaagggcaacgagctggccctgccctccaagtacgtgaacttcctgtacctggcctcccactacgagaagctgaagggctcccccgaggacaacgagcagaagcagctgttcgtggagcagcacaagcactacctggacgagatcatcgagcagatctccgagttctccaagcgggtgatcctggccgacgccaacctggacaaggtgctgtccgcctacaacaagcaccgggacaagcccatccgggagcaggccgagaacatcatccacctgttcaccctgaccaacctgggcgcccccgccgccttcaagtacttcgacaccaccatcgaccggaagcggtacacctccaccaaggaggtgctggacgccaccctgatccaccagtccatcaccggcctgtacgagacccggatcgacctgtcccagctgggcggcgactccggcggctcctccggcggctccaagcggaccgccgacggctccgagttcgagtcccccaagaagaagcggaaggtgtccggcggctcctccggcggctccatggactccaccaaggagaagtgcgactcctacaaggacgacctgctgctgcggatgggcctgaacgacaacaaggccggcatggagggcctggacaaggagaagatcaacaagatcatcatggaggccaccaagggctcccggttctacggcaacgagctgaagaaggagaagcaggtgaaccagcggatcgagaacatgatgcagcagaaggcccagatcacctcccagcagctgcggaaggcccagctgcaggtggaccggttcgccatggagctggagcagtcccggaacctgtccaacaccatcgtgcacatcgacatggacgccttctacgccgccgtggagatgcgggacaaccccgagctgaaggacaagcccatcgccgtgggctccatgtccatgctgtccacctccaactaccacgcccggcggttcggcgtgcgggccgccatgcccggcttcatcgccaagcggctgtgcccccagctgatcatcgtgccccccaacttcgacaagtaccgggccgtgtccaaggaggtgaaggagatcctggccgactacgaccccaacttcatggccatgtccctggacgaggcctacctgaacatcaccaagcacctggaggagcggcagaactggcccgaggacaagcggcggtacttcatcaagatgggctcctccgtggagaacgacaaccccggcaaggaggtgaacaagctgtccgagcacgagcggtccatctcccccctgctgttcgaggagtccccctccgacgtgcagccccccggcgaccccttccaggtgaacttcgaggagcagaacaacccccagatcctgcagaactccgtggtgttcggcacctccgcccaggaggtggtgaaggagatccggttccggatcgagcagaagaccaccctgaccgcctccgccggcatcgcccccaacaccatgctggccaaggtgtgctccgacaagaacaagcccaacggccagtaccagatcctgcccaaccggcaggccgtgatggacttcatcaaggacctgcccatccggaaggtgtccggcatcggcaaggtgaccgagaagatgctgaaggccctgggcatcatcacctgcaccgagctgtaccagcagcgggccctgctgtccctgctgttctccgagacctcctggcactacttcctgcacatctccctgggcctgggctccacccacctgacccgggaccgggtgcggaagtccatgtccgtggagcggaccttctccgagatcaacaaggccgaggagcagtactccctgtgccaggagctgtgctccgagctggcccaggacctgcagaaggagcggctgaagggccggaccgtgaccatcaagctgaagaacgtgaacttcgaggtgaagacccgggcctccaccgtgtcctccgtggtgtccaccgccgaggagatcttcgccatcgccaaggagctgctgaagaccgagatcgacgccgacttcccccaccccctgcggctgcggctgatgggcgtgcggatctcctccttccccaacgaggaggaccggaagcaccagcagggcggcggctccggcaagcggaccgccgacggctccggcggcggctcccccaagaagaagcggaaggtgggcggcggctccggcaagcggaccgccgacggctccggcggcggctccatcgccgccctggagaaggagatcgccgccctggagaaggagaacgccgccctggagtgggagatcgccgccctggagaagtagctagcaccagcctcaagaacacccgaatggagtctctaagctacataataccaacttacactttacaaaatgttgtcccccaaaatgtagccattcgtatctgctcctaataaaaagaaagtttcttcacattctctcgagaaaaaaaaaaaatggaaaaaaaaaaaacggaaaaaaaaaaaaggtaaaaaaaaaaaatataaaaaaaaaaaacataaaaaaaaaaaacgaaaaaaaaaaaacgtaaaaaaaaaaaactcaaaaaaaaaaaagataaaaaaaaaaaacctaaaaaaaaaaaatgtaaaaaaaaaaaagggaaaaaaaaaaaacgcaaaaaaaaaaaacacaaaaaaaaaaaatgcaaaaaaaaaaaatcgaaaaaaaaaaaatctaaaaaaaaaaaacgaaaaaaaaaaaacccaaaaaaaaaaaagacaaaaaaaaaaaatagaaaaaaaaaaagttaaaaaaaaaaaactgaaaaaaaaaaaatttaaaaaaaaaaaatctag

SEQ ID NO: 2581 - DNA, 6641 bp, synthetic construct
  misc_feature 1..6641: note = Synthetic
  source 1..6641: mol_type = other DNA
aggactcactatttgttttcgcgcccagttgcaaaaagtgtcgaagctcagaataaacgctcaactttggccggatctgccaccatgggcaagcggaccgccgacggctccgagttcgagtcccccaagaagaagcggaaggtggacaagaagtactccatcggcctggacatcggcaccaactccgtgggctgggccgtgatcaccgacgagtacaaggtgccctccaagaagttcaaggtgctgggcaacaccgaccggcactccatcaagaagaacctgatcggcgccctgctgttcgactccggcgagaccgccgaggccacccggctgaagcggaccgcccggcggcggtacacccggcggaagaaccggatctgctacctgcaggagatcttctccaacgagatggccaaggtggacgactccttcttccaccggctggaggagtccttcctggtggaggaggacaagaagcacgagcggcaccccatcttcggcaacatcgtggacgaggtggcctaccacgagaagtaccccaccatctaccacctgcggaagaagctggtggactccaccgacaaggccgacctgcggctgatctacctggccctggcccacatgatcaagttccggggccacttcctgatcgagggcgacctgaaccccgacaactccgacgtggacaagctgttcatccagctggtgcagacctacaaccagctgttcgaggagaaccccatcaacgcctccggcgtggacgccaaggccatcctgtccgcccggctgtccaagtcccggcggctggagaacctgatcgcccagctgcccggcgagaagaagaacggcctgttcggcaacctgatcgccctgtccctgggcctgacccccaacttcaagtccaacttcgacctggccgaggacgccaagctgcagctgtccaaggacacctacgacgacgacctggacaacctgctggcccagatcggcgaccagtacgccgacctgttcctggccgccaagaacctgtccgacgccatcctgctgtccgacatcctgcgggtgaacaccgagatcaccaaggcccccctgtccgcctccatgatcaagcggtacgacgagcaccaccaggacctgaccctgctgaaggccctggtgcggcagcagctgcccgagaagtacaaggagatcttcttcgaccagtccaagaacggctacgccggctacatcgacggcggcgcctcccaggaggagttctacaagttcatcaagcccatcctggagaagatggacggcaccgaggagctgctggtgaagctgaaccgggaggacctgctgcggaagcagcggaccttcgacaacggctccatcccccaccagatccacctgggcgagctgcacgccatcctgcggcggcaggaggacttctaccccttcctgaaggacaaccgggagaagatcgagaagatcctgaccttccggatcccctactacgtgggccccctggcccggggcaactcccggttcgcctggatgacccggaagtccgaggagaccatcaccccctggaacttcgaggaggtggtggacaagggcgcctccgcccagtccttcatcgagcggatgaccaacttcgacaagaacctgcccaacgagaaggtgctgcccaagcactccctgctgtacgagtacttcaccgtgtacaacgagctgaccaaggtgaagtacgtgaccgagggcatgcggaagcccgccttcctgtccggcgagcagaagaaggccatcgtggacctgctgttcaagaccaaccggaaggtgaccgtgaagcagctgaaggaggactacttcaagaagatcgagtgcttcgactccgtggagatctccggcgtggaggaccggttcaacgcctccctgggcacctaccacgacctgctgaagatcatcaaggacaaggacttcctggacaacgaggagaacgaggacatcctggaggacatcgtgctgaccctgaccctgttcgaggaccgggagatgatcgaggagcggctgaagacctacgcccacctgttcgacgacaaggtgatgaagcagctgaagcggcggcggtacaccggctggggccggctgtcccggaagctgatcaacggcatccgggacaagcagtccggcaagaccatcctggacttcctgaagtccgacggcttcgccaaccggaacttcatgcagctgatccacgacgactccctgaccttcaaggaggacatccagaaggcccaggtgtccggccagggcgactccctgcacgagcacatcgccaacctggccggctcccccgccatcaagaagggcatcctgcagaccgtgaaggtggtggacgagctggtgaaggtgatgggccggcacaagcccgagaacatcgtgatcgagatggcccgggagaaccagaccacccagaagggccagaagaactcccgggagcggatgaagcggatcgaggagggcatcaaggagctgggctcccagatcctgaaggagcaccccgtggagaacacccagctgcagaacgagaagctgtacctgtactacctgcagaacggccgggacatgtacgtggaccaggagctggacatcaaccggctgtccgactacgacgtggacgccatcgtgccccagtccttcctgaaggacgactccatcgacaacaaggtgctgacccggtccgacaagaaccggggcaagtccgacaacgtgccctccgaggaggtggtgaagaagatgaagaactactggcggcagctgctgaacgccaagctgatcacccagcggaagttcgacaacctgaccaaggccgagcggggcggcctgtccgagctggacaaggccggcttcatcaagcggcagctggtggagacccggcagatcaccaagcacgtggcccagatcctggactcccggatgaacaccaagtacgacgagaacgacaagctgatccgggaggtgaaggtgatcaccctgaagtccaagctggtgtccgacttccggaaggacttccagttctacaaggtgcgggagatcaacaactaccaccacgcccacgacgcctacctgaacgccgtggtgggcaccgccctgatcaagaagtaccccaagctggagtccgagttcgtgtacggcgactacaaggtgtacgacgtgcggaagatgatcgccaagtccgagcaggagatcggcaaggccaccgccaagtacttcttctactccaacatcatgaacttcttcaagaccgagatcaccctggccaacggcgagatccggaagcggcccctgatcgagaccaacggcgagaccggcgagatcgtgtgggacaagggccgggacttcgccaccgtgcggaaggtgctgtccatgccccaggtgaacatcgtgaagaagaccgaggtgcagaccggcggcttctccaaggagtccatcctgcccaagcggaactccgacaagctgatcgcccggaagaaggactgggaccccaagaagtacggcggcttcgactcccccaccgtggcctactccgtgctggtggtggccaaggtggagaagggcaagtccaagaagctgaagtccgtgaaggagctgctgggcatcaccatcatggagcggtcctccttcgagaagaaccccatcgacttcctggaggccaagggctacaaggaggtgaagaaggacctgatcatcaagctgcccaagtactccctgttcgagctggagaacggccggaagcggatgctggcctccgccggcgagctgcagaagggcaacgagctggccctgccctccaagtacgtgaacttcctgtacctggcctcccactacgagaagctgaagggctcccccgaggacaacgagcagaagcagctgttcgtggagcagcacaagcactacctggacgagatcatcgagcagatctccgagttctccaagcgggtgatcctggccgacgccaacctggacaaggtgctgtccgcctacaacaagcaccgggacaagcccatccgggagcaggccgagaacatcatccacctgttcaccctgaccaacctgggcgcccccgccgccttcaagtacttcgacaccaccatcgaccggaagcggtacacctccaccaaggaggtgctggacgccaccctgatccaccagtccatcaccggcctgtacgagacccggatcgacctgtcccagctgggcggcgactccggcggctcctccggcggctccaagcggaccgccgacggctccgagttcgagtcccccaagaagaagcggaaggtgtccggcggctcctccggcggctccatggactccaccaaggagaagtgcgactcctacaaggacgacctgctgctgcggatgggcctgaacgacaacaaggccggcatggagggcctggacaaggagaagatcaacaagatcatcatggaggccaccaagggctcccggttctacggcaacgagctgaagaaggagaagcaggtgaaccagcggatcgagaacatgatgcagcagaaggcccagatcacctcccagcagctgcggaaggcccagctgcaggtggaccggttcgccatggagctggagcagtcccggaacctgtccaacaccatcgtgcacatcgacatggacgccttctacgccgccgtggagatgcgggacaaccccgagctgaaggacaagcccatcgccgtgggctccatgtccatgctgtccacctccaactaccacgcccggcggttcggcgtgcgggccgccatgcccggcttcatcgccaagcggctgtgcccccagctgatcatcgtgccccccaacttcgacaagtaccgggccgtgtccaaggaggtgaaggagatcctggccgactacgaccccaacttcatggccatgtccctggacgaggcctacctgaacatcaccaagcacctggaggagcggcagaactggcccgaggacaagcggcggtacttcatcaagatgggctcctccgtggagaacgacaaccccggcaaggaggtgaacaagctgtccgagcacgagcggtccatctcccccctgctgttcgaggagtccccctccgacgtgcagccccccggcgaccccttccaggtgaacttcgaggagcagaacaacccccagatcctgcagaactccgtggtgttcggcacctccgcccaggaggtggtgaaggagatccggttccggatcgagcagaagaccaccctgaccgcctccgccggcatcgcccccaacaccatgctggccaaggtgtgctccgacaagaacaagcccaacggccagtaccagatcctgcccaaccggcaggccgtgatggacttcatcaaggacctgcccatccggaaggtgtccggcatcggcaaggtgaccgagaagatgctgaaggccctgggcatcatcacctgcaccgagctgtaccagcagcgggccctgctgtccctgctgttctccgagacctcctggcactacttcctgcacatctccctgggcctgggctccacccacctgacccgggaccgggtgcggaagtccatgtccgtggagcggaccttctccgagatcaacaaggccgaggagcagtactccctgtgccaggagctgtgctccgagctggcccaggacctgcagaaggagcggctgaagggccggaccgtgaccatcaagctgaagaacgtgaacttcgaggtgaagacccgggcctccaccgtgtcctccgtggtgtccaccgccgaggagatcttcgccatcgccaaggagctgctgaagaccgagatcgacgccgacttcccccaccccctgcggctgcggctgatgggcgtgcggatctcctccttccccaacgaggaggaccggaagcaccagcagtccggctccgagacccccggcacctccgagtccgccacccccgagtcccccaagaagaagcggaaggtgtccggctccgagacccccggcacctccgagtccgccacccccgagtccatcgccgccctggagaaggagatcgccgccctggagaaggagaacgccgccctggagtgggagatcgccgccctggagaagtagctagcaccagcctcaagaacacccgaatggagtctctaagctacataataccaacttacactttacaaaatgttgtcccccaaaatgtagccattcgtatctgctcctaataaaaagaaagtttcttcacattctctcgagaaaaaaaaaaaatggaaaaaaaaaaaacggaaaaaaaaaaaaggtaaaaaaaaaaaatataaaaaaaaaaaacataaaaaaaaaaaacgaaaaaaaaaaaacgtaaaaaaaaaaaactcaaaaaaaaaaaagataaaaaaaaaaaacctaaaaaaaaaaaatgtaaaaaaaaaaaagggaaaaaaaaaaaacgcaaaaaaaaaaaacacaaaaaaaaaaaatgcaaaaaaaaaaaatcgaaaaaaaaaaaatctaaaaaaaaaaaacgaaaaaaaaaaaacccaaaaaaaaaaaagacaaaaaaaaaaaatagaaaaaaaaaaagttaaaaaaaaaaaactgaaaaaaaaaaaatttaaaaaaaaaaaatctag

SEQ ID NO: 2582 - DNA, 6641 bp, synthetic construct
  misc_feature 1..6641: note = Synthetic
  source 1..6641: mol_type = other DNA
aggactcactatttgttttcgcgcccagttgcaaaaagtgtcgaagctcagaataaacgctcaactttggccggatctgccaccatgggcaagcggaccgccgacggctccgagttcgagtcccccaagaagaagcggaaggtggacaagaagtactccatcggcctggacatcggcaccaactccgtgggctgggccgtgatcaccgacgagtacaaggtgccctccaagaagttcaaggtgctgggcaacaccgaccggcactccatcaagaagaacctgatcggcgccctgctgttcgactccggcgagaccgccgaggccacccggctgaagcggaccgcccggcggcggtacacccggcggaagaaccggatctgctacctgcaggagatcttctccaacgagatggccaaggtggacgactccttcttccaccggctggaggagtccttcctggtggaggaggacaagaagcacgagcggcaccccatcttcggcaacatcgtggacgaggtggcctaccacgagaagtaccccaccatctaccacctgcggaagaagctggtggactccaccgacaaggccgacctgcggctgatctacctggccctggcccacatgatcaagttccggggccacttcctgatcgagggcgacctgaaccccgacaactccgacgtggacaagctgttcatccagctggtgcagacctacaaccagctgttcgaggagaaccccatcaacgcctccggcgtggacgccaaggccatcctgtccgcccggctgtccaagtcccggcggctggagaacctgatcgcccagctgcccggcgagaagaagaacggcctgttcggcaacctgatcgccctgtccctgggcctgacccccaacttcaagtccaacttcgacctggccgaggacgccaagctgcagctgtccaaggacacctacgacgacgacctggacaacctgctggcccagatcggcgaccagtacgccgacctgttcctggccgccaagaacctgtccgacgccatcctgctgtccgacatcctgcgggtgaacaccgagatcaccaaggcccccctgtccgcctccatgatcaagcggtacgacgagcaccaccaggacctgaccctgctgaaggccctggtgcggcagcagctgcccgagaagtacaaggagatcttcttcgaccagtccaagaacggctacgccggctacatcgacggcggcgcctcccaggaggagttctacaagttcatcaagcccatcctggagaagatggacggcaccgaggagctgctggtgaagctgaaccgggaggacctgctgcggaagcagcggaccttcgacaacggctccatcccccaccagatccacctgggcgagctgcacgccatcctgcggcggcaggaggacttctaccccttcctgaaggacaaccgggagaagatcgagaagatcctgaccttccggatcccctactacgtgggccccctggcccggggcaactcccggttcgcctggatgacccggaagtccgaggagaccatcaccccctggaacttcgaggaggtggtggacaagggcgcctccgcccagtccttcatcgagcggatgaccaacttcgacaagaacctgcccaacgagaaggtgctgcccaagcactccctgctgtacgagtacttcaccgtgtacaacgagctgaccaaggtgaagtacgtgaccgagggcatgcggaagcccgccttcctgtccggcgagcagaagaaggccatcgtggacctgctgttcaagaccaaccggaaggtgaccgtgaagcagctgaaggaggactacttcaagaagatcgagtgcttcgactccgtggagatctccggcgtggaggaccggttcaacgcctccctgggcacctaccacgacctgctgaagatcatcaaggacaaggacttcctggacaacgaggagaacgaggacatcctggaggacatcgtgctgaccctgaccctgttcgaggaccgggagatgatcgaggagcggctgaagacctacgcccacctgttcgacgacaaggtgatgaagcagctgaagcggcggcggtacaccggctggggccggctgtcccggaagctgatcaacggcatccgggacaagcagtccggcaagaccatcctggacttcctgaagtccgacggcttcgccaaccggaacttcatgcagctgatccacgacgactccctgaccttcaaggaggacatccagaaggcccaggtgtccggccagggcgactccctgcacgagcacatcgccaacctggccggctcccccgccatcaagaagggcatcctgcagaccgtgaaggtggtggacgagctggtgaaggtgatgggccggcacaagcccgagaacatcgtgatcgagatggcccgggagaaccagaccacccagaagggccagaagaactcccgggagcggatgaagcggatcgaggagggcatcaaggagctgggctcccagatcctgaaggagcaccccgtggagaacacccagctgcagaacgagaagctgtacctgtactacctgcagaacggccgggacatgtacgtggaccaggagctggacatcaaccggctgtccgactacgacgtggacgccatcgtgccccagtccttcctgaaggacgactccatcgacaacaaggtgctgacccggtccgacaagaaccggggcaagtccgacaacgtgccctccgaggaggtggtgaagaagatgaagaactactggcggcagctgctgaacgccaagctgatcacccagcggaagttcgacaacctgaccaaggccgagcggggcggcctgtccgagctggacaaggccggcttcatcaagcggcagctggtggagacccggcagatcaccaagcacgtggcccagatcctggactcccggatgaacaccaagtacgacgagaacgacaagctgatccgggaggtgaaggtgatcaccctgaagtccaagctggtgtccgacttccggaaggacttccagttctacaaggtgcgggagatcaacaactaccaccacgcccacgacgcctacctgaacgccgtggtgggcaccgccctgatcaagaagtaccccaagctggagtccgagttcgtgtacggcgactacaaggtgtacgacgtgcggaagatgatcgccaagtccgagcaggagatcggcaaggccaccgccaagtacttcttctactccaacatcatgaacttcttcaagaccgagatcaccctggccaacggcgagatccggaagcggcccctgatcgagaccaacggcgagaccggcgagatcgtgtgggacaagggccgggacttcgccaccgtgcggaaggtgctgtccatgccccaggtgaacatcgtgaagaagaccgaggtgcagaccggcggcttctccaaggagtccatcctgcccaagcggaactccgacaagctgatcgcccggaagaaggactgggaccccaagaagtacggcggcttcgactcccccaccgtggcctactccgtgctggtggtggccaaggtggagaagggcaagtccaagaagctgaagtccgtgaaggagctgctgggcatcaccatcatggagcggtcctccttcgagaagaaccccatcgacttcctggaggccaagggctacaaggaggtgaagaaggacctgatcatcaagctgcccaagtactccctgttcgagctggagaacggccggaagcggatgctggcctccgccggcgagctgcagaagggcaacgagctggccctgccctccaagtacgtgaacttcctgtacctggcctcccactacgagaagctgaagggctcccccgaggacaacgagcagaagcagctgttcgtggagcagcacaagcactacctggacgagatcatcgagcagatctccgagttctccaagcgggtgatcctggccgacgccaacctggacaaggtgctgtccgcctacaacaagcaccgggacaagcccatccgggagcaggccgagaacatcatccacctgttcaccctgaccaacctgggcgcccccgccgccttcaagtacttcgacaccaccatcgaccggaagcggtacacctccaccaaggaggtgctggacgccaccctgatccaccagtccatcaccggcctgtacgagacccggatcgacctgtcccagctgggcggcgactccggcggctcctccggcggctccaagcggaccgccgacggctccgagttcgagtcccccaagaagaagcggaaggtgtccggcggctcctccggcggctccatggactccaccaaggagaagtgcgactcctacaaggacgacctgctgctgcggatgggcctgaacgacaacaaggccggcatggagggcctggacaaggagaagatcaacaagatcatcatggaggccaccaagggctcccggttctacggcaacgagctgaagaaggagaagcaggtgaaccagcggatcgagaacatgatgcagcagaaggcccagatcacctcccagcagctgcggaaggcccagctgcaggtggaccggttcgccatggagctggagcagtcccggaacctgtccaacaccatcgtgcacatcgacatggacgccttctacgccgccgtggagatgcgggacaaccccgagctgaaggacaagcccatcgccgtgggctccatgtccatgctgtccacctccaactaccacgcccggcggttcggcgtgcgggccgccatgcccggcttcatcgccaagcggctgtgcccccagctgatcatcgtgccccccaacttcgacaagtaccgggccgtgtccaaggaggtgaaggagatcctggccgactacgaccccaacttcatggccatgtccctggacgaggcctacctgaacatcaccaagcacctggaggagcggcagaactggcccgaggacaagcggcggtacttcatcaagatgggctcctccgtggagaacgacaaccccggcaaggaggtgaacaagctgtccgagcacgagcggtccatctcccccctgctgttcgaggagtccccctccgacgtgcagccccccggcgaccccttccaggtgaacttcgaggagcagaacaacccccagatcctgcagaactccgtggtgttcggcacctccgcccaggaggtggtgaaggagatccggttccggatcgagcagaagaccaccctgaccgcctccgccggcatcgcccccaacaccatgctggccaaggtgtgctccgacaagaacaagcccaacggccagtaccagatcctgcccaaccggcaggccgtgatggacttcatcaaggacctgcccatccggaaggtgtccggcatcggcaaggtgaccgagaagatgctgaaggccctgggcatcatcacctgcaccgagctgtaccagcagcgggccctgctgtccctgctgttctccgagacctcctggcactacttcctgcacatctccctgggcctgggctccacccacctgacccgggaccgggtgcggaagtccatgtccgtggagcggaccttccgggagatcaacaaggccgaggagcagtactccctgtgccaggagctgtgctccgagctggcccaggacctgcagaaggagcggctgaagggccggaccgtgaccatcaagctgaagaacgtgaacttcgaggtgaagacccgggcctccaccgtgtcctccgtggtgtccaccgccgaggagatcttcgccatcgccaaggagctgctgaagaccgagatcgacgccgacttcccccaccccctgcggctgcggctgatgggcgtgcggatctcctccttccccaacgaggaggaccggaagcaccagcagtccggctccgagacccccggcacctccgagtccgccacccccgagtccatcgccgccctggagaaggagatcgccgccctggagaaggagaacgccgccctggagtgggagatcgccgccctggagaagtccggctccgagacccccggcacctccgagtccgccacccccgagtcccccaagaagaagcggaaggtgtagctagcaccagcctcaagaacacccgaatggagtctctaagctacataataccaacttacactttacaaaatgttgtcccccaaaatgtagccattcgtatctgctcctaataaaaagaaagtttcttcacattctctcgagaaaaaaaaaaaatggaaaaaaaaaaaacggaaaaaaaaaaaaggtaaaaaaaaaaaatataaaaaaaaaaaacataaaaaaaaaaaacgaaaaaaaaaaaacgtaaaaaaaaaaaactcaaaaaaaaaaaagataaaaaaaaaaaacctaaaaaaaaaaaatgtaaaaaaaaaaaagggaaaaaaaaaaaacgcaaaaaaaaaaaacacaaaaaaaaaaaatgcaaaaaaaaaaaatcgaaaaaaaaaaaatctaaaaaaaaaaaacgaaaaaaaaaaaacccaaaaaaaaaaaagacaaaaaaaaaaaatagaaaaaaaaaaagttaaaaaaaaaaaactgaaaaaaaaaaaatttaaaaaaaaaaaatctag

SEQ ID NO: 2583 - DNA, 6683 bp, synthetic construct
  misc_feature 1..6683: note = Synthetic
  source 1..6683: mol_type = other DNA
aggactcactatttgttttcgcgcccagttgcaaaaagtgtcgaagctcagaataaacgctcaactttggccggatctgccaccatgggcaagcggaccgccgacggctccgagttcgagtcccccaagaagaagcggaaggtggacaagaagtactccatcggcctggacatcggcaccaactccgtgggctgggccgtgatcaccgacgagtacaaggtgccctccaagaagttcaaggtgctgggcaacaccgaccggcactccatcaagaagaacctgatcggcgccctgctgttcgactccggcgagaccgccgaggccacccggctgaagcggaccgcccggcggcggtacacccggcggaagaaccggatctgctacctgcaggagatcttctccaacgagatggccaaggtggacgactccttcttccaccggctggaggagtccttcctggtggaggaggacaagaagcacgagcggcaccccatcttcggcaacatcgtggacgaggtggcctaccacgagaagtaccccaccatctaccacctgcggaagaagctggtggactccaccgacaaggccgacctgcggctgatctacctggccctggcccacatgatcaagttccggggccacttcctgatcgagggcgacctgaaccccgacaactccgacgtggacaagctgttcatccagctggtgcagacctacaaccagctgttcgaggagaaccccatcaacgcctccggcgtggacgccaaggccatcctgtccgcccggctgtccaagtcccggcggctggagaacctgatcgcccagctgcccggcgagaagaagaacggcctgttcggcaacctgatcgccctgtccctgggcctgacccccaacttcaagtccaacttcgacctggccgaggacgccaagctgcagctgtccaaggacacctacgacgacgacctggacaacctgctggcccagatcggcgaccagtacgccgacctgttcctggccgccaagaacctgtccgacgccatcctgctgtccgacatcctgcgggtgaacaccgagatcaccaaggcccccctgtccgcctccatgatcaagcggtacgacgagcaccaccaggacctgaccctgctgaaggccctggtgcggcagcagctgcccgagaagtacaaggagatcttcttcgaccagtccaagaacggctacgccggctacatcgacggcggcgcctcccaggaggagttctacaagttcatcaagcccatcctggagaagatggacggcaccgaggagctgctggtgaagctgaaccgggaggacctgctgcggaagcagcggaccttcgacaacggctccatcccccaccagatccacctgggcgagctgcacgccatcctgcggcggcaggaggacttctaccccttcctgaaggacaaccgggagaagatcgagaagatcctgaccttccggatcccctactacgtgggccccctggcccggggcaactcccggttcgcctggatgacccggaagtccgaggagaccatcaccccctggaacttcgaggaggtggtggacaagggcgcctccgcccagtccttcatcgagcggatgaccaacttcgacaagaacctgcccaacgagaaggtgctgcccaagcactccctgctgtacgagtacttcaccgtgtacaacgagctgaccaaggtgaagtacgtgaccgagggcatgcggaagcccgccttcctgtccggcgagcagaagaaggccatcgtggacctgctgttcaagaccaaccggaaggtgaccgtgaagcagctgaaggaggactacttcaagaagatcgagtgcttcgactccgtggagatctccggcgtggaggaccggttcaacgcctccctgggcacctaccacgacctgctgaagatcatcaaggacaaggacttcctggacaacgaggagaacgaggacatcctggaggacatcgtgctgaccctgaccctgttcgaggaccgggagatgatcgaggagcggctgaagacctacgcccacctgttcgacgacaaggtgatgaagcagctgaagcggcggcggtacaccggctggggccggctgtcccggaagctgatcaacggcatccgggacaagcagtccggcaagaccatcctggacttcctgaagtccgacggcttcgccaaccggaacttcatgcagctgatccacgacgactccctgaccttcaaggaggacatccagaaggcccaggtgtccggccagggcgactccctgcacgagcacatcgccaacctggccggctcccccgccatcaagaagggcatcctgcagaccgtgaaggtggtggacgagctggtgaaggtgatgggccggcacaagcccgagaacatcgtgatcgagatggcccgggagaaccagaccacccagaagggccagaagaactcccgggagcggatgaagcggatcgaggagggcatcaaggagctgggctcccagatcctgaaggagcaccccgtggagaacacccagctgcagaacgagaagctgtacctgtactacctgcagaacggccgggacatgtacgtggaccaggagctggacatcaaccggctgtccgactacgacgtggacgccatcgtgccccagtccttcctgaaggacgactccatcgacaacaaggtgctgacccggtccgacaagaaccggggcaagtccgacaacgtgccctccgaggaggtggtgaagaagatgaagaactactggcggcagctgctgaacgccaagctgatcacccagcggaagttcgacaacctgaccaaggccgagcggggcggcctgtccgagctggacaaggccggcttcatcaagcggcagctggtggagacccggcagatcaccaagcacgtggcccagatcctggactcccggatgaacaccaagtacgacgagaacgacaagctgatccgggaggtgaaggtgatcaccctgaagtccaagctggtgtccgacttccggaaggacttccagttctacaaggtgcgggagatcaacaactaccaccacgcccacgacgcctacctgaacgccgtggtgggcaccgccctgatcaagaagtaccccaagctggagtccgagttcgtgtacggcgactacaaggtgtacgacgtgcggaagatgatcgccaagtccgagcaggagatcggcaaggccaccgccaagtacttcttctactccaacatcatgaacttcttcaagaccgagatcaccctggccaacggcgagatccggaagcggcccctgatcgagaccaacggcgagaccggcgagatcgtgtgggacaagggccgggacttcgccaccgtgcggaaggtgctgtccatgccccaggtgaacatcgtgaagaagaccgaggtgcagaccggcggcttctccaaggagtccatcctgcccaagcggaactccgacaagctgatcgcccggaagaaggactgggaccccaagaagtacggcggcttcgactcccccaccgtggcctactccgtgctggtggtggccaaggtggagaagggcaagtccaagaagctgaagtccgtgaaggagctgctgggcatcaccatcatggagcggtcctccttcgagaagaaccccatcgacttcctggaggccaagggctacaaggaggtgaagaaggacctgatcatcaagctgcccaagtactccctgttcgagctggagaacggccggaagcggatgctggcctccgccggcgagctgcagaagggcaacgagctggccctgccctccaagtacgtgaacttcctgtacctggcctcccactacgagaagctgaagggctcccccgaggacaacgagcagaagcagctgttcgtggagcagcacaagcactacctggacgagatcatcgagcagatctccgagttctccaagcgggtgatcctggccgacgccaacctggacaaggtgctgtccgcctacaacaagcaccgggacaagcccatccgggagcaggccgagaacatcatccacctgttcaccctgaccaacctgggcgcccccgccgccttcaagtacttcgacaccaccatcgaccggaagcggtacacctccaccaaggaggtgctggacgccaccctgatccaccagtccatcaccggcctgtacgagacccggatcgacctgtcccagctgggcggcgacggcaccaaggactccaccaaggacatccccgagaccccctccaaggacggcaccaaggactccaccaaggacatccccgagaccccctccaaggacggcaccaaggactccaccaaggacatccccgagaccccctccaaggacatggactccaccaaggagaagtgcgactcctacaaggacgacctgctgctgcggatgggcctgaacgacaacaaggccggcatggagggcctggacaaggagaagatcaacaagatcatcatggaggccaccaagggctcccggttctacggcaacgagctgaagaaggagaagcaggtgaaccagcggatcgagaacatgatgcagcagaaggcccagatcacctcccagcagctgcggaaggcccagctgcaggtggaccggttcgccatggagctggagcagtcccggaacctgtccaacaccatcgtgcacatcgacatggacgccttctacgccgccgtggagatgcgggacaaccccgagctgaaggacaagcccatcgccgtgggctccatgtccatgctgtccacctccaactaccacgcccggcggttcggcgtgcgggccgccatgcccggcttcatcgccaagcggctgtgcccccagctgatcatcgtgccccccaacttcgacaagtaccgggccgtgtccaaggaggtgaaggagatcctggccgactacgaccccaacttcatggccatgtccctggacgaggcctacctgaacatcaccaagcacctggaggagcggcagaactggcccgaggacaagcggcggtacttcatcaagatgggctcctccgtggagaacgacaaccccggcaaggaggtgaacaagctgtccgagcacgagcggtccatctcccccctgctgttcgaggagtccccctccgacgtgcagccccccggcgaccccttccaggtgaacttcgaggagcagaacaacccccagatcctgcagaactccgtggtgttcggcacctccgcccaggaggtggtgaaggagatccggttccggatcgagcagaagaccaccctgaccgcctccgccggcatcgcccccaacaccatgctggccaaggtgtgctccgacaagaacaagcccaacggccagtaccagatcctgcccaaccggcaggccgtgatggacttcatcaaggacctgcccatccggaaggtgtccggcatcggcaaggtgaccgagaagatgctgaaggccctgggcatcatcacctgcaccgagctgtaccagcagcgggccctgctgtccctgctgttctccgagacctcctggcactacttcctgcacatctccctgggcctgggctccacccacctgacccgggaccgggtgcggaagtccatgtccgtggagcggaccttctccgagatcaacaaggccgaggagcagtactccctgtgccaggagctgtgctccgagctggcccaggacctgcagaaggagcggctgaagggccggaccgtgaccatcaagctgaagaacgtgaacttcgaggtgaagacccgggcctccaccgtgtcctccgtggtgtccaccgccgaggagatcttcgccatcgccaaggagctgctgaagaccgagatcgacgccgacttcccccaccccctgcggctgcggctgatgggcgtgcggatctcctccttccccaacgaggaggaccggaagcaccagcagtccggctccgagacccccggcacctccgagtccgccacccccgagtccatcgccgccctggagaaggagatcgccgccctggagaaggagaacgccgccctggagtgggagatcgccgccctggagaagtccggctccgagacccccggcacctccgagtccgccacccccgagtcccccaagaagaagcggaaggtgtagctagcaccagcctcaagaacacccgaatggagtctctaagctacataataccaacttacactttacaaaatgttgtcccccaaaatgtagccattcgtatctgctcctaataaaaagaaagtttcttcacattctctcgagaaaaaaaaaaaatggaaaaaaaaaaaacggaaaaaaaaaaaaggtaaaaaaaaaaaatataaaaaaaaaaaacataaaaaaaaaaaacgaaaaaaaaaaaacgtaaaaaaaaaaaactcaaaaaaaaaaaagataaaaaaaaaaaacctaaaaaaaaaaaatgtaaaaaaaaaaaagggaaaaaaaaaaaacgcaaaaaaaaaaaacacaaaaaaaaaaaatgcaaaaaaaaaaaatcgaaaaaaaaaaaatctaaaaaaaaaaaacgaaaaaaaaaaaacccaaaaaaaaaaaagacaaaaaaaaaaaatagaaaaaaaaaaagttaaaaaaaaaaaactgaaaaaaaaaaaatttaaaaaaaaaaaatctag

SEQ ID NO: 2584 - DNA, 6683 bp, synthetic construct
  misc_feature 1..6683: note = Synthetic
  source 1..6683: mol_type = other DNA
aggactcactatttgttttcgcgcccagttgcaaaaagtgtcgaagctcagaataaacgctcaactttggccggatctgccaccatgggcaagcggaccgccgacggctccgagttcgagtcccccaagaagaagcggaaggtggacaagaagtactccatcggcctggacatcggcaccaactccgtgggctgggccgtgatcaccgacgagtacaaggtgccctccaagaagttcaaggtgctgggcaacaccgaccggcactccatcaagaagaacctgatcggcgccctgctgttcgactccggcgagaccgccgaggccacccggctgaagcggaccgcccggcggcggtacacccggcggaagaaccggatctgctacctgcaggagatcttctccaacgagatggccaaggtggacgactccttcttccaccggctggaggagtccttcctggtggaggaggacaagaagcacgagcggcaccccatcttcggcaacatcgtggacgaggtggcctaccacgagaagtaccccaccatctaccacctgcggaagaagctggtggactccaccgacaaggccgacctgcggctgatctacctggccctggcccacatgatcaagttccggggccacttcctgatcgagggcgacctgaaccccgacaactccgacgtggacaagctgttcatccagctggtgcagacctacaaccagctgttcgaggagaaccccatcaacgcctccggcgtggacgccaaggccatcctgtccgcccggctgtccaagtcccggcggctggagaacctgatcgcccagctgcccggcgagaagaagaacggcctgttcggcaacctgatcgccctgtccctgggcctgacccccaacttcaagtccaacttcgacctggccgaggacgccaagctgcagctgtccaaggacacctacgacgacgacctggacaacctgctggcccagatcggcgaccagtacgccgacctgttcctggccgccaagaacctgtccgacgccatcctgctgtccgacatcctgcgggtgaacaccgagatcaccaaggcccccctgtccgcctccatgatcaagcggtacgacgagcaccaccaggacctgaccctgctgaaggccctggtgcggcagcagctgcccgagaagtacaaggagatcttcttcgaccagtccaagaacggctacgccggctacatcgacggcggcgcctcccaggaggagttctacaagttcatcaagcccatcctggagaagatggacggcaccgaggagctgctggtgaagctgaaccgggaggacctgctgcggaagcagcggaccttcgacaacggctccatcccccaccagatccacctgggcgagctgcacgccatcctgcggcggcaggaggacttctaccccttcctgaaggacaaccgggagaagatcgagaagatcctgaccttccggatcccctactacgtgggccccctggcccggggcaactcccggttcgcctggatgacccggaagtccgaggagaccatcaccccctggaacttcgaggaggtggtggacaagggcgcctccgcccagtccttcatcgagcggatgaccaacttcgacaagaacctgcccaacgagaaggtgctgcccaagcactccctgctgtacgagtacttcaccgtgtacaacgagctgaccaaggtgaagtacgtgaccgagggcatgcggaagcccgccttcctgtccggcgagcagaagaaggccatcgtggacctgctgttcaagaccaaccggaaggtgaccgtgaagcagctgaaggaggactacttcaagaagatcgagtgcttcgactccgtggagatctccggcgtggaggaccggttcaacgcctccctgggcacctaccacgacctgctgaagatcatcaaggacaaggacttcctggacaacgaggagaacgaggacatcctggaggacatcgtgctgaccctgaccctgttcgaggaccgggagatgatcgaggagcggctgaagacctacgcccacctgttcgacgacaaggtgatgaagcagctgaagcggcggcggtacaccggctggggccggctgtcccggaagctgatcaacggcatccgggacaagcagtccggcaagaccatcctggacttcctgaagtccgacggcttcgccaaccggaacttcatgcagctgatccacgacgactccctgaccttcaaggaggacatccagaaggcccaggtgtccggccagggcgactccctgcacgagcacatcgccaacctggccggctcccccgccatcaagaagggcatcctgcagaccgtgaaggtggtggacgagctggtgaaggtgatgggccggcacaagcccgagaacatcgtgatcgagatggcccgggagaaccagaccacccagaagggccagaagaactcccgggagcggatgaagcggatcgaggagggcatcaaggagctgggctcccagatcctgaaggagcaccccgtggagaacacccagctgcagaacgagaagctgtacctgtactacctgcagaacggccgggacatgtacgtggaccaggagctggacatcaaccggctgtccgactacgacgtggacgccatcgtgccccagtccttcctgaaggacgactccatcgacaacaaggtgctgacccggtccgacaagaaccggggcaagtccgacaacgtgccctccgaggaggtggtgaagaagatgaagaactactggcggcagctgctgaacgccaagctgatcacccagcggaagttcgacaacctgaccaaggccgagcggggcggcctgtccgagctggacaaggccggcttcatcaagcggcagctggtggagacccggcagatcaccaagcacgtggcccagatcctggactcccggatgaacaccaagtacgacgagaacgacaagctgatccgggaggtgaaggtgatcaccctgaagtccaagctggtgtccgacttccggaaggacttccagttctacaaggtgcgggagatcaacaactaccaccacgcccacgacgcctacctgaacgccgtggtgggcaccgccctgatcaagaagtaccccaagctggagtccgagttcgtgtacggcgactacaaggtgtacgacgtgcggaagatgatcgccaagtccgagcaggagatcggcaaggccaccgccaagtacttcttctactccaacatcatgaacttcttcaagaccgagatcaccctggccaacggcgagatccggaagcggcccctgatcgagaccaacggcgagaccggcgagatcgtgtgggacaagggccgggacttcgccaccgtgcggaaggtgctgtccatgccccaggtgaacatcgtgaagaagaccgaggtgcagaccggcggcttctccaaggagtccatcctgcccaagcggaactccgacaagctgatcgcccggaagaaggactgggaccccaagaagtacggcggcttcgactcccccaccgtggcctactccgtgctggtggtggccaaggtggagaagggcaagtccaagaagctgaagtccgtgaaggagctgctgggcatcaccatcatggagcggtcctccttcgagaagaaccccatcgacttcctggaggccaagggctacaaggaggtgaagaaggacctgatcatcaagctgcccaagtactccctgttcgagctggagaacggccggaagcggatgctggcctccgccggcgagctgcagaagggcaacgagctggccctgccctccaagtacgtgaacttcctgtacctggcctcccactacgagaagctgaagggctcccccgaggacaacgagcagaagcagctgttcgtggagcagcacaagcactacctggacgagatcatcgagcagatctccgagttctccaagcgggtgatcctggccgacgccaacctggacaaggtgctgtccgcctacaacaagcaccgggacaagcccatccgggagcaggccgagaacatcatccacctgttcaccctgaccaacctgggcgcccccgccgccttcaagtacttcgacaccaccatcgaccggaagcggtacacctccaccaaggaggtgctggacgccaccctgatccaccagtccatcaccggcctgtacgagacccggatcgacctgtcccagctgggcggcgacggcaccaaggactccaccaaggacatccccgagaccccctccaaggacggcaccaaggactccaccaaggacatccccgagaccccctccaaggacggcaccaaggactccaccaaggacatccccgagaccccctccaaggacatggactccaccaaggagaagtgcgactcctacaaggacgacctgctgctgcggatgggcctgaacgacaacaaggccggcatggagggcctggacaaggagaagatcaacaagatcatcatggaggccaccaagggctcccggttctacggcaacgagctgaagaaggagaagcaggtgaaccagcggatcgagaacatgatgcagcagaaggcccagatcacctcccagcagctgcggaaggcccagctgcaggtggaccggttcgccatggagctggagcagtcccggaacctgtccaacaccatcgtgcacatcgacatggacgccttctacgccgccgtggagatgcgggacaaccccgagctgaaggacaagcccatcgccgtgggctccatgtccatgctgtccacctccaactaccacgcccggcggttcggcgtgcgggccgccatgcccggcttcatcgccaagcggctgtgcccccagctgatcatcgtgccccccaacttcgacaagtaccgggccgtgtccaaggaggtgaaggagatcctggccgactacgaccccaacttcatggccatgtccctggacgaggcctacctgaacatcaccaagcacctggaggagcggcagaactggcccgaggacaagcggcggtacttcatcaagatgggctcctccgtggagaacgacaaccccggcaaggaggtgaacaagctgtccgagcacgagcggtccatctcccccctgctgttcgaggagtccccctccgacgtgcagccccccggcgaccccttccaggtgaacttcgaggagcagaacaacccccagatcctgcagaactccgtggtgttcggcacctccgcccaggaggtggtgaaggagatccggttccggatcgagcagaagaccaccctgaccgcctccgccggcatcgcccccaacaccatgctggccaaggtgtgctccgacaagaacaagcccaacggccagtaccagatcctgcccaaccggcaggccgtgatggacttcatcaaggacctgcccatccggaaggtgtccggcatcggcaaggtgaccgagaagatgctgaaggccctgggcatcatcacctgcaccgagctgtaccagcagcgggccctgctgtccctgctgttctccgagacctcctggcactacttcctgcacatctccctgggcctgggctccacccacctgacccgggaccgggtgcggaagtccatgtccgtggagcggaccttccgggagatcaacaaggccgaggagcagtactccctgtgccaggagctgtgctccgagctggcccaggacctgcagaaggagcggctgaagggccggaccgtgaccatcaagctgaagaacgtgaacttcgaggtgaagacccgggcctccaccgtgtcctccgtggtgtccaccgccgaggagatcttcgccatcgccaaggagctgctgaagaccgagatcgacgccgacttcccccaccccctgcggctgcggctgatgggcgtgcggatctcctccttccccaacgaggaggaccggaagcaccagcagtccggctccgagacccccggcacctccgagtccgccacccccgagtccatcgccgccctggagaaggagatcgccgccctggagaaggagaacgccgccctggagtgggagatcgccgccctggagaagtccggctccgagacccccggcacctccgagtccgccacccccgagtcccccaagaagaagcggaaggtgtagctagcaccagcctcaagaacacccgaatggagtctctaagctacataataccaacttacactttacaaaatgttgtcccccaaaatgtagccattcgtatctgctcctaataaaaagaaagtttcttcacattctctcgagaaaaaaaaaaaatggaaaaaaaaaaaacggaaaaaaaaaaaaggtaaaaaaaaaaaatataaaaaaaaaaaacataaaaaaaaaaaacgaaaaaaaaaaaacgtaaaaaaaaaaaactcaaaaaaaaaaaagataaaaaaaaaaaacctaaaaaaaaaaaatgtaaaaaaaaaaaagggaaaaaaaaaaaacgcaaaaaaaaaaaacacaaaaaaaaaaaatgcaaaaaaaaaaaatcgaaaaaaaaaaaatctaaaaaaaaaaaacgaaaaaaaaaaaacccaaaaaaaaaaaagacaaaaaaaaaaaatagaaaaaaaaaaagttaaaaaaaaaaaactgaaaaaaaaaaaatttaaaaaaaaaaaatctag

SEQ ID NO: 2585 - DNA, 6554 bp, synthetic construct
  misc_feature 1..6554: note = Synthetic
  source 1..6554: mol_type = other DNA
aggactcactatttgttttcgcgcccagttgcaaaaagtgtcgaagctcagaataaacgctcaactttggccggatctgccaccatgggcaagcggaccgccgacggctccgagttcgagtcccccaagaagaagcggaaggtggacaagaagtactccatcggcctggacatcggcaccaactccgtgggctgggccgtgatcaccgacgagtacaaggtgccctccaagaagttcaaggtgctgggcaacaccgaccggcactccatcaagaagaacctgatcggcgccctgctgttcgactccggcgagaccgccgaggccacccggctgaagcggaccgcccggcggcggtacacccggcggaagaaccggatctgctacctgcaggagatcttctccaacgagatggccaaggtggacgactccttcttccaccggctggaggagtccttcctggtggaggaggacaagaagcacgagcggcaccccatcttcggcaacatcgtggacgaggtggcctaccacgagaagtaccccaccatctaccacctgcggaagaagctggtggactccaccgacaaggccgacctgcggctgatctacctggccctggcccacatgatcaagttccggggccacttcctgatcgagggcgacctgaaccccgacaactccgacgtggacaagctgttcatccagctggtgcagacctacaaccagctgttcgaggagaaccccatcaacgcctccggcgtggacgccaaggccatcctgtccgcccggctgtccaagtcccggcggctggagaacctgatcgcccagctgcccggcgagaagaagaacggcctgttcggcaacctgatcgccctgtccctgggcctgacccccaacttcaagtccaacttcgacctggccgaggacgccaagctgcagctgtccaaggacacctacgacgacgacctggacaacctgctggcccagatcggcgaccagtacgccgacctgttcctggccgccaagaacctgtccgacgccatcctgctgtccgacatcctgcgggtgaacaccgagatcaccaaggcccccctgtccgcctccatgatcaagcggtacgacgagcaccaccaggacctgaccctgctgaaggccctggtgcggcagcagctgcccgagaagtacaaggagatcttcttcgaccagtccaagaacggctacgccggctacatcgacggcggcgcctcccaggaggagttctacaagttcatcaagcccatcctggagaagatggacggcaccgaggagctgctggtgaagctgaaccgggaggacctgctgcggaagcagcggaccttcgacaacggctccatcccccaccagatccacctgggcgagctgcacgccatcctgcggcggcaggaggacttctaccccttcctgaaggacaaccgggagaagatcgagaagatcctgaccttccggatcccctactacgtgggccccctggcccggggcaactcccggttcgcctggatgacccggaagtccgaggagaccatcaccccctggaacttcgaggaggtggtggacaagggcgcctccgcccagtccttcatcgagcggatgaccaacttcgacaagaacctgcccaacgagaaggtgctgcccaagcactccctgctgtacgagtacttcaccgtgtacaacgagctgaccaaggtgaagtacgtgaccgagggcatgcggaagcccgccttcctgtccggcgagcagaagaaggccatcgtggacctgctgttcaagaccaaccggaaggtgaccgtgaagcagctgaaggaggactacttcaagaagatcgagtgcttcgactccgtggagatctccggcgtggaggaccggttcaacgcctccctgggcacctaccacgacctgctgaagatcatcaaggacaaggacttcctggacaacgaggagaacgaggacatcctggaggacatcgtgctgaccctgaccctgttcgaggaccgggagatgatcgaggagcggctgaagacctacgcccacctgttcgacgacaaggtgatgaagcagctgaagcggcggcggtacaccggctggggccggctgtcccggaagctgatcaacggcatccgggacaagcagtccggcaagaccatcctggacttcctgaagtccgacggcttcgccaaccggaacttcatgcagctgatccacgacgactccctgaccttcaaggaggacatccagaaggcccaggtgtccggccagggcgactccctgcacgagcacatcgccaacctggccggctcccccgccatcaagaagggcatcctgcagaccgtgaaggtggtggacgagctggtgaaggtgatgggccggcacaagcccgagaacatcgtgatcgagatggcccgggagaaccagaccacccagaagggccagaagaactcccgggagcggatgaagcggatcgaggagggcatcaaggagctgggctcccagatcctgaaggagcaccccgtggagaacacccagctgcagaacgagaagctgtacctgtactacctgcagaacggccgggacatgtacgtggaccaggagctggacatcaaccggctgtccgactacgacgtggacgccatcgtgccccagtccttcctgaaggacgactccatcgacaacaaggtgctgacccggtccgacaagaaccggggcaagtccgacaacgtgccctccgaggaggtggtgaagaagatgaagaactactggcggcagctgctgaacgccaagctgatcacccagcggaagttcgacaacctgaccaaggccgagcggggcggcctgtccgagctggacaaggccggcttcatcaagcggcagctggtggagacccggcagatcaccaagcacgtggcccagatcctggactcccggatgaacaccaagtacgacgagaacgacaagctgatccgggaggtgaaggtgatcaccctgaagtccaagctggtgtccgacttccggaaggacttccagttctacaaggtgcgggagatcaacaactaccaccacgcccacgacgcctacctgaacgccgtggtgggcaccgccctgatcaagaagtaccccaagctggagtccgagttcgtgtacggcgactacaaggtgtacgacgtgcggaagatgatcgccaagtccgagcaggagatcggcaaggccaccgccaagtacttcttctactccaacatcatgaacttcttcaagaccgagatcaccctggccaacggcgagatccggaagcggcccctgatcgagaccaacggcgagaccggcgagatcgtgtgggacaagggccgggacttcgccaccgtgcggaaggtgctgtccatgccccaggtgaacatcgtgaagaagaccgaggtgcagaccggcggcttctccaaggagtccatcctgcccaagcggaactccgacaagctgatcgcccggaagaaggactgggaccccaagaagtacggcggcttcgactcccccaccgtggcctactccgtgctggtggtggccaaggtggagaagggcaagtccaagaagctgaagtccgtgaaggagctgctgggcatcaccatcatggagcggtcctccttcgagaagaaccccatcgacttcctggaggccaagggctacaaggaggtgaagaaggacctgatcatcaagctgcccaagtactccctgttcgagctggagaacggccggaagcggatgctggcctccgccggcgagctgcagaagggcaacgagctggccctgccctccaagtacgtgaacttcctgtacctggcctcccactacgagaagctgaagggctcccccgaggacaacgagcagaagcagctgttcgtggagcagcacaagcactacctggacgagatcatcgagcagatctccgagttctccaagcgggtgatcctggccgacgccaacctggacaaggtgctgtccgcctacaacaagcaccgggacaagcccatccgggagcaggccgagaacatcatccacctgttcaccctgaccaacctgggcgcccccgccgccttcaagtacttcgacaccaccatcgaccggaagcggtacacctccaccaaggaggtgctggacgccaccctgatccaccagtccatcaccggcctgtacgagacccggatcgacctgtcccagctgggcggcgacggcaccaaggactccaccaaggacatccccgagaccccctccaaggacggcaccaaggactccaccaaggacatccccgagaccccctccaaggacggcaccaaggactccaccaaggacatccccgagaccccctccaaggacatggactccaccaaggagaagtgcgactcctacaaggacgacctgctgctgcggatgggcctgaacgacaacaaggccggcatggagggcctggacaaggagaagatcaacaagatcatcatggaggccaccaagggctcccggttctacggcaacgagctgaagaaggagaagcaggtgaaccagcggatcgagaacatgatgcagcagaaggcccagatcacctcccagcagctgcggaaggcccagctgcaggtggaccggttcgccatggagctggagcagtcccggaacctgtccaacaccatcgtgcacatcgacatggacgccttctacgccgccgtggagatgcgggacaaccccgagctgaaggacaagcccatcgccgtgggctccatgtccatgctgtccacctccaactaccacgcccggcggttcggcgtgcgggccgccatgcccggcttcatcgccaagcggctgtgcccccagctgatcatcgtgccccccaacttcgacaagtaccgggccgtgtccaaggaggtgaaggagatcctggccgactacgaccccaacttcatggccatgtccctggacgaggcctacctgaacatcaccaagcacctggaggagcggcagaactggcccgaggacaagcggcggtacttcatcaagatgggctcctccgtggagaacgacaaccccggcaaggaggtgaacaagctgtccgagcacgagcggtccatctcccccctgctgttcgaggagtccccctccgacgtgcagccccccggcgaccccttccaggtgaacttcgaggagcagaacaacccccagatcctgcagaactccgtggtgttcggcacctccgcccaggaggtggtgaaggagatccggttccggatcgagcagaagaccaccctgaccgcctccgccggcatcgcccccaacaccatgctggccaaggtgtgctccgacaagaacaagcccaacggccagtaccagatcctgcccaaccggcaggccgtgatggacttcatcaaggacctgcccatccggaaggtgtccggcatcggcaaggtgaccgagaagatgctgaaggccctgggcatcatcacctgcaccgagctgtaccagcagcgggccctgctgtccctgctgttctccgagacctcctggcactacttcctgcacatctccctgggcctgggctccacccacctgacccgggaccgggtgcggaagtccatgtccgtggagcggaccttccgggagatcaacaaggccgaggagcagtactccctgtgccaggagctgtgctccgagctggcccaggacctgcagaaggagcggctgaagggccggaccgtgaccatcaagctgaagaacgtgaacttcgaggtgaagacccgggcctccaccgtgtcctccgtggtgtccaccgccgaggagatcttcgccatcgccaaggagctgctgaagaccgagatcgacgccgacttcccccaccccctgcggctgcggctgatgggcgtgcggatctcctccttccccaacgaggaggaccggaagcaccagcagtccggctccgagacccccggcacctccgagtccgccacccccgagtcccccaagaagaagcggaaggtgtagctagcaccagcctcaagaacacccgaatggagtctctaagctacataataccaacttacactttacaaaatgttgtcccccaaaatgtagccattcgtatctgctcctaataaaaagaaagtttcttcacattctctcgagaaaaaaaaaaaatggaaaaaaaaaaaacggaaaaaaaaaaaaggtaaaaaaaaaaaatataaaaaaaaaaaacataaaaaaaaaaaacgaaaaaaaaaaaacgtaaaaaaaaaaaactcaaaaaaaaaaaagataaaaaaaaaaaacctaaaaaaaaaaaatgtaaaaaaaaaaaagggaaaaaaaaaaaacgcaaaaaaaaaaaacacaaaaaaaaaaaatgcaaaaaaaaaaaatcgaaaaaaaaaaaatctaaaaaaaaaaaacgaaaaaaaaaaaacccaaaaaaaaaaaagacaaaaaaaaaaaatagaaaaaaaaaaagttaaaaaaaaaaaactgaaaaaaaaaaaatttaaaaaaaaaaaatctag

SEQ ID NO: 2586 - DNA, 7522 bp, synthetic construct
  misc_feature 1..7522: note = Synthetic
  source 1..7522: mol_type = other DNA
gggaagctcagaataaacgctcaactttggccggatctgccaccatgaagcggcccgccgccaccaagaaggccggccaggccaagaagaagaaggacaagaagtactccatcggcctggacatcggcaccaactccgtgggctgggccgtgatcaccgacgagtacaaggtgccctccaagaagttcaaggtgctgggcaacaccgaccggcactccatcaagaagaacctgatcggcgccctgctgttcgactccggcgagaccgccgaggccacccggctgaagcggaccgcccggcggcggtacacccggcggaagaaccggatctgctacctgcaggagatcttctccaacgagatggccaaggtggacgactccttcttccaccggctggaggagtccttcctggtggaggaggacaagaagcacgagcggcaccccatcttcggcaacatcgtggacgaggtggcctaccacgagaagtaccccaccatctaccacctgcggaagaagctggtggactccaccgacaaggccgacctgcggctgatctacctggccctggcccacatgatcaagttccggggccacttcctgatcgagggcgacctgaaccccgacaactccgacgtggacaagctgttcatccagctggtgcagacctacaaccagctgttcgaggagaaccccatcaacgcctccggcgtggacgccaaggccatcctgtccgcccggctgtccaagtcccggcggctggagaacctgatcgcccagctgcccggcgagaagaagaacggcctgttcggcaacctgatcgccctgtccctgggcctgacccccaacttcaagtccaacttcgacctggccgaggacgccaagctgcagctgtccaaggacacctacgacgacgacctggacaacctgctggcccagatcggcgaccagtacgccgacctgttcctggccgccaagaacctgtccgacgccatcctgctgtccgacatcctgcgggtgaacaccgagatcaccaaggcccccctgtccgcctccatgatcaagcggtacgacgagcaccaccaggacctgaccctgctgaaggccctggtgcggcagcagctgcccgagaagtacaaggagatcttcttcgaccagtccaagaacggctacgccggctacatcgacggcggcgcctcccaggaggagttctacaagttcatcaagcccatcctggagaagatggacggcaccgaggagctgctggtgaagctgaaccgggaggacctgctgcggaagcagcggaccttcgacaacggctccatcccccaccagatccacctgggcgagctgcacgccatcctgcggcggcaggaggacttctaccccttcctgaaggacaaccgggagaagatcgagaagatcctgaccttccggatcccctactacgtgggccccctggcccggggcaactcccggttcgcctggatgacccggaagtccgaggagaccatcaccccctggaacttcgaggaggtggtggacaagggcgcctccgcccagtccttcatcgagcggatgaccaacttcgacaagaacctgcccaacgagaaggtgctgcccaagcactccctgctgtacgagtacttcaccgtgtacaacgagctgaccaaggtgaagtacgtgaccgagggcatgcggaagcccgccttcctgtccggcgagcagaagaaggccatcgtggacctgctgttcaagaccaaccggaaggtgaccgtgaagcagctgaaggaggactacttcaagaagatcgagtgcttcgactccgtggagatctccggcgtggaggaccggttcaacgcctccctgggcacctaccacgacctgctgaagatcatcaaggacaaggacttcctggacaacgaggagaacgaggacatcctggaggacatcgtgctgaccctgaccctgttcgaggaccgggagatgatcgaggagcggctgaagacctacgcccacctgttcgacgacaaggtgatgaagcagctgaagcggcggcggtacaccggctggggccggctgtcccggaagctgatcaacggcatccgggacaagcagtccggcaagaccatcctggacttcctgaagtccgacggcttcgccaaccggaacttcatgcagctgatccacgacgactccctgaccttcaaggaggacatccagaaggcccaggtgtccggccagggcgactccctgcacgagcacatcgccaacctggccggctcccccgccatcaagaagggcatcctgcagaccgtgaaggtggtggacgagctggtgaaggtgatgggccggcacaagcccgagaacatcgtgatcgagatggcccgggagaaccagaccacccagaagggccagaagaactcccgggagcggatgaagcggatcgaggagggcatcaaggagctgggctcccagatcctgaaggagcaccccgtggagaacacccagctgcagaacgagaagctgtacctgtactacctgcagaacggccgggacatgtacgtggaccaggagctggacatcaaccggctgtccgactacgacgtggacgccatcgtgccccagtccttcctgaaggacgactccatcgacaacaaggtgctgacccggtccgacaagaaccggggcaagtccgacaacgtgccctccgaggaggtggtgaagaagatgaagaactactggcggcagctgctgaacgccaagctgatcacccagcggaagttcgacaacctgaccaaggccgagcggggcggcctgtccgagctggacaaggccggcttcatcaagcggcagctggtggagacccggcagatcaccaagcacgtggcccagatcctggactcccggatgaacaccaagtacgacgagaacgacaagctgatccgggaggtgaaggtgatcaccctgaagtccaagctggtgtccgacttccggaaggacttccagttctacaaggtgcgggagatcaacaactaccaccacgcccacgacgcctacctgaacgccgtggtgggcaccgccctgatcaagaagtaccccaagctggagtccgagttcgtgtacggcgactacaaggtgtacgacgtgcggaagatgatcgccaagtccgagcaggagatcggcaaggccaccgccaagtacttcttctactccaacatcatgaacttcttcaagaccgagatcaccctggccaacggcgagatccggaagcggcccctgatcgagaccaacggcgagaccggcgagatcgtgtgggacaagggccgggacttcgccaccgtgcggaaggtgctgtccatgccccaggtgaacatcgtgaagaagaccgaggtgcagaccggcggcttctccaaggagtccatcctgcccaagcggaactccgacaagctgatcgcccggaagaaggactgggaccccaagaagtacggcggcttcgactcccccaccgtggcctactccgtgctggtggtggccaaggtggagaagggcaagtccaagaagctgaagtccgtgaaggagctgctgggcatcaccatcatggagcggtcctccttcgagaagaaccccatcgacttcctggaggccaagggctacaaggaggtgaagaaggacctgatcatcaagctgcccaagtactccctgttcgagctggagaacggccggaagcggatgctggcctccgccggcgagctgcagaagggcaacgagctggccctgccctccaagtacgtgaacttcctgtacctggcctcccactacgagaagctgaagggctcccccgaggacaacgagcagaagcagctgttcgtggagcagcacaagcactacctggacgagatcatcgagcagatctccgagttctccaagcgggtgatcctggccgacgccaacctggacaaggtgctgtccgcctacaacaagcaccgggacaagcccatccgggagcaggccgagaacatcatccacctgttcaccctgaccaacctgggcgcccccgccgccttcaagtacttcgacaccaccatcgaccggaagcggtacacctccaccaaggaggtgctggacgccaccctgatccaccagtccatcaccggcctgtacgagacccggatcgacctgtcccagctgggcggcgacggcgcccccgagtccgccaccgagtccggcggcacctccaccgagtccgagggctccgccggccccaagaagaagcggaaggtgacctccaccgagtccgagggctccgccggctccgccggctccacctccggctcctcctccggcatgaagatcgccgtggtggacaaggccctgaacaacacccggtacgacaagcacttccagctgtacggcgaggaggtggacgtgttccacatgtgcaacgagaagctgtccggccggctgctgaagaagcacatcaccatcggcacccccgagaaccccttcgaccccaacgactacgacttcgtgatcctggtgggcgccgagcccttcctgtacttcgccggcaagaagggcatcggcgactacaccggcaagcgggtggagtacaacggctacgccaactggatcgcctccatctcccccgcccagctgcacttcaagcccgagatgaagcccgtgttcgacgccaccgtggagaacatccacgacatcatcaacggccgggagaagatcgccaaggccggcgactaccggcccatcaccgaccccgacgaggccgaggagtacatcaagatggtgtacaacatggtgatcggccccgtggccttcgcctccgccacctccgccctgtactgccgggacggctacctgctgggcgtgtccatctcccaccaggagtaccagggcgtgtacatcgactccgactgcctgaccgaggtggccgtgtactacctgcagaagatcctggactccgagaaccacaccatcgtgttccacaacctgaagttcgacatgcacttctacaagtaccacctgggcctgaccttcgacaaggcccacaaggagcggcggctgcacgacaccatgctgcagcactacgtgctggacgagcggcggggcacccacggcctgaagtccctggccatgaagtacaccgacatgggcgactacgacttcgagctggacaagttcaaggacgactactgcaaggcccacaagatcaagaaggaggacttcacctacgacctgatccccttcgacatcatgtggccctacgccgccaaggacaccgacgccaccatccggctgcacaacttcttcctgcccaagatcgagaagaacgagaagctgtgctccctgtactacgacgtgctgatgcccggctgcgtgttcctgcagcgggtggaggaccggggcgtgcccatctccatcgaccggctgaaggaggcccagtaccagctgacccacaacctgaacaaggcccgggagaagctgtacacctaccccgaggtgaagcagctggagcaggaccagaacgaggccttcaaccccaactccgtgaagcagctgcgggtgctgctgttcgactacgtgggcctgacccccaccggcaagctgaccgacaccggcgccgactccaccgacgccgaggccctgaacgagctggccacccagcaccccatcgccaagaccctgctggagatccggaagctgaccaagctgatctccacctacgtggagaagatcctgctgtccatcgacgccgacggctgcatccggaccggcttccacgagcacatgaccacctccggccggctgtcctcctccggcaagctgaacctgcagcagctgccccgggacgagtccatcatcaagggctgcgtggtggccccccccggctaccgggtgatcgcctgggacctgaccaccgccgaggtgtactacgccgccgtgctgtccggcgaccggaacatgcagcaggtgttcatcaacatgcggaacgagcccgacaagtaccccgacttccactccaacatcgcccacatggtgttcaagctgcagtgcgagccccgggacgtgaagaagctgttccccgccctgcggcaggccgccaaggccatcaccttcggcatcctgtacggctccggccccgccaaggtggcccactccgtgaacgaggccctgctggagcaggccgccaagaccggcgagcccttcgtggagtgcaccgtggccgacgccaaggagtacatcgagacctacttcggccagttcccccagctgaagcggtggatcgacaagtgccacgaccagatcaagaaccacggcttcatctactcccacttcggccggaagcggcggctgcacaacatccactccgaggaccggggcgtgcagggcgaggagatccggtccggcttcaacgccatcatccagtccgcctcctccgactccctgctgctgggcgccgtggacgccgacaacgagatcatctccctgggcctggagcaggagatgaagatcgtgatgctggtgcacgactccgtggtggccatcgtgcgggaggacctgatcgaccagtacaacgagatcctgatccggaacatccagaaggaccggggcatctccatccccggctgccccatcggcatcgactccgactccgaggccggcggctcccgggactactcctgcggcaagatgaagaagcagcacccctccatcgcctgcatcgacgacgacgagtacacccggtacgtgaagggcgtgctgctggacgccgagttcgagtacaagaagctggccgccatggacaaggagcaccccgaccactccaagtacaaggacgacaagttcatcgccgtgtgcaaggacctggacaacgtgaagcggatcctgggcgccggcggcggctccggcaagcggaccgccgacggctccggcggcggctcccccaagaagaagcggaaggtgcctgccgctaagagagtgaagctggactagctagcaccagcctcaagaacacccgaatggagtctctaagctacataataccaacttacactttacaaaatgttgtcccccaaaatgtagccattcgtatctgctcctaataaaaagaaagtttcttcacattctctcgagaaaaaaaaaaaatggaaaaaaaaaaaacggaaaaaaaaaaaaggtaaaaaaaaaaaatataaaaaaaaaaaacataaaaaaaaaaaacgaaaaaaaaaaaacgtaaaaaaaaaaaactcaaaaaaaaaaaagataaaaaaaaaaaacctaaaaaaaaaaaatgtaaaaaaaaaaaagggaaaaaaaaaaaacgcaaaaaaaaaaaacacaaaaaaaaaaaatgcaaaaaaaaaaaatcgaaaaaaaaaaaatctaaaaaaaaaaaacgaaaaaaaaaaaacccaaaaaaaaaaaagacaaaaaaaaaaaatagaaaaaaaaaaagttaaaaaaaaaaaactgaaaaaaaaaaaatttaaaaaaaaaaaatctag

SEQ ID NO: 2587 - DNA, 7565 bp, synthetic construct; identical to SEQ ID NO: 2502
  misc_feature 1..7565: note = Synthetic
  source 1..7565: mol_type = other DNA

SEQ ID NO: 2588 - DNA, 7565 bp, synthetic construct; identical to SEQ ID NO: 1930
  misc_feature 1..7565: note = Synthetic
  source 1..7565: mol_type = other DNA

SEQ ID NO: 2589 - DNA, 7565 bp, synthetic construct; identical to SEQ ID NO: 1933
  misc_feature 1..7565: note = Synthetic
  source 1..7565: mol_type = other DNA

SEQ ID NO: 2590 - DNA, 7565 bp, synthetic construct; identical to SEQ ID NO: 1936
  misc_feature 1..7565: note = Synthetic
  source 1..7565: mol_type = other DNA

SEQ ID NO: 2591 - DNA, 7535 bp, synthetic construct; identical to SEQ ID NO: 2506
  misc_feature 1..7535: note = Synthetic
  source 1..7535: mol_type = other DNA

SEQ ID NO: 2592 - DNA, 7505 bp, synthetic construct; identical to SEQ ID NO: 2507
  misc_feature 1..7505: note = Synthetic
  source 1..7505: mol_type = other DNA

SEQ ID NO: 2593 - DNA, 7555 bp, synthetic construct; identical to SEQ ID NO: 2508
  misc_feature 1..7555: note = Synthetic
  source 1..7555: mol_type = other DNA

SEQ ID NO: 2594 - DNA, 7522 bp, synthetic construct
  misc_feature 1..7522: note = Synthetic
  source 1..7522: mol_type = other DNA
aggaagctcagaataaacgctcaactttggccggatctgccaccatgaagcggcccgccgccaccaagaaggccggccaggccaagaagaagaaggacaagaagtactccatcggcctggacatcggcaccaactccgtgggctgggccgtgatcaccgacgagtacaaggtgccctccaagaagttcaaggtgctgggcaacaccgaccggcactccatcaagaagaacctgatcggcgccctgctgttcgactccggcgagaccgccgaggccacccggctgaagcggaccgcccggcggcggtacacccggcggaagaaccggatctgctacctgcaggagatcttctccaacgagatggccaaggtggacgactccttcttccaccggctggaggagtccttcctggtggaggaggacaagaagcacgagcggcaccccatcttcggcaacatcgtggacgaggtggcctaccacgagaagtaccccaccatctaccacctgcggaagaagctggtggactccaccgacaaggccgacctgcggctgatctacctggccctggcccacatgatcaagttccggggccacttcctgatcgagggcgacctgaaccccgacaactccgacgtggacaagctgttcatccagctggtgcagacctacaaccagctgttcgaggagaaccccatcaacgcctccggcgtggacgccaaggccatcctgtccgcccggctgtccaagtcccggcggctggagaacctgatcgcccagctgcccggcgagaagaagaacggcctgttcggcaacctgatcgccctgtccctgggcctgacccccaacttcaagtccaacttcgacctggccgaggacgccaagctgcagctgtccaaggacacctacgacgacgacctggacaacctgctggcccagatcggcgaccagtacgccgacctgttcctggccgccaagaacctgtccgacgccatcctgctgtccgacatcctgcgggtgaacaccgagatcaccaaggcccccctgtccgcctccatgatcaagcggtacgacgagcaccaccaggacctgaccctgctgaaggccctggtgcggcagcagctgcccgagaagtacaaggagatcttcttcgaccagtccaagaacggctacgccggctacatcgacggcggcgcctcccaggaggagttctacaagttcatcaagcccatcctggagaagatggacggcaccgaggagctgctggtgaagctgaaccgggaggacctgctgcggaagcagcggaccttcgacaacggctccatcccccaccagatccacctgggcgagctgcacgccatcctgcggcggcaggaggacttctaccccttcctgaaggacaaccgggagaagatcgagaagatcctgaccttccggatcccctactacgtgggccccctggcccggggcaactcccggttcgcctggatgacccggaagtccgaggagaccatcaccccctggaacttcgaggaggtggtggacaagggcgcctccgcccagtccttcatcgagcggatgaccaacttcgacaagaacctgcccaacgagaaggtgctgcccaagcactccctgctgtacgagtacttcaccgtgtacaacgagctgaccaaggtgaagtacgtgaccgagggcatgcggaagcccgccttcctgtccggcgagcagaagaaggccatcgtggacctgctgttcaagaccaaccggaaggtgaccgtgaagcagctgaaggaggactacttcaagaagatcgagtgcttcgactccgtggagatctccggcgtggaggaccggttcaacgcctccctgggcacctaccacgacctgctgaagatcatcaaggacaaggacttcctggacaacgaggagaacgaggacatcctggaggacatcgtgctgaccctgaccctgttcgaggaccgggagatgatcgaggagcggctgaagacctacgcccacctgttcgacgacaaggtgatgaagcagctgaagcggcggcggtacaccggctggggccggctgtcccggaagctgatcaacggcatccgggacaagcagtccggcaagaccatcctggacttcctgaagtccgacggcttcgccaaccggaacttcatgcagctgatccacgacgactccctgaccttcaaggaggacatccagaaggcccaggtgtccggccagggcgactccctgcacgagcacatcgccaacctggccggctcccccgccatcaagaagggcatcctgcagaccgtgaaggtggtggacgagctggtgaaggtgatgggccggcacaagcccgagaacatcgtgatcgagatggcccgggagaaccagaccacccagaagggccagaagaactcccgggagcggatgaagcggatcgaggagggcatcaaggagctgggctcccagatcctgaaggagcaccccgtggagaacacccagctgcagaacgagaagctgtacctgtactacctgcagaacggccgggacatgtacgtggaccaggagctggacatcaaccggctgtccgactacgacgtggacgccatcgtgccccagtccttcctgaaggacgactccatcgacaacaaggtgctgacccggtccgacaagaaccggggcaagtccgacaacgtgccctccgaggaggtggtgaagaagatgaagaactactggcggcagctgctgaacgccaagctgatcacccagcggaagttcgacaacctgaccaaggccgagcggggcggcctgtccgagctggacaaggccggcttcatcaagcggcagctggtggagacccggcagatcaccaagcacgtggcccagatcctggactcccggatgaacaccaagtacgacgagaacgacaagctgatccgggaggtgaaggtgatcaccctgaagtccaagctggtgtccgacttccggaaggacttccagttctacaaggtgcgggagatcaacaactaccaccacgcccacgacgcctacctgaacgccgtggtgggcaccgccctgatcaagaagtaccccaagctggagtccgagttcgtgtacggcgactacaaggtgtacgacgtgcggaagatgatcgccaagtccgagcaggagatcggcaaggccaccgccaagtacttcttctactccaacatcatgaacttcttcaagaccgagatcaccctggccaacggcgagatccggaagcggcccctgatcgagaccaacggcgagaccggcgagatcgtgtgggacaagggccgggacttcgccaccgtgcggaaggtgctgtccatgccccaggtgaacatcgtgaagaagaccgaggtgcagaccggcggcttctccaaggagtccatcctgcccaagcggaactccgacaagctgatcgcccggaagaaggactgggaccccaagaagtacggcggcttcgactcccccaccgtggcctactccgtgctggtggtggccaaggtggagaagggcaagtccaagaagctgaagtccgtgaaggagctgctgggcatcaccatcatggagcggtcctccttcgagaagaaccccatcgacttcctggaggccaagggctacaaggaggtgaagaaggacctgatcatcaagctgcccaagtactccctgttcgagctggagaacggccggaagcggatgctggcctccgccggcgagctgcagaagggcaacgagctggccctgccctccaagtacgtgaacttcctgtacctggcctcccactacgagaagctgaagggctcccccgaggacaacgagcagaagcagctgttcgtggagcagcacaagcactacctggacgagatcatcgagcagatctccgagttctccaagcgggtgatcctggccgacgccaacctggacaaggtgctgtccgcctacaacaagcaccgggacaagcccatccgggagcaggccgagaacatcatccacctgttcaccctgaccaacctgggcgcccccgccgccttcaagtacttcgacaccaccatcgaccggaagcggtacacctccaccaaggaggtgctggacgccaccctgatccaccagtccatcaccggcctgtacgagacccggatcgacctgtcccagctgggcggcgacggcgcccccgagtccgccaccgagtccggcggcacctccaccgagtccgagggctccgccggccccaagaagaagcggaaggtgacctccaccgagtccgagggctccgccggctccgccggctccacctccggctcctcctccggcatgaagatcgccgtggtggacaaggccctgaacaacacccggtacgacaagcacttccagctgtacggcgaggaggtggacgtgttccacatgtgcaacgagaagctgtccggccggctgctgaagaagcacatcaccatcggcacccccgagaaccccttcgaccccaacgactacgacttcgtgatcctggtgggcgccgagcccttcctgtacttcgccggcaagaagggcatcggcgactacaccggcaagcgggtggagtacaacggctacgccaactggatcgcctccatctcccccgcccagctgcacttcaagcccgagatgaagcccgtgttcgacgccaccgtggagaacatccacgacatcatcaacggccgggagaagatcgccaaggccggcgactaccggcccatcaccgaccccgacgaggccgaggagtacatcaagatggtgtacaacatggtgatcggccccgtggccttcgcctccgccacctccgccctgtactgccgggacggctacctgctgggcgtgtccatctcccaccaggagtaccagggcgtgtacatcgactccgactgcctgaccgaggtggccgtgtactacctgcagaagatcctggactccgagaaccacaccatcgtgttccacaacctgaagttcgacatgcacttctacaagtaccacctgggcctgaccttcgacaaggcccacaaggagcggcggctgcacgacaccatgctgcagcactacgtgctggacgagcggcggggcacccacggcctgaagtccctggccatgaagtacaccgacatgggcgactacgacttcgagctggacaagttcaaggacgactactgcaaggcccacaagatcaagaaggaggacttcacctacgacctgatccccttcgacatcatgtggccctacgccgccaaggacaccgacgccaccatccggctgcacaacttcttcctgcccaagatcgagaagaacgagaagctgtgctccctgtactacgacgtgctgatgcccggctgcgtgttcctgcagcgggtggaggaccggggcgtgcccatctccatcgaccggctgaaggaggcccagtaccagctgacccacaacctgaacaaggcccgggagaagctgtacacctaccccgaggtgaagcagctggagcaggaccagaacgaggccttcaaccccaactccgtgaagcagctgcgggtgctgctgttcgactacgtgggcctgacccccaccggcaagctgaccgacaccggcgccgactccaccgacgccgaggccctgaacgagctggccacccagcaccccatcgccaagaccctgctggagatccggaagctgaccaagctgatctccacctacgtggagaagatcctgctgtccatcgacgccgacggctgcatccggaccggcttccacgagcacatgaccacctccggccggctgtcctcctccggcaagctgaacctgcagcagctgccccgggacgagtccatcatcaagggctgcgtggtggccccccccggctaccgggtgatcgcctgggacctgaccaccgccgaggtgtactacgccgccgtgctgtccggcgaccggaacatgcagcaggtgttcatcaacatgcggaacgagcccgacaagtaccccgacttccactccaacatcgcccacatggtgttcaagctgcagtgcgagccccgggacgtgaagaagctgttccccgccctgcggcaggccgccaaggccatcaccttcggcatcctgtacggctccggccccgccaaggtggcccactccgtgaacgaggccctgctggagcaggccgccaagaccggcgagcccttcgtggagtgcaccgtggccgacgccaaggagtacatcgagacctacttcggccagttcccccagctgaagcggtggatcgacaagtgccacgaccagatcaagaaccacggcttcatctactcccacttcggccggaagcggcggctgcacaacatccactccgaggaccggggcgtgcagggcgaggagatccggtccggcttcaacgccatcatccagtccgcctcctccgactccctgctgctgggcgccgtggacgccgacaacgagatcatctccctgggcctggagcaggagatgaagatcgtgatgctggtgcacgactccgtggtggccatcgtgcgggaggacctgatcgaccagtacaacgagatcctgatccggaacatccagaaggaccggggcatctccatccccggctgccccatcggcatcgactccgactccgaggccggcggctcccgggactactcctgcggcaagatgaagaagcagcacccctccatcgcctgcatcgacgacgacgagtacacccggtacgtgaagggcgtgctgctggacgccgagttcgagtacaagaagctggccgccatggacaaggagcaccccgaccactccaagtacaaggacgacaagttcatcgccgtgtgcaaggacctggacaacgtgaagcggatcctgggcgccggcggcggctccggcaagcggaccgccgacggctccggcggcggctcccccaagaagaagcggaaggtgcctgccgctaagagagtgaagctggactagctagcaccagcctcaagaacacccgaatggagtctctaagctacataataccaacttacactttacaaaatgttgtcccccaaaatgtagccattcgtatctgctcctaataaaaagaaagtttcttcacattctctcgagaaaaaaaaaaaatggaaaaaaaaaaaacggaaaaaaaaaaaaggtaaaaaaaaaaaatataaaaaaaaaaaacataaaaaaaaaaaacgaaaaaaaaaaaacgtaaaaaaaaaaaactcaaaaaaaaaaaagataaaaaaaaaaaacctaaaaaaaaaaaatgtaaaaaaaaaaaagggaaaaaaaaaaaacgcaaaaaaaaaaaacacaaaaaaaaaaaatgcaaaaaaaaaaaatcgaaaaaaaaaaaatctaaaaaaaaaaaacgaaaaaaaaaaaacccaaaaaaaaaaaagacaaaaaaaaaaaatagaaaaaaaaaaagttaaaaaaaaaaaactgaaaaaaaaaaaatttaaaaaaaaaaaatctag

SEQ ID NO: 2595 - DNA, 7253 bp, synthetic construct
  misc_feature 1..7253: note = Synthetic
  source 1..7253: mol_type = other DNA
aggaagctcagaataaacgctcaactttggccggatctgccaccatgaagcggcccgccgccaccaagaaggccggccaggccaagaagaagaaggacaagaagtactccatcggcctggacatcggcaccaactccgtgggctgggccgtgatcaccgacgagtacaaggtgccctccaagaagttcaaggtgctgggcaacaccgaccggcactccatcaagaagaacctgatcggcgccctgctgttcgactccggcgagaccgccgaggccacccggctgaagcggaccgcccggcggcggtacacccggcggaagaaccggatctgctacctgcaggagatcttctccaacgagatggccaaggtggacgactccttcttccaccggctggaggagtccttcctggtggaggaggacaagaagcacgagcggcaccccatcttcggcaacatcgtggacgaggtggcctaccacgagaagtaccccaccatctaccacctgcggaagaagctggtggactccaccgacaaggccgacctgcggctgatctacctggccctggcccacatgatcaagttccggggccacttcctgatcgagggcgacctgaaccccgacaactccgacgtggacaagctgttcatccagctggtgcagacctacaaccagctgttcgaggagaaccccatcaacgcctccggcgtggacgccaaggccatcctgtccgcccggctgtccaagtcccggcggctggagaacctgatcgcccagctgcccggcgagaagaagaacggcctgttcggcaacctgatcgccctgtccctgggcctgacccccaacttcaagtccaacttcgacctggccgaggacgccaagctgcagctgtccaaggacacctacgacgacgacctggacaacctgctggcccagatcggcgaccagtacgccgacctgttcctggccgccaagaacctgtccgacgccatcctgctgtccgacatcctgcgggtgaacaccgagatcaccaaggcccccctgtccgcctccatgatcaagcggtacgacgagcaccaccaggacctgaccctgctgaaggccctggtgcggcagcagctgcccgagaagtacaaggagatcttcttcgaccagtccaagaacggctacgccggctacatcgacggcggcgcctcccaggaggagttctacaagttcatcaagcccatcctggagaagatggacggcaccgaggagctgctggtgaagctgaaccgggaggacctgctgcggaagcagcggaccttcgacaacggctccatcccccaccagatccacctgggcgagctgcacgccatcctgcggcggcaggaggacttctaccccttcctgaaggacaaccgggagaagatcgagaagatcctgaccttccggatcccctactacgtgggccccctggcccggggcaactcccggttcgcctggatgacccggaagtccgaggagaccatcaccccctggaacttcgaggaggtggtggacaagggcgcctccgcccagtccttcatcgagcggatgaccaacttcgacaagaacctgcccaacgagaaggtgctgcccaagcactccctgctgtacgagtacttcaccgtgtacaacgagctgaccaaggtgaagtacgtgaccgagggcatgcggaagcccgccttcctgtccggcgagcagaagaaggccatcgtggacctgctgttcaagaccaaccggaaggtgaccgtgaagcagctgaaggaggactacttcaagaagatcgagtgcttcgactccgtggagatctccggcgtggaggaccggttcaacgcctccctgggcacctaccacgacctgctgaagatcatcaaggacaaggacttcctggacaacgaggagaacgaggacatcctggaggacatcgtgctgaccctgaccctgttcgaggaccgggagatgatcgaggagcggctgaagacctacgcccacctgttcgacgacaaggtgatgaagcagctgaagcggcggcggtacaccggctggggccggctgtcccggaagctgatcaacggcatccgggacaagcagtccggcaagaccatcctggacttcctgaagtccgacggcttcgccaaccggaacttcatgcagctgatccacgacgactccctgaccttcaaggaggacatccagaaggcccaggtgtccggccagggcgactccctgcacgagcacatcgccaacctggccggctcccccgccatcaagaagggcatcctgcagaccgtgaaggtggtggacgagctggtgaaggtgatgggccggcacaagcccgagaacatcgtgatcgagatggcccgggagaaccagaccacccagaagggccagaagaactcccgggagcggatgaagcggatcgaggagggcatcaaggagctgggctcccagatcctgaaggagcaccccgtggagaacacccagctgcagaacgagaagctgtacctgtactacctgcagaacggccgggacatgtacgtggaccaggagctggacatcaaccggctgtccgactacgacgtggacgccatcgtgccccagtccttcctgaaggacgactccatcgacaacaaggtgctgacccggtccgacaagaaccggggcaagtccgacaacgtgccctccgaggaggtggtgaagaagatgaagaactactggcggcagctgctgaacgccaagctgatcacccagcggaagttcgacaacctgaccaaggccgagcggggcggcctgtccgagctggacaaggccggcttcatcaagcggcagctggtggagacccggcagatcaccaagcacgtggcccagatcctggactcccggatgaacaccaagtacgacgagaacgacaagctgatccgggaggtgaaggtgatcaccctgaagtccaagctggtgtccgacttccggaaggacttccagttctacaaggtgcgggagatcaacaactaccaccacgcccacgacgcctacctgaacgccgtggtgggcaccgccctgatcaagaagtaccccaagctggagtccgagttcgtgtacggcgactacaaggtgtacgacgtgcggaagatgatcgccaagtccgagcaggagatcggcaaggccaccgccaagtacttcttctactccaacatcatgaacttcttcaagaccgagatcaccctggccaacggcgagatccggaagcggcccctgatcgagaccaacggcgagaccggcgagatcgtgtgggacaagggccgggacttcgccaccgtgcggaaggtgctgtccatgccccaggtgaacatcgtgaagaagaccgaggtgcagaccggcggcttctccaaggagtccatcctgcccaagcggaactccgacaagctgatcgcccggaagaaggactgggaccccaagaagtacggcggcttcgactcccccaccgtggcctactccgtgctggtggtggccaaggtggagaagggcaagtccaagaagctgaagtccgtgaaggagctgctgggcatcaccatcatggagcggtcctccttcgagaagaaccccatcgacttcctggaggccaagggctacaaggaggtgaagaaggacctgatcatcaagctgcccaagtactccctgttcgagctggagaacggccggaagcggatgctggcctccgccggcgagctgcagaagggcaacgagctggccctgccctccaagtacgtgaacttcctgtacctggcctcccactacgagaagctgaagggctcccccgaggacaacgagcagaagcagctgttcgtggagcagcacaagcactacctggacgagatcatcgagcagatctccgagttctccaagcgggtgatcctggccgacgccaacctggacaaggtgctgtccgcctacaacaagcaccgggacaagcccatccgggagcaggccgagaacatcatccacctgttcaccctgaccaacctgggcgcccccgccgccttcaagtacttcgacaccaccatcgaccggaagcggtacacctccaccaaggaggtgctggacgccaccctgatccaccagtccatcaccggcctgtacgagacccggatcgacctgtcccagctgggcggcgacggcgcccccgagtccgccaccgagtccggcggcacctccaccgagtccgagggctccgccggccccaagaagaagcggaaggtgacctccaccgagtccgagggctccgccggctccgccggctccacctccggctcctcctccggcatgaagatcgccgtggtggacaaggccctgaacaacacccggtacgacaagcacttccagctgtacggcgaggaggtggacgtgttccacatgtgcaacgagaagctgtccggccggctgctgaagaagcacatcaccatcggcacccccgagaaccccttcgaccccaacgactacgacttcgtgatcctggtgggcgccgagcccttcctgtacttcgccggcaagaagggcatcggcgactacaccggcaagcgggtggagtacaacggctacgccaactggatcgcctccatctcccccgcccagctgcacttcaagcccgagatgaagcccgtgttcgacgccaccgtggagaacatccacgacatcatcaacggccgggagaagatcgccaaggccggcgactaccggcccatcaccgaccccgacgaggccgaggagtacatcaagatggtgtacaacatggtgatcggccccgtggccttcgcctccgccacctccgccctgtactgccgggacggctacctgctgggcgtgtccatctcccaccaggagtaccagggcgtgtacatcgactccgactgcctgaccgaggtggccgtgtactacctgcagaagatcctggactccgagaaccacaccatcgtgttccacaacctgaagttcgacatgcacttctacaagtaccacctgggcctgaccttcgacaaggcccacaaggagcggcggctgcacgacaccatgctgcagcactacgtgctggacgagcggcggggcacccacggcctgaagtccctggccatgaagtacaccgacatgggcgactacgacttcgagctggacaagttcaaggacgactactgcaaggcccacaagatcaagaaggaggacttcacctacgacctgatccccttcgacatcatgtggccctacgccgccaaggacaccgacgccaccatccggctgcacaacttcttcctgcccaagatcgagaagaacgagaagctgtgctccctgtactacgacgtgctgatgcccggctgcgtgttcctgcagcgggtggaggaccggggcgtgcccatctccatcgaccggctgaaggaggcccagtaccagctgacccacaacctgaacaaggcccgggagaagctgtacacctaccccgaggtgaagcagctggagcaggaccagaacgaggccttcaaccccaactccgtgaagcagctgcgggtgctgctgttcgactacgtgggcctgacccccaccggcaagctgaccgacaccggcgccgactccaccgacgccgaggccctgaacgagctggccacccagcaccccatcgccaagaccctgctggagatccggaagctgaccaagctgatctccacctacgtggagaagatcctgctgtccatcgacgccgacggctgcatccggaccggcttccacgagcacatgaccacctccggccggctgtcctcctccggcaagctgaacctgcagcagctgccccgggacgagtccatcatcaagggctgcgtggtggccccccccggctaccgggtgatcgcctgggacctgaccaccgccgaggtgtactacgccgccgtgctgtccggcgaccggaacatgcagcaggtgttcatcaacatgcggaacgagcccgacaagtaccccgacttccactccaacatcgcccacatggtgttcaagctgcagtgcgagccccgggacgtgaagaagctgttccccgccctgcggcaggccgccaaggccatcaccttcggcatcctgtacggctccggccccgccaaggtggcccactccgtgaacgaggccctgctggagcaggccgccaagaccggcgagcccttcgtggagtgcaccgtggccgacgccaaggagtacatcgagacctacttcggccagttcccccagctgaagcggtggatcgacaagtgccacgaccagatcaagaaccacggcttcatctactcccacttcggccggaagcggcggctgcacaacatccactccgaggaccggggcgtgcagggcgaggagatccggtccggcttcaacgccatcatccagtccgcctcctccgactccctgctgctgggcgccgtggacgccgacaacgagatcatctccctgggcctggagcaggagatgaagatcgtgatgctggtgcacgactccgtggtggccatcgtgcgggaggacctgatcgaccagtacaacgagatcctgatccggaacatccagaaggaccggggcatctccatccccggctgccccatcggcatcgactccgactccgaggccggcggctcccgggactactcctgcggcaagatgaagaagcagcacccctccatcgcctgcatcgacgacgacgagtacacccggtacgtgaagggcgtgctgctggacgccgagttcgagtacaagaagctggccgccatggacaaggagcaccccgaccactccaagtacaaggacgacaagttcatcgccgtgtgcaaggacctggacaacgtgaagcggatcctgggcgccggcggcggctccggcaagcggaccgccgacggctccggcggcggctcccccaagaagaagcggaaggtgcctgccgctaagagagtgaagctggactagctagcaccagcctcaagaacacccgaatggagtctctaagctacataataccaacttacactttacaaaatgttgtcccccaaaatgtagccattcgtatctgctcctaataaaaagaaagtttcttcacattctctcgagaaaaaaaaaaaaaaaaaaaaaaaaaaaaaaaaaaaaaaaaaaaaaaaaaaaaaaaaaaaaaaaaaaaaaaaaaaaaaaaaaaaaaaaaaaaaaaaaaaaatctag

SEQ ID NO: 2596 - DNA, 7562 bp, synthetic construct
  misc_feature 1..7562: note = Synthetic
  source 1..7562: mol_type = other DNA
aggactcactatttgttttcgcgcccagttgcaaaaagtgtcgaagctcagaataaacgctcaactttggccggatctgccaccatgaagcggcccgccgccaccaagaaggccggccaggccaagaagaagaaggacaagaagtactccatcggcctggacatcggcaccaactccgtgggctgggccgtgatcaccgacgagtacaaggtgccctccaagaagttcaaggtgctgggcaacaccgaccggcactccatcaagaagaacctgatcggcgccctgctgttcgactccggcgagaccgccgaggccacccggctgaagcggaccgcccggcggcggtacacccggcggaagaaccggatctgctacctgcaggagatcttctccaacgagatggccaaggtggacgactccttcttccaccggctggaggagtccttcctggtggaggaggacaagaagcacgagcggcaccccatcttcggcaacatcgtggacgaggtggcctaccacgagaagtaccccaccatctaccacctgcggaagaagctggtggactccaccgacaaggccgacctgcggctgatctacctggccctggcccacatgatcaagttccggggccacttcctgatcgagggcgacctgaaccccgacaactccgacgtggacaagctgttcatccagctggtgcagacctacaaccagctgttcgaggagaaccccatcaacgcctccggcgtggacgccaaggccatcctgtccgcccggctgtccaagtcccggcggctggagaacctgatcgcccagctgcccggcgagaagaagaacggcctgttcggcaacctgatcgccctgtccctgggcctgacccccaacttcaagtccaacttcgacctggccgaggacgccaagctgcagctgtccaaggacacctacgacgacgacctggacaacctgctggcccagatcggcgaccagtacgccgacctgttcctggccgccaagaacctgtccgacgccatcctgctgtccgacatcctgcgggtgaacaccgagatcaccaaggcccccctgtccgcctccatgatcaagcggtacgacgagcaccaccaggacctgaccctgctgaaggccctggtgcggcagcagctgcccgagaagtacaaggagatcttcttcgaccagtccaagaacggctacgccggctacatcgacggcggcgcctcccaggaggagttctacaagttcatcaagcccatcctggagaagatggacggcaccgaggagctgctggtgaagctgaaccgggaggacctgctgcggaagcagcggaccttcgacaacggctccatcccccaccagatccacctgggcgagctgcacgccatcctgcggcggcaggaggacttctaccccttcctgaaggacaaccgggagaagatcgagaagatcctgaccttccggatcccctactacgtgggccccctggcccggggcaactcccggttcgcctggatgacccggaagtccgaggagaccatcaccccctggaacttcgaggaggtggtggacaagggcgcctccgcccagtccttcatcgagcggatgaccaacttcgacaagaacctgcccaacgagaaggtgctgcccaagcactccctgctgtacgagtacttcaccgtgtacaacgagctgaccaaggtgaagtacgtgaccgagggcatgcggaagcccgccttcctgtccggcgagcagaagaaggccatcgtggacctgctgttcaagaccaaccggaaggtgaccgtgaagcagctgaaggaggactacttcaagaagatcgagtgcttcgactccgtggagatctccggcgtggaggaccggttcaacgcctccctgggcacctaccacgacctgctgaagatcatcaaggacaaggacttcctggacaacgaggagaacgaggacatcctggaggacatcgtgctgaccctgaccctgttcgaggaccgggagatgatcgaggagcggctgaagacctacgcccacctgttcgacgacaaggtgatgaagcagctgaagcggcggcggtacaccggctggggccggctgtcccggaagctgatcaacggcatccgggacaagcagtccggcaagaccatcctggacttcctgaagtccgacggcttcgccaaccggaacttcatgcagctgatccacgacgactccctgaccttcaaggaggacatccagaaggcccaggtgtccggccagggcgactccctgcacgagcacatcgccaacctggccggctcccccgccatcaagaagggcatcctgcagaccgtgaaggtggtggacgagctggtgaaggtgatgggccggcacaagcccgagaacatcgtgatcgagatggcccgggagaaccagaccacccagaagggccagaagaactcccgggagcggatgaagcggatcgaggagggcatcaaggagctgggctcccagatcctgaaggagcaccccgtggagaacacccagctgcagaacgagaagctgtacctgtactacctgcagaacggccgggacatgtacgtggaccaggagctggacatcaaccggctgtccgactacgacgtggacgccatcgtgccccagtccttcctgaaggacgactccatcgacaacaaggtgctgacccggtccgacaagaaccggggcaagtccgacaacgtgccctccgaggaggtggtgaagaagatgaagaactactggcggcagctgctgaacgccaagctgatcacccagcggaagttcgacaacctgaccaaggccgagcggggcggcctgtccgagctggacaaggccggcttcatcaagcggcagctggtggagacccggcagatcaccaagcacgtggcccagatcctggactcccggatgaacaccaagtacgacgagaacgacaagctgatccgggaggtgaaggtgatcaccctgaagtccaagctggtgtccgacttccggaaggacttccagttctacaaggtgcgggagatcaacaactaccaccacgcccacgacgcctacctgaacgccgtggtgggcaccgccctgatcaagaagtaccccaagctggagtccgagttcgtgtacggcgactacaaggtgtacgacgtgcggaagatgatcgccaagtccgagcaggagatcggcaaggccaccgccaagtacttcttctactccaacatcatgaacttcttcaagaccgagatcaccctggccaacggcgagatccggaagcggcccctgatcgagaccaacggcgagaccggcgagatcgtgtgggacaagggccgggacttcgccaccgtgcggaaggtgctgtccatgccccaggtgaacatcgtgaagaagaccgaggtgcagaccggcggcttctccaaggagtccatcctgcccaagcggaactccgacaagctgatcgcccggaagaaggactgggaccccaagaagtacggcggcttcgactcccccaccgtggcctactccgtgctggtggtggccaaggtggagaagggcaagtccaagaagctgaagtccgtgaaggagctgctgggcatcaccatcatggagcggtcctccttcgagaagaaccccatcgacttcctggaggccaagggctacaaggaggtgaagaaggacctgatcatcaagctgcccaagtactccctgttcgagctggagaacggccggaagcggatgctggcctccgccggcgagctgcagaagggcaacgagctggccctgccctccaagtacgtgaacttcctgtacctggcctcccactacgagaagctgaagggctcccccgaggacaacgagcagaagcagctgttcgtggagcagcacaagcactacctggacgagatcatcgagcagatctccgagttctccaagcgggtgatcctggccgacgccaacctggacaaggtgctgtccgcctacaacaagcaccgggacaagcccatccgggagcaggccgagaacatcatccacctgttcaccctgaccaacctgggcgcccccgccgccttcaagtacttcgacaccaccatcgaccggaagcggtacacctccaccaaggaggtgctggacgccaccctgatccaccagtccatcaccggcctgtacgagacccggatcgacctgtcccagctgggcggcgacggcgcccccgagtccgccaccgagtccggcggcacctccaccgagtccgagggctccgccggccccaagaagaagcggaaggtgacctccaccgagtccgagggctccgccggctccgccggctccacctccggctcctcctccggcatgaagatcgccgtggtggacaaggccctgaacaacacccggtacgacaagcacttccagctgtacggcgaggaggtggacgtgttccacatgtgcaacgagaagctgtccggccggctgctgaagaagcacatcaccatcggcacccccgagaaccccttcgaccccaacgactacgacttcgtgatcctggtgggcgccgagcccttcctgtacttcgccggcaagaagggcatcggcgactacaccggcaagcgggtggagtacaacggctacgccaactggatcgcctccatctcccccgcccagctgcacttcaagcccgagatgaagcccgtgttcgacgccaccgtggagaacatccacgacatcatcaacggccgggagaagatcgccaaggccggcgactaccggcccatcaccgaccccgacgaggccgaggagtacatcaagatggtgtacaacatggtgatcggccccgtggccttcgcctccgccacctccgccctgtactgccgggacggctacctgctgggcgtgtccatctcccaccaggagtaccagggcgtgtacatcgactccgactgcctgaccgaggtggccgtgtactacctgcagaagatcctggactccgagaaccacaccatcgtgttccacaacctgaagttcgacatgcacttctacaagtaccacctgggcctgaccttcgacaaggcccacaaggagcggcggctgcacgacaccatgctgcagcactacgtgctggacgagcggcggggcacccacggcctgaagtccctggccatgaagtacaccgacatgggcgactacgacttcgagctggacaagttcaaggacgactactgcaaggcccacaagatcaagaaggaggacttcacctacgacctgatccccttcgacatcatgtggccctacgccgccaaggacaccgacgccaccatccggctgcacaacttcttcctgcccaagatcgagaagaacgagaagctgtgctccctgtactacgacgtgctgatgcccggctgcgtgttcctgcagcgggtggaggaccggggcgtgcccatctccatcgaccggctgaaggaggcccagtaccagctgacccacaacctgaacaaggcccgggagaagctgtacacctaccccgaggtgaagcagctggagcaggaccagaacgaggccttcaaccccaactccgtgaagcagctgcgggtgctgctgttcgactacgtgggcctgacccccaccggcaagctgaccgacaccggcgccgactccaccgacgccgaggccctgaacgagctggccacccagcaccccatcgccaagaccctgctggagatccggaagctgaccaagctgatctccacctacgtggagaagatcctgctgtccatcgacgccgacggctgcatccggaccggcttccacgagcacatgaccacctccggccggctgtcctcctccggcaagctgaacctgcagcagctgccccgggacgagtccatcatcaagggctgcgtggtggccccccccggctaccgggtgatcgcctgggacctgaccaccgccgaggtgtactacgccgccgtgctgtccggcgaccggaacatgcagcaggtgttcatcaacatgcggaacgagcccgacaagtaccccgacttccactccaacatcgcccacatggtgttcaagctgcagtgcgagccccgggacgtgaagaagctgttccccgccctgcggcaggccgccaaggccatcaccttcggcatcctgtacggctccggccccgccaaggtggcccactccgtgaacgaggccctgctggagcaggccgccaagaccggcgagcccttcgtggagtgcaccgtggccgacgccaaggagtacatcgagacctacttcggccagttcccccagctgaagcggtggatcgacaagtgccacgaccagatcaagaaccacggcttcatctactcccacttcggccggaagcggcggctgcacaacatccactccgaggaccggggcgtgcagggcgaggagatccggtccggcttcaacgccatcatccagtccgcctcctccgactccctgctgctgggcgccgtggacgccgacaacgagatcatctccctgggcctggagcaggagatgaagatcgtgatgctggtgcacgactccgtggtggccatcgtgcgggaggacctgatcgaccagtacaacgagatcctgatccggaacatccagaaggaccggggcatctccatccccggctgccccatcggcatcgactccgactccgaggccggcggctcccgggactactcctgcggcaagatgaagaagcagcacccctccatcgcctgcatcgacgacgacgagtacacccggtacgtgaagggcgtgctgctggacgccgagttcgagtacaagaagctggccgccatggacaaggagcaccccgaccactccaagtacaaggacgacaagttcatcgccgtgtgcaaggacctggacaacgtgaagcggatcctgggcgccggcggcggctccggcaagcggaccgccgacggctccggcggcggctcccccaagaagaagcggaaggtgcctgccgctaagagagtgaagctggactagctagcaccagcctcaagaacacccgaatggagtctctaagctacataataccaacttacactttacaaaatgttgtcccccaaaatgtagccattcgtatctgctcctaataaaaagaaagtttcttcacattctctcgagaaaaaaaaaaaatggaaaaaaaaaaaacggaaaaaaaaaaaaggtaaaaaaaaaaaatataaaaaaaaaaaacataaaaaaaaaaaacgaaaaaaaaaaaacgtaaaaaaaaaaaactcaaaaaaaaaaaagataaaaaaaaaaaacctaaaaaaaaaaaatgtaaaaaaaaaaaagggaaaaaaaaaaaacgcaaaaaaaaaaaacacaaaaaaaaaaaatgcaaaaaaaaaaaatcgaaaaaaaaaaaatctaaaaaaaaaaaacgaaaaaaaaaaaacccaaaaaaaaaaaagacaaaaaaaaaaaatagaaaaaaaaaaagttaaaaaaaaaaaactgaaaaaaaaaaaatttaaaaaaaaaaaatctag

SEQ ID NO: 2597 - DNA, 7616 bp, synthetic construct
  misc_feature 1..7616: note = Synthetic
  source 1..7616: mol_type = other DNA
aggaagctcagaataaacgctcaactttggccggatctgccaccatgaagcggcccgccgccaccaagaaggccggccaggccaagaagaagaaggacaagaagtactccatcggcctggacatcggcaccaactccgtgggctgggccgtgatcaccgacgagtacaaggtgccctccaagaagttcaaggtgctgggcaacaccgaccggcactccatcaagaagaacctgatcggcgccctgctgttcgactccggcgagaccgccgaggccacccggctgaagcggaccgcccggcggcggtacacccggcggaagaaccggatctgctacctgcaggagatcttctccaacgagatggccaaggtggacgactccttcttccaccggctggaggagtccttcctggtggaggaggacaagaagcacgagcggcaccccatcttcggcaacatcgtggacgaggtggcctaccacgagaagtaccccaccatctaccacctgcggaagaagctggtggactccaccgacaaggccgacctgcggctgatctacctggccctggcccacatgatcaagttccggggccacttcctgatcgagggcgacctgaaccccgacaactccgacgtggacaagctgttcatccagctggtgcagacctacaaccagctgttcgaggagaaccccatcaacgcctccggcgtggacgccaaggccatcctgtccgcccggctgtccaagtcccggcggctggagaacctgatcgcccagctgcccggcgagaagaagaacggcctgttcggcaacctgatcgccctgtccctgggcctgacccccaacttcaagtccaacttcgacctggccgaggacgccaagctgcagctgtccaaggacacctacgacgacgacctggacaacctgctggcccagatcggcgaccagtacgccgacctgttcctggccgccaagaacctgtccgacgccatcctgctgtccgacatcctgcgggtgaacaccgagatcaccaaggcccccctgtccgcctccatgatcaagcggtacgacgagcaccaccaggacctgaccctgctgaaggccctggtgcggcagcagctgcccgagaagtacaaggagatcttcttcgaccagtccaagaacggctacgccggctacatcgacggcggcgcctcccaggaggagttctacaagttcatcaagcccatcctggagaagatggacggcaccgaggagctgctggtgaagctgaaccgggaggacctgctgcggaagcagcggaccttcgacaacggctccatcccccaccagatccacctgggcgagctgcacgccatcctgcggcggcaggaggacttctaccccttcctgaaggacaaccgggagaagatcgagaagatcctgaccttccggatcccctactacgtgggccccctggcccggggcaactcccggttcgcctggatgacccggaagtccgaggagaccatcaccccctggaacttcgaggaggtggtggacaagggcgcctccgcccagtccttcatcgagcggatgaccaacttcgacaagaacctgcccaacgagaaggtgctgcccaagcactccctgctgtacgagtacttcaccgtgtacaacgagctgaccaaggtgaagtacgtgaccgagggcatgcggaagcccgccttcctgtccggcgagcagaagaaggccatcgtggacctgctgttcaagaccaaccggaaggtgaccgtgaagcagctgaaggaggactacttcaagaagatcgagtgcttcgactccgtggagatctccggcgtggaggaccggttcaacgcctccctgggcacctaccacgacctgctgaagatcatcaaggacaaggacttcctggacaacgaggagaacgaggacatcctggaggacatcgtgctgaccctgaccctgttcgaggaccgggagatgatcgaggagcggctgaagacctacgcccacctgttcgacgacaaggtgatgaagcagctgaagcggcggcggtacaccggctggggccggctgtcccggaagctgatcaacggcatccgggacaagcagtccggcaagaccatcctggacttcctgaagtccgacggcttcgccaaccggaacttcatgcagctgatccacgacgactccctgaccttcaaggaggacatccagaaggcccaggtgtccggccagggcgactccctgcacgagcacatcgccaacctggccggctcccccgccatcaagaagggcatcctgcagaccgtgaaggtggtggacgagctggtgaaggtgatgggccggcacaagcccgagaacatcgtgatcgagatggcccgggagaaccagaccacccagaagggccagaagaactcccgggagcggatgaagcggatcgaggagggcatcaaggagctgggctcccagatcctgaaggagcaccccgtggagaacacccagctgcagaacgagaagctgtacctgtactacctgcagaacggccgggacatgtacgtggaccaggagctggacatcaaccggctgtccgactacgacgtggacgccatcgtgccccagtccttcctgaaggacgactccatcgacaacaaggtgctgacccggtccgacaagaaccggggcaagtccgacaacgtgccctccgaggaggtggtgaagaagatgaagaactactggcggcagctgctgaacgccaagctgatcacccagcggaagttcgacaacctgaccaaggccgagcggggcggcctgtccgagctggacaaggccggcttcatcaagcggcagctggtggagacccggcagatcaccaagcacgtggcccagatcctggactcccggatgaacaccaagtacgacgagaacgacaagctgatccgggaggtgaaggtgatcaccctgaagtccaagctggtgtccgacttccggaaggacttccagttctacaaggtgcgggagatcaacaactaccaccacgcccacgacgcctacctgaacgccgtggtgggcaccgccctgatcaagaagtaccccaagctggagtccgagttcgtgtacggcgactacaaggtgtacgacgtgcggaagatgatcgccaagtccgagcaggagatcggcaaggccaccgccaagtacttcttctactccaacatcatgaacttcttcaagaccgagatcaccctggccaacggcgagatccggaagcggcccctgatcgagaccaacggcgagaccggcgagatcgtgtgggacaagggccgggacttcgccaccgtgcggaaggtgctgtccatgccccaggtgaacatcgtgaagaagaccgaggtgcagaccggcggcttctccaaggagtccatcctgcccaagcggaactccgacaagctgatcgcccggaagaaggactgggaccccaagaagtacggcggcttcgactcccccaccgtggcctactccgtgctggtggtggccaaggtggagaagggcaagtccaagaagctgaagtccgtgaaggagctgctgggcatcaccatcatggagcggtcctccttcgagaagaaccccatcgacttcctggaggccaagggctacaaggaggtgaagaaggacctgatcatcaagctgcccaagtactccctgttcgagctggagaacggccggaagcggatgctggcctccgccggcgagctgcagaagggcaacgagctggccctgccctccaagtacgtgaacttcctgtacctggcctcccactacgagaagctgaagggctcccccgaggacaacgagcagaagcagctgttcgtggagcagcacaagcactacctggacgagatcatcgagcagatctccgagttctccaagcgggtgatcctggccgacgccaacctggacaaggtgctgtccgcctacaacaagcaccgggacaagcccatccgggagcaggccgagaacatcatccacctgttcaccctgaccaacctgggcgcccccgccgccttcaagtacttcgacaccaccatcgaccggaagcggtacacctccaccaaggaggtgctggacgccaccctgatccaccagtccatcaccggcctgtacgagacccggatcgacctgtcccagctgggcggcgacggcgcccccgagtccgccaccgagtccggcggcacctccaccgagtccgagggctccgccggccccaagaagaagcggaaggtgacctccaccgagtccgagggctccgccggctccgccggctccacctccggctcctcctccggcatgaagatcgccgtggtggacaaggccctgaacaacacccggtacgacaagcacttccagctgtacggcgaggaggtggacgtgttccacatgtgcaacgagaagctgtccggccggctgctgaagaagcacatcaccatcggcacccccgagaaccccttcgaccccaacgactacgacttcgtgatcctggtgggcgccgagcccttcctgtacttcgccggcaagaagggcatcggcgactacaccggcaagcgggtggagtacaacggctacgccaactggatcgcctccatctcccccgcccagctgcacttcaagcccgagatgaagcccgtgttcgacgccaccgtggagaacatccacgacatcatcaacggccgggagaagatcgccaaggccggcgactaccggcccatcaccgaccccgacgaggccgaggagtacatcaagatggtgtacaacatggtgatcggccccgtggccttcgcctccgccacctccgccctgtactgccgggacggctacctgctgggcgtgtccatctcccaccaggagtaccagggcgtgtacatcgactccgactgcctgaccgaggtggccgtgtactacctgcagaagatcctggactccgagaaccacaccatcgtgttccacaacctgaagttcgacatgcacttctacaagtaccacctgggcctgaccttcgacaaggcccacaaggagcggcggctgcacgacaccatgctgcagcactacgtgctggacgagcggcggggcacccacggcctgaagtccctggccatgaagtacaccgacatgggcgactacgacttcgagctggacaagttcaaggacgactactgcaaggcccacaagatcaagaaggaggacttcacctacgacctgatccccttcgacatcatgtggccctacgccgccaaggacaccgacgccaccatccggctgcacaacttcttcctgcccaagatcgagaagaacgagaagctgtgctccctgtactacgacgtgctgatgcccggctgcgtgttcctgcagcgggtggaggaccggggcgtgcccatctccatcgaccggctgaaggaggcccagtaccagctgacccacaacctgaacaaggcccgggagaagctgtacacctaccccgaggtgaagcagctggagcaggaccagaacgaggccttcaaccccaactccgtgaagcagctgcgggtgctgctgttcgactacgtgggcctgacccccaccggcaagctgaccgacaccggcgccgactccaccgacgccgaggccctgaacgagctggccacccagcaccccatcgccaagaccctgctggagatccggaagctgaccaagctgatctccacctacgtggagaagatcctgctgtccatcgacgccgacggctgcatccggaccggcttccacgagcacatgaccacctccggccggctgtcctcctccggcaagctgaacctgcagcagctgccccgggacgagtccatcatcaagggctgcgtggtggccccccccggctaccgggtgatcgcctgggacctgaccaccgccgaggtgtactacgccgccgtgctgtccggcgaccggaacatgcagcaggtgttcatcaacatgcggaacgagcccgacaagtaccccgacttccactccaacatcgcccacatggtgttcaagctgcagtgcgagccccgggacgtgaagaagctgttccccgccctgcggcaggccgccaaggccatcaccttcggcatcctgtacggctccggccccgccaaggtggcccactccgtgaacgaggccctgctggagcaggccgccaagaccggcgagcccttcgtggagtgcaccgtggccgacgccaaggagtacatcgagacctacttcggccagttcccccagctgaagcggtggatcgacaagtgccacgaccagatcaagaaccacggcttcatctactcccacttcggccggaagcggcggctgcacaacatccactccgaggaccggggcgtgcagggcgaggagatccggtccggcttcaacgccatcatccagtccgcctcctccgactccctgctgctgggcgccgtggacgccgacaacgagatcatctccctgggcctggagcaggagatgaagatcgtgatgctggtgcacgactccgtggtggccatcgtgcgggaggacctgatcgaccagtacaacgagatcctgatccggaacatccagaaggaccggggcatctccatccccggctgccccatcggcatcgactccgactccgaggccggcggctcccgggactactcctgcggcaagatgaagaagcagcacccctccatcgcctgcatcgacgacgacgagtacacccggtacgtgaagggcgtgctgctggacgccgagttcgagtacaagaagctggccgccatggacaaggagcaccccgaccactccaagtacaaggacgacaagttcatcgccgtgtgcaaggacctggacaacgtgaagcggatcctgggcgccggcggcggctccggcaagcggaccgccgacggctccggcggcggctcccccaagaagaagcggaaggtgcctgccgctaagagagtgaagctggactagctagcaccagcctcaagaacacccgaatggagtctctaagctacataataccaacttacactttacaaaatgttgtcccccaaaatgtagccattcgtatctgctcctaataaaaagaaagtttcttcacattcttgtcagcccagaaccccacacgagttttgccactgctaagctgtgaggcagtgcaggctgggacagccgacctccaggttgcgaaaaacctggtctcgagaaaaaaaaaaaatggaaaaaaaaaaaacggaaaaaaaaaaaaggtaaaaaaaaaaaatataaaaaaaaaaaacataaaaaaaaaaaacgaaaaaaaaaaaacgtaaaaaaaaaaaactcaaaaaaaaaaaagataaaaaaaaaaaacctaaaaaaaaaaaatgtaaaaaaaaaaaagggaaaaaaaaaaaacgcaaaaaaaaaaaacacaaaaaaaaaaaatgcaaaaaaaaaaaatcgaaaaaaaaaaaatctaaaaaaaaaaaacgaaaaaaaaaaaacccaaaaaaaaaaaagacaaaaaaaaaaaatagaaaaaaaaaaagttaaaaaaaaaaaactgaaaaaaaaaaaatttaaaaaaaaaaaatctag

SEQ ID NO: 2598 - DNA, 7656 bp, synthetic construct
  misc_feature 1..7656: note = Synthetic
  source 1..7656: mol_type = other DNA
aggactcactatttgttttcgcgcccagttgcaaaaagtgtcgaagctcagaataaacgctcaactttggccggatctgccaccatgaagcggcccgccgccaccaagaaggccggccaggccaagaagaagaaggacaagaagtactccatcggcctggacatcggcaccaactccgtgggctgggccgtgatcaccgacgagtacaaggtgccctccaagaagttcaaggtgctgggcaacaccgaccggcactccatcaagaagaacctgatcggcgccctgctgttcgactccggcgagaccgccgaggccacccggctgaagcggaccgcccggcggcggtacacccggcggaagaaccggatctgctacctgcaggagatcttctccaacgagatggccaaggtggacgactccttcttccaccggctggaggagtccttcctggtggaggaggacaagaagcacgagcggcaccccatcttcggcaacatcgtggacgaggtggcctaccacgagaagtaccccaccatctaccacctgcggaagaagctggtggactccaccgacaaggccgacctgcggctgatctacctggccctggcccacatgatcaagttccggggccacttcctgatcgagggcgacctgaaccccgacaactccgacgtggacaagctgttcatccagctggtgcagacctacaaccagctgttcgaggagaaccccatcaacgcctccggcgtggacgccaaggccatcctgtccgcccggctgtccaagtcccggcggctggagaacctgatcgcccagctgcccggcgagaagaagaacggcctgttcggcaacctgatcgccctgtccctgggcctgacccccaacttcaagtccaacttcgacctggccgaggacgccaagctgcagctgtccaaggacacctacgacgacgacctggacaacctgctggcccagatcggcgaccagtacgccgacctgttcctggccgccaagaacctgtccgacgccatcctgctgtccgacatcctgcgggtgaacaccgagatcaccaaggcccccctgtccgcctccatgatcaagcggtacgacgagcaccaccaggacctgaccctgctgaaggccctggtgcggcagcagctgcccgagaagtacaaggagatcttcttcgaccagtccaagaacggctacgccggctacatcgacggcggcgcctcccaggaggagttctacaagttcatcaagcccatcctggagaagatggacggcaccgaggagctgctggtgaagctgaaccgggaggacctgctgcggaagcagcggaccttcgacaacggctccatcccccaccagatccacctgggcgagctgcacgccatcctgcggcggcaggaggacttctaccccttcctgaaggacaaccgggagaagatcgagaagatcctgaccttccggatcccctactacgtgggccccctggcccggggcaactcccggttcgcctggatgacccggaagtccgaggagaccatcaccccctggaacttcgaggaggtggtggacaagggcgcctccgcccagtccttcatcgagcggatgaccaacttcgacaagaacctgcccaacgagaaggtgctgcccaagcactccctgctgtacgagtacttcaccgtgtacaacgagctgaccaaggtgaagtacgtgaccgagggcatgcggaagcccgccttcctgtccggcgagcagaagaaggccatcgtggacctgctgttcaagaccaaccggaaggtgaccgtgaagcagctgaaggaggactacttcaagaagatcgagtgcttcgactccgtggagatctccggcgtggaggaccggttcaacgcctccctgggcacctaccacgacctgctgaagatcatcaaggacaaggacttcctggacaacgaggagaacgaggacatcctggaggacatcgtgctgaccctgaccctgttcgaggaccgggagatgatcgaggagcggctgaagacctacgcccacctgttcgacgacaaggtgatgaagcagctgaagcggcggcggtacaccggctggggccggctgtcccggaagctgatcaacggcatccgggacaagcagtccggcaagaccatcctggacttcctgaagtccgacggcttcgccaaccggaacttcatgcagctgatccacgacgactccctgaccttcaaggaggacatccagaaggcccaggtgtccggccagggcgactccctgcacgagcacatcgccaacctggccggctcccccgccatcaagaagggcatcctgcagaccgtgaaggtggtggacgagctggtgaaggtgatgggccggcacaagcccgagaacatcgtgatcgagatggcccgggagaaccagaccacccagaagggccagaagaactcccgggagcggatgaagcggatcgaggagggcatcaaggagctgggctcccagatcctgaaggagcaccccgtggagaacacccagctgcagaacgagaagctgtacctgtactacctgcagaacggccgggacatgtacgtggaccaggagctggacatcaaccggctgtccgactacgacgtggacgccatcgtgccccagtccttcctgaaggacgactccatcgacaacaaggtgctgacccggtccgacaagaaccggggcaagtccgacaacgtgccctccgaggaggtggtgaagaagatgaagaactactggcggcagctgctgaacgccaagctgatcacccagcggaagttcgacaacctgaccaaggccgagcggggcggcctgtccgagctggacaaggccggcttcatcaagcggcagctggtggagacccggcagatcaccaagcacgtggcccagatcctggactcccggatgaacaccaagtacgacgagaacgacaagctgatccgggaggtgaaggtgatcaccctgaagtccaagctggtgtccgacttccggaaggacttccagttctacaaggtgcgggagatcaacaactaccaccacgcccacgacgcctacctgaacgccgtggtgggcaccgccctgatcaagaagtaccccaagctggagtccgagttcgtgtacggcgactacaaggtgtacgacgtgcggaagatgatcgccaagtccgagcaggagatcggcaaggccaccgccaagtacttcttctactccaacatcatgaacttcttcaagaccgagatcaccctggccaacggcgagatccggaagcggcccctgatcgagaccaacggcgagaccggcgagatcgtgtgggacaagggccgggacttcgccaccgtgcggaaggtgctgtccatgccccaggtgaacatcgtgaagaagaccgaggtgcagaccggcggcttctccaaggagtccatcctgcccaagcggaactccgacaagctgatcgcccggaagaaggactgggaccccaagaagtacggcggcttcgactcccccaccgtggcctactccgtgctggtggtggccaaggtggagaagggcaagtccaagaagctgaagtccgtgaaggagctgctgggcatcaccatcatggagcggtcctccttcgagaagaaccccatcgacttcctggaggccaagggctacaaggaggtgaagaaggacctgatcatcaagctgcccaagtactccctgttcgagctggagaacggccggaagcggatgctggcctccgccggcgagctgcagaagggcaacgagctggccctgccctccaagtacgtgaacttcctgtacctggcctcccactacgagaagctgaagggctcccccgaggacaacgagcagaagcagctgttcgtggagcagcacaagcactacctggacgagatcatcgagcagatctccgagttctccaagcgggtgatcctggccgacgccaacctggacaaggtgctgtccgcctacaacaagcaccgggacaagcccatccgggagcaggccgagaacatcatccacctgttcaccctgaccaacctgggcgcccccgccgccttcaagtacttcgacaccaccatcgaccggaagcggtacacctccaccaaggaggtgctggacgccaccctgatccaccagtccatcaccggcctgtacgagacccggatcgacctgtcccagctgggcggcgacggcgcccccgagtccgccaccgagtccggcggcacctccaccgagtccgagggctccgccggccccaagaagaagcggaaggtgacctccaccgagtccgagggctccgccggctccgccggctccacctccggctcctcctccggcatgaagatcgccgtggtggacaaggccctgaacaacacccggtacgacaagcacttccagctgtacggcgaggaggtggacgtgttccacatgtgcaacgagaagctgtccggccggctgctgaagaagcacatcaccatcggcacccccgagaaccccttcgaccccaacgactacgacttcgtgatcctggtgggcgccgagcccttcctgtacttcgccggcaagaagggcatcggcgactacaccggcaagcgggtggagtacaacggctacgccaactggatcgcctccatctcccccgcccagctgcacttcaagcccgagatgaagcccgtgttcgacgccaccgtggagaacatccacgacatcatcaacggccgggagaagatcgccaaggccggcgactaccggcccatcaccgaccccgacgaggccgaggagtacatcaagatggtgtacaacatggtgatcggccccgtggccttcgcctccgccacctccgccctgtactgccgggacggctacctgctgggcgtgtccatctcccaccaggagtaccagggcgtgtacatcgactccgactgcctgaccgaggtggccgtgtactacctgcagaagatcctggactccgagaaccacaccatcgtgttccacaacctgaagttcgacatgcacttctacaagtaccacctgggcctgaccttcgacaaggcccacaaggagcggcggctgcacgacaccatgctgcagcactacgtgctggacgagcggcggggcacccacggcctgaagtccctggccatgaagtacaccgacatgggcgactacgacttcgagctggacaagttcaaggacgactactgcaaggcccacaagatcaagaaggaggacttcacctacgacctgatccccttcgacatcatgtggccctacgccgccaaggacaccgacgccaccatccggctgcacaacttcttcctgcccaagatcgagaagaacgagaagctgtgctccctgtactacgacgtgctgatgcccggctgcgtgttcctgcagcgggtggaggaccggggcgtgcccatctccatcgaccggctgaaggaggcccagtaccagctgacccacaacctgaacaaggcccgggagaagctgtacacctaccccgaggtgaagcagctggagcaggaccagaacgaggccttcaaccccaactccgtgaagcagctgcgggtgctgctgttcgactacgtgggcctgacccccaccggcaagctgaccgacaccggcgccgactccaccgacgccgaggccctgaacgagctggccacccagcaccccatcgccaagaccctgctggagatccggaagctgaccaagctgatctccacctacgtggagaagatcctgctgtccatcgacgccgacggctgcatccggaccggcttccacgagcacatgaccacctccggccggctgtcctcctccggcaagctgaacctgcagcagctgccccgggacgagtccatcatcaagggctgcgtggtggccccccccggctaccgggtgatcgcctgggacctgaccaccgccgaggtgtactacgccgccgtgctgtccggcgaccggaacatgcagcaggtgttcatcaacatgcggaacgagcccgacaagtaccccgacttccactccaacatcgcccacatggtgttcaagctgcagtgcgagccccgggacgtgaagaagctgttccccgccctgcggcaggccgccaaggccatcaccttcggcatcctgtacggctccggccccgccaaggtggcccactccgtgaacgaggccctgctggagcaggccgccaagaccggcgagcccttcgtggagtgcaccgtggccgacgccaaggagtacatcgagacctacttcggccagttcccccagctgaagcggtggatcgacaagtgccacgaccagatcaagaaccacggcttcatctactcccacttcggccggaagcggcggctgcacaacatccactccgaggaccggggcgtgcagggcgaggagatccggtccggcttcaacgccatcatccagtccgcctcctccgactccctgctgctgggcgccgtggacgccgacaacgagatcatctccctgggcctggagcaggagatgaagatcgtgatgctggtgcacgactccgtggtggccatcgtgcgggaggacctgatcgaccagtacaacgagatcctgatccggaacatccagaaggaccggggcatctccatccccggctgccccatcggcatcgactccgactccgaggccggcggctcccgggactactcctgcggcaagatgaagaagcagcacccctccatcgcctgcatcgacgacgacgagtacacccggtacgtgaagggcgtgctgctggacgccgagttcgagtacaagaagctggccgccatggacaaggagcaccccgaccactccaagtacaaggacgacaagttcatcgccgtgtgcaaggacctggacaacgtgaagcggatcctgggcgccggcggcggctccggcaagcggaccgccgacggctccggcggcggctcccccaagaagaagcggaaggtgcctgccgctaagagagtgaagctggactagctagcaccagcctcaagaacacccgaatggagtctctaagctacataataccaacttacactttacaaaatgttgtcccccaaaatgtagccattcgtatctgctcctaataaaaagaaagtttcttcacattcttgtcagcccagaaccccacacgagttttgccactgctaagctgtgaggcagtgcaggctgggacagccgacctccaggttgcgaaaaacctggtctcgagaaaaaaaaaaaatggaaaaaaaaaaaacggaaaaaaaaaaaaggtaaaaaaaaaaaatataaaaaaaaaaaacataaaaaaaaaaaacgaaaaaaaaaaaacgtaaaaaaaaaaaactcaaaaaaaaaaaagataaaaaaaaaaaacctaaaaaaaaaaaatgtaaaaaaaaaaaagggaaaaaaaaaaaacgcaaaaaaaaaaaacacaaaaaaaaaaaatgcaaaaaaaaaaaatcgaaaaaaaaaaaatctaaaaaaaaaaaacgaaaaaaaaaaaacccaaaaaaaaaaaagacaaaaaaaaaaaatagaaaaaaaaaaagttaaaaaaaaaaaactgaaaaaaaaaaaatttaaaaaaaaaaaatctag

SEQ ID NO: 2599 - DNA, 7612 bp, synthetic construct
  misc_feature 1..7612: note = Synthetic
  source 1..7612: mol_type = other DNA
aggactcactatttgttttcgcgcccagttgcaaaaagtgtcgaaaaaaaaaaaaccaaaaaaaaaaaacaaaaaaaaaaaataattgactaaaagctcagaataaacgctcaactttggccggatctgccaccatgaagcggcccgccgccaccaagaaggccggccaggccaagaagaagaaggacaagaagtactccatcggcctggacatcggcaccaactccgtgggctgggccgtgatcaccgacgagtacaaggtgccctccaagaagttcaaggtgctgggcaacaccgaccggcactccatcaagaagaacctgatcggcgccctgctgttcgactccggcgagaccgccgaggccacccggctgaagcggaccgcccggcggcggtacacccggcggaagaaccggatctgctacctgcaggagatcttctccaacgagatggccaaggtggacgactccttcttccaccggctggaggagtccttcctggtggaggaggacaagaagcacgagcggcaccccatcttcggcaacatcgtggacgaggtggcctaccacgagaagtaccccaccatctaccacctgcggaagaagctggtggactccaccgacaaggccgacctgcggctgatctacctggccctggcccacatgatcaagttccggggccacttcctgatcgagggcgacctgaaccccgacaactccgacgtggacaagctgttcatccagctggtgcagacctacaaccagctgttcgaggagaaccccatcaacgcctccggcgtggacgccaaggccatcctgtccgcccggctgtccaagtcccggcggctggagaacctgatcgcccagctgcccggcgagaagaagaacggcctgttcggcaacctgatcgccctgtccctgggcctgacccccaacttcaagtccaacttcgacctggccgaggacgccaagctgcagctgtccaaggacacctacgacgacgacctggacaacctgctggcccagatcggcgaccagtacgccgacctgttcctggccgccaagaacctgtccgacgccatcctgctgtccgacatcctgcgggtgaacaccgagatcaccaaggcccccctgtccgcctccatgatcaagcggtacgacgagcaccaccaggacctgaccctgctgaaggccctggtgcggcagcagctgcccgagaagtacaaggagatcttcttcgaccagtccaagaacggctacgccggctacatcgacggcggcgcctcccaggaggagttctacaagttcatcaagcccatcctggagaagatggacggcaccgaggagctgctggtgaagctgaaccgggaggacctgctgcggaagcagcggaccttcgacaacggctccatcccccaccagatccacctgggcgagctgcacgccatcctgcggcggcaggaggacttctaccccttcctgaaggacaaccgggagaagatcgagaagatcctgaccttccggatcccctactacgtgggccccctggcccggggcaactcccggttcgcctggatgacccggaagtccgaggagaccatcaccccctggaacttcgaggaggtggtggacaagggcgcctccgcccagtccttcatcgagcggatgaccaacttcgacaagaacctgcccaacgagaaggtgctgcccaagcactccctgctgtacgagtacttcaccgtgtacaacgagctgaccaaggtgaagtacgtgaccgagggcatgcggaagcccgccttcctgtccggcgagcagaagaaggccatcgtggacctgctgttcaagaccaaccggaaggtgaccgtgaagcagctgaaggaggactacttcaagaagatcgagtgcttcgactccgtggagatctccggcgtggaggaccggttcaacgcctccctgggcacctaccacgacctgctgaagatcatcaaggacaaggacttcctggacaacgaggagaacgaggacatcctggaggacatcgtgctgaccctgaccctgttcgaggaccgggagatgatcgaggagcggctgaagacctacgcccacctgttcgacgacaaggtgatgaagcagctgaagcggcggcggtacaccggctggggccggctgtcccggaagctgatcaacggcatccgggacaagcagtccggcaagaccatcctggacttcctgaagtccgacggcttcgccaaccggaacttcatgcagctgatccacgacgactccctgaccttcaaggaggacatccagaaggcccaggtgtccggccagggcgactccctgcacgagcacatcgccaacctggccggctcccccgccatcaagaagggcatcctgcagaccgtgaaggtggtggacgagctggtgaaggtgatgggccggcacaagcccgagaacatcgtgatcgagatggcccgggagaaccagaccacccagaagggccagaagaactcccgggagcggatgaagcggatcgaggagggcatcaaggagctgggctcccagatcctgaaggagcaccccgtggagaacacccagctgcagaacgagaagctgtacctgtactacctgcagaacggccgggacatgtacgtggaccaggagctggacatcaaccggctgtccgactacgacgtggacgccatcgtgccccagtccttcctgaaggacgactccatcgacaacaaggtgctgacccggtccgacaagaaccggggcaagtccgacaacgtgccctccgaggaggtggtgaagaagatgaagaactactggcggcagctgctgaacgccaagctgatcacccagcggaagttcgacaacctgaccaaggccgagcggggcggcctgtccgagctggacaaggccggcttcatcaagcggcagctggtggagacccggcagatcaccaagcacgtggcccagatcctggactcccggatgaacaccaagtacgacgagaacgacaagctgatccgggaggtgaaggtgatcaccctgaagtccaagctggtgtccgacttccggaaggacttccagttctacaaggtgcgggagatcaacaactaccaccacgcccacgacgcctacctgaacgccgtggtgggcaccgccctgatcaagaagtaccccaagctggagtccgagttcgtgtacggcgactacaaggtgtacgacgtgcggaagatgatcgccaagtccgagcaggagatcggcaaggccaccgccaagtacttcttctactccaacatcatgaacttcttcaagaccgagatcaccctggccaacggcgagatccggaagcggcccctgatcgagaccaacggcgagaccggcgagatcgtgtgggacaagggccgggacttcgccaccgtgcggaaggtgctgtccatgccccaggtgaacatcgtgaagaagaccgaggtgcagaccggcggcttctccaaggagtccatcctgcccaagcggaactccgacaagctgatcgcccggaagaaggactgggaccccaagaagtacggcggcttcgactcccccaccgtggcctactccgtgctggtggtggccaaggtggagaagggcaagtccaagaagctgaagtccgtgaaggagctgctgggcatcaccatcatggagcggtcctccttcgagaagaaccccatcgacttcctggaggccaagggctacaaggaggtgaagaaggacctgatcatcaagctgcccaagtactccctgttcgagctggagaacggccggaagcggatgctggcctccgccggcgagctgcagaagggcaacgagctggccctgccctccaagtacgtgaacttcctgtacctggcctcccactacgagaagctgaagggctcccccgaggacaacgagcagaagcagctgttcgtggagcagcacaagcactacctggacgagatcatcgagcagatctccgagttctccaagcgggtgatcctggccgacgccaacctggacaaggtgctgtccgcctacaacaagcaccgggacaagcccatccgggagcaggccgagaacatcatccacctgttcaccctgaccaacctgggcgcccccgccgccttcaagtacttcgacaccaccatcgaccggaagcggtacacctccaccaaggaggtgctggacgccaccctgatccaccagtccatcaccggcctgtacgagacccggatcgacctgtcccagctgggcggcgacggcgcccccgagtccgccaccgagtccggcggcacctccaccgagtccgagggctccgccggccccaagaagaagcggaaggtgacctccaccgagtccgagggctccgccggctccgccggctccacctccggctcctcctccggcatgaagatcgccgtggtggacaaggccctgaacaacacccggtacgacaagcacttccagctgtacggcgaggaggtggacgtgttccacatgtgcaacgagaagctgtccggccggctgctgaagaagcacatcaccatcggcacccccgagaaccccttcgaccccaacgactacgacttcgtgatcctggtgggcgccgagcccttcctgtacttcgccggcaagaagggcatcggcgactacaccggcaagcgggtggagtacaacggctacgccaactggatcgcctccatctcccccgcccagctgcacttcaagcccgagatgaagcccgtgttcgacgccaccgtggagaacatccacgacatcatcaacggccgggagaagatcgccaaggccggcgactaccggcccatcaccgaccccgacgaggccgaggagtacatcaagatggtgtacaacatggtgatcggccccgtggccttcgcctccgccacctccgccctgtactgccgggacggctacctgctgggcgtgtccatctcccaccaggagtaccagggcgtgtacatcgactccgactgcctgaccgaggtggccgtgtactacctgcagaagatcctggactccgagaaccacaccatcgtgttccacaacctgaagttcgacatgcacttctacaagtaccacctgggcctgaccttcgacaaggcccacaaggagcggcggctgcacgacaccatgctgcagcactacgtgctggacgagcggcggggcacccacggcctgaagtccctggccatgaagtacaccgacatgggcgactacgacttcgagctggacaagttcaaggacgactactgcaaggcccacaagatcaagaaggaggacttcacctacgacctgatccccttcgacatcatgtggccctacgccgccaaggacaccgacgccaccatccggctgcacaacttcttcctgcccaagatcgagaagaacgagaagctgtgctccctgtactacgacgtgctgatgcccggctgcgtgttcctgcagcgggtggaggaccggggcgtgcccatctccatcgaccggctgaaggaggcccagtaccagctgacccacaacctgaacaaggcccgggagaagctgtacacctaccccgaggtgaagcagctggagcaggaccagaacgaggccttcaaccccaactccgtgaagcagctgcgggtgctgctgttcgactacgtgggcctgacccccaccggcaagctgaccgacaccggcgccgactccaccgacgccgaggccctgaacgagctggccacccagcaccccatcgccaagaccctgctggagatccggaagctgaccaagctgatctccacctacgtggagaagatcctgctgtccatcgacgccgacggctgcatccggaccggcttccacgagcacatgaccacctccggccggctgtcctcctccggcaagctgaacctgcagcagctgccccgggacgagtccatcatcaagggctgcgtggtggccccccccggctaccgggtgatcgcctgggacctgaccaccgccgaggtgtactacgccgccgtgctgtccggcgaccggaacatgcagcaggtgttcatcaacatgcggaacgagcccgacaagtaccccgacttccactccaacatcgcccacatggtgttcaagctgcagtgcgagccccgggacgtgaagaagctgttccccgccctgcggcaggccgccaaggccatcaccttcggcatcctgtacggctccggccccgccaaggtggcccactccgtgaacgaggccctgctggagcaggccgccaagaccggcgagcccttcgtggagtgcaccgtggccgacgccaaggagtacatcgagacctacttcggccagttcccccagctgaagcggtggatcgacaagtgccacgaccagatcaagaaccacggcttcatctactcccacttcggccggaagcggcggctgcacaacatccactccgaggaccggggcgtgcagggcgaggagatccggtccggcttcaacgccatcatccagtccgcctcctccgactccctgctgctgggcgccgtggacgccgacaacgagatcatctccctgggcctggagcaggagatgaagatcgtgatgctggtgcacgactccgtggtggccatcgtgcgggaggacctgatcgaccagtacaacgagatcctgatccggaacatccagaaggaccggggcatctccatccccggctgccccatcggcatcgactccgactccgaggccggcggctcccgggactactcctgcggcaagatgaagaagcagcacccctccatcgcctgcatcgacgacgacgagtacacccggtacgtgaagggcgtgctgctggacgccgagttcgagtacaagaagctggccgccatggacaaggagcaccccgaccactccaagtacaaggacgacaagttcatcgccgtgtgcaaggacctggacaacgtgaagcggatcctgggcgccggcggcggctccggcaagcggaccgccgacggctccggcggcggctcccccaagaagaagcggaaggtgcctgccgctaagagagtgaagctggactagctagcaccagcctcaagaacacccgaatggagtctctaagctacataataccaacttacactttacaaaatgttgtcccccaaaatgtagccattcgtatctgctcctaataaaaagaaagtttcttcacattctctcgagaaaaaaaaaaaatggaaaaaaaaaaaacggaaaaaaaaaaaaggtaaaaaaaaaaaatataaaaaaaaaaaacataaaaaaaaaaaacgaaaaaaaaaaaacgtaaaaaaaaaaaactcaaaaaaaaaaaagataaaaaaaaaaaacctaaaaaaaaaaaatgtaaaaaaaaaaaagggaaaaaaaaaaaacgcaaaaaaaaaaaacacaaaaaaaaaaaatgcaaaaaaaaaaaatcgaaaaaaaaaaaatctaaaaaaaaaaaacgaaaaaaaaaaaacccaaaaaaaaaaaagacaaaaaaaaaaaatagaaaaaaaaaaagttaaaaaaaaaaaactgaaaaaaaaaaaatttaaaaaaaaaaaatctag

(The sequence listing continues in the following parts.)